United States Patent Application Publication US 2007/0054278 A1 - sequence listing, part 69

SEQ ID NO: 95767 - DNA, 157953 bp, Homo sapiens
tgcttcttagtgggtggatctgctagtaatgaattcactcagtttctgtttgtctgaggtagtcttaatttctctttcattttcaaggacagttttgctgaatatagaattctaggtctgctcttccttccgttccttttattactttgaatgtgtcatcttactgccttctggtctctatggtttctggtgagaaaacagttgttaattttattgaggattctttgtacatgaggagttgcttgtttcttgctgctttcaagagtctctccatctttggttttagatagtttgattatgatgtatctcagtatgcttctctttgagttcattttagttgacagtttgattatgatgtatctcagtatgcttctctttgagttcattttagttggagtttgttgaaatttttggattatagattaatttttaaatcaaatttggaaaggttttagtgaatatttttttctgcacttttatctccctcctctccttctggtactcccaattggtactagatatatcttagcatacttgatggcgtctactgatctcttaggctctgttcatctttcttcattgatttttcctatatgttcctcagactaggcagtatccatggacttatcctcaattttgctaattcttctgccactcaatcctgctattgtccccctataatggatttttcatttcagttattatacctttcaattacagagtttctttatatatagttatataattcctatatctttaactacactctctttttggtgagatattgttctcatactttcctttaatttttgacacatggtttccatcagttctttgaacacatttataatagctaattttaggtcttcgtctagtaagtctacaatttatgcatttttaatgacagtctgttgactgccttccagcctgtgtccttttctgcctgtttatgtgtcttacaactttttgctaaaatatagacactaaaaataatgtaatgtggcaactctgaaaaccatgtttccctttcccccagggtttgctgttgttactgtttttatttctttgatgcctttcttggactaattttgtaaagtctgtattctttgtcatctgtagtcactgatacgtcactgtagccatttgtagtccttactcagttagcttaattgttcactaatgatgagagaaatgctctatcattcctcaaatgctagaatcaaagatttttttttcctttgtttatggtgggactatgtgtgcatattaatgcatgccttcaattttcaggcagacaattcacagctttgcctcagccttcacatcctgcttgctcaaagcctcacagttagccagaagtaaaacctgggcattctcagatttccagaaatatgttaatcttttttttttttctgttagatgagatcttgctatgttgcccatagcatagttgagatcttgctatgttgtccagtggctattcacaggtgcaatcataacacactacagcctcaaactcctgggctcgagtgatccttccacctcagcctcctgagtagctgggaccataggcatgtgccaccaggcagcttatgttaaatctttttaatgccccctccccatggacatctcattcttcatttttctttttcaagtttttcagtcagcctattgttagctgtaactggtgtcactacctgaggctgctgtaatattaaacaattgttactgattgttttcaacaatgccctgtggagaggaccatttgcacagggcaagctctgagttatgccaattaaagacaaaccctgggaatgtagcttttccaggaagctgccagacaagtaaatagtgccaagactctggggatggggctctttcaggtgctccacatcctttttgtccctccagtggctgctagactgctcttatggttgcagggctgttggttttcaaggttacacatactctttcttcttcttcttctttttttttttttttgagacagggtctcactttgttgcccaggctcactgcaacccctgcctcctgggttcaagtgattcttgtgccttaacctcctgagtagctgggattacaagcatgcaccactatgccaggctaatttttatatttcaagtagagacagggtttcatcatgttggccaggctggtctcaaactcctgacctcaagtgatcctcccgcctcagcctccccaaatgctgagattacaggtggagccaccgtgctcagcctcaaggttacacatattctatgtagtcgtccctcagtatccatgggagattggttccaggacctctggtggatatgaaaatccatggatgctcatgtcccttatataaaatggggtagtttttttcatataacctatgcacatcctcctgtatactttcaatcatctctagattacttataatacttaatacaatgtaaatgttatgtaaatcattgttatactctattgtttaaggaataatgacaagaaaaaaaagtccatacaagttcagtacagatgcgatttttttttccagacatttttgatctgtgatttggttgaatccatggatgtggaaaccatagatttggatagctgactgtatccctacaaaaatatcctgttaaatggcctgaagataaattctcatgtaggatggttctagtcctaaagataacactgttcacctcttaattattgtatgtagataatctgaatcagcttgcagcaggtcgagccacagacaaaactccttgacactgagttaaagaaggaaggggtttattcagtcggcagcaccggcaagactcctgtctcaagagccaagctccctgagtgagcaattcctgtcccttttaagggctcacaactctaagggggtccgtgtgagagggtcatgatcaatcgagcaagtaggggtacatgactgggggctgcatgcacgggtaatcagaatggaacaggacaggacagggatttttacaatgcttttccatacaatatctggaatctatagataacataactggttaggtcaggggtcaatctttaactagcaggcctagggcgcggcgctgggctgtctgcctgtggatttcatttctgcctttcagtttttacttcttctttctttggaggcagaaattgggcataagacaatatgaggggtggtcccctcccttaagcttacttattgtatatagatcatttaagtcagtatgttcatcagaatcccttggagggcttgttaaaatacaggtcacttggccccacttctagagtttctgattcagcagatctgggatggggtctgggaatttgcatttctagcaagttctgggaggatgttgatgtgactggttagggaccccatgttgagaacttctgaaggactgagatactttaccaccagcatacttagctatcacatcgtgatgcttagggaagatatagcatgatattgtaaaccaaaaggtgtctgagacagatctgtcaatttagaggtttattttgccaaggttgaggatgcaactgggaaaatgaggcacaaactacagtaggatcagtaggatctgtggcctatgctttttcccaagagggttttggggacttcaatacttaaagaggaaaaagtgggcaggaggggaaagaagaacagtgaattatgcatttttacataaggtaagtaaacagagagtagaggaagaggtcaaatatgcatttgtcttggggtgggtggaaggatgattcctccgcttgtctttgtcccattcctgtgacgataagctgttaatttacattgtcagggtgagggaggccacctggggagatatgtggccttctatcttgcagctatctctttaggaacaaaaggaaggcagttttttttgcatgattcagttcccaagcttagcttttccctttggagtagtgagtttgggggtcccgagattttattttccttttacagtattaactaacacatggctcccttttctcttgataattttcattctacggtggaattagggcctcattctttgccacactgaaaatgtgattgatctttgaagattatccagaattacataacagtcaagtgacagatgttattggaagctgatcctcattcagtgttactgtactaaatgaatgaatactgaaattagactgatatctatttttaaatctttataaatttaatttttttttcttttttaaaagttagtgtttaacaactttcttagcttgattatgactgccaggcgtggtggctcacgcctgtaattccagcaccttgggaggccgaggcgggtggatcacctgaggtcaggagttcaagaccagcctgaccaacatggagaaaccctgtctctactaaaaatacaaatttagccagggtggtggcacatgcctgtaatcccagctacttgggaggctgaggcaggagaattgcttgaacctgggaggcagaggttgcggtgagccgagatcgcgccattgcattccagcctaggcaaaaagagcgaaactccatcccaaaaataaataaataaacagcatggccataaaatttattgtttgaacaggaatacatttgagagtgaaagagggccctattaataattttgctgcaaaaagatgtaaactggggctgttccaagcaaactaattggtcacagtaattaaaaaaaatgcaaaaatatttttgcatttctacaaatttgattttcttggctttaactttgtactgtggagtcaaggttctgtcaatatttctttccatttagctggagaaataataagagggaactgttttattactaagttacttttcagaagagaaataaaataaaaagtaaagaaataaaaatttaaaactaggacattttctttttcttttttcttttcttttcttttcttttttttttttttttttttagagatacagggtgttgctctgtctcccaggctgacactgcagcctcaaattcctctgctcaatcgatgctcctgcctcaggctccccaaaaaactcgttttatatttgtttatttttattccagactattgtctgtattttggtgacatgaggaggatcagacataattctaaatgagttcagagaattcttaatttccattcctaactggttaatctcttttgtttttgaagcaaattatatgtttaaatgctctgcctgagaagtattctggtttattgaattaaaatcattttaagaatttttttttcggataaaatgtgaagactcaaagataaggatacattcagtccagtatttgcccttgctcaaggagaaatgctgttttaaagtcaaagtgaaaattttcttccaaaacttctgattattgtttttgtctatggaaaaatagaaacttggggcaaagtgtaaggactgatgctgttgcaagtctgttagtgcacacttatgcacacaggccagaacaggtccggaaggacatacacttagaggttagcaattttcttttttttgcaagtctgtattttcaaagaattaagattttaattttttgcttgtctggttggaatgttcagtttcctaaacatctcctggggagtgagtacgtctgcacttcaggaagtgctcttgtccggagggcaaaaggttgggggcgcatccccgggtcgcggctcctccaggaaactttcccttggggatccgtcagggcctcagatgcctcagtggatgacagggtgaagatgccatcgctcagtcaagtccagaagttcaagaactccttgcaggtgaagcagtcacaggatagggtgggatcttgtgggaacctagcagtaggaattggcgcgagcagctcggtcaccggccctactgtctcagagggcggacccagctcgggctggtagtggggcgggggtcgcagggcgcgggccgggccctcagcgcgcatgcgcgacaagggggcggggccagggcggggctgcgcccggcgtctagagcggcggcggctggctagggctgcggcgcgcgtggagggttcgctgctggtttgccgccgggtcgggctccgtgggccggggcaggaggaccagcacctgaggccgggcccgcagcccgcgacttcacagccaggcggcggcgctgctgctgctgcggggctctggcgcgcagcccggcgggacagcggggcggctggcgccgggggccggggagcgccaggtaggtgggccgggccgggcaggaggcgacgcggccgccgcgggggccggggccggggacggacagcgggcgcgggggcgcgtccaggtccccgctggggcggatgtggacggcgcccgcggttttcatggaaattgcactgcctaacggtgccagtggtccacctgcggtggcgtcttttgagaacaatccgagcccggccgacccccagccccgtgaagacgcggccgccccagcagggagccgggtgccgagcgggcgcgtggccgcgggacgcagacgcggtgcctgcccgatgcggctccagggctgggtctacsggctcctgaagctggaggccttgccgtgtttggggtggaaacataaccgggtgaaagtaaacatgcatctccgtgtgggaaatctggtctccatcctcgaaactcttccattttctgcctgcctttagaccccgacaacatttctagcatctttgctttctatattttatttctctctggctttgctagtcaattaattgaggcctgagaaatgtgcagggatctgtggctgtctcttgaaaagccagccaggaatgggtaggccccagaagacagacgttcaaaatgtcagaggtaaatttgtgtctttgtgggcgaaggaagggaatgttgatggtctcgcttcccttcccctgtcgcctgccctctgacattacataatgatgggttcttcctgccccgagttcatccgtaatgacagaccatgaaaatgttcctctgggtaagaaagacctatatgtggtagagcccatcttctcttttgctttgccactgaatgtgtcttgtgttgggaacctgcctaagagtggaatttgatttgtcgcctgcccctcagggcatttaaaccaagggaatgggggtggggtggcgatttgggtgttgcagagaaattctgactggtccatctgttcacagtgggttgtgtggaccatggggaagccagtggggttgaggacagagtgggttgacttcggtgtgaatcatggttctgccgcttgctgactctggttcttatctctaaaaggtgagagcagagccttttttgctgagtttgttttggaatctagctgctgttggcgttggccagtgcacgtagaattgcttgctataggttgtcctagaattgagcctaatttttctttggttgaaaaacacactttctttaacggaaattttgtttttggatctaggctagggcatttgttttgggggttctttgctgaagtgtcgactgctaatgtactgttttctttgaagaaagatgaatgatggggcccatgtaagaagggcagtgtggttggtctgttgcaggagtggtgccaggaggccgtgatgctgtctgtcccaggggtggcgttgcatgtgaacgggcctctcggtgcctcattccctgtgatgtctagtaaacacgcctgtgaagccagagctgcttggtagagtttggcttgaagaaaaggcttaaagaaatggatgtggacaaattcaaagagaaagaaacattgtgtttctactgagctccttatagaattagtctgcttacctggccaccttactcatcawgtagctacttttttcatttagattattctgtctcagggtgtttaatctgcttgggtaagtcttgtttcccaactagattcagaaccaagggcagatattatagtgcctccctgttttcaaaactggatattttgtagtattgctgttaaactgaatattagcgtttttwaaaaaaawatcactttaaggaaggatgaaataaaataatacacgagagctatttgtaaactgtagagcactagaaaaatgggatgtgtatgacagagaactatcagccctgcaagtccctttaaccagctgcctgcctaagagggagcgttctcagccaacatctcttcaaatgcacacgggaatggacctgaaggcggtgtgggaccgactgccccactgatccccagcccagggcttaacatctcaagagttcagtgaggcagagtggagggggaggctttccaccaagactgtttcatcctgttttcgtttttaaatgaaaagctccttttyagtttagtattccagaaaagttgccacaacatcatcaactactcatggtgtcaggaggctttgactttcactgagaaaaaaatagcacaaatctgcagcraaaaaggcttgattatgttggtgcttctgtagaacttgattaatgagctggtcttgagagagccttcgaaacggctttttttttcagtgtcctaaaacagaagttctgtgaggaaaacatattttgaggagaccaatattaacgcccatgcaggcttgcttcattttgtctctgtgtttttaaggaaaataccatcatgaagctaatcccagggaatttacctatatttctattcatatgcacatgttattctctaattttttttttttagtattwtgatatagtttcagacttacagaaaagttgcaagaataagccaaaggtttctcagattctccaaatgtggacattctgttacactgctttatcattctcttgtattcctgtgtgttactactttttcctgaactgcttaatagtaagttgcaggcttgaggcccttttacctctaaatacttcactgtgtatttcccaaaaaacaaggatattcataacagcagtaatccccgcactttgggaggccgaggcgggcggatcacaagatcaggagatcgagaccatcctggctaacacggtgaaaccctatctctactaaaaatacaaaaaattagccgggcttagtggtgggcgcctgtagtcccagctgcttgggaggctgaggcaggagaatggcgtgaacctgggaggcggatcttgcagtgagcagagatcgcaccactgcactccagcctggaggacagagcgagactctgtctcaaaaaaaaaaaaaaaaaaaaaaatcatggccgggcgcagtggctcatgcctataatcccagcaatttgggaggctgaggtgggaggatcacttgagtccaggagtttgagaccagcctggccaacatgatgaaatactgtctctactaaaaatacaaaaattagctgggtatagtggcgtgtgctcgtagtccgagctacttgggaggctaaggcatgagaatctcttgaactcaggaggtggaggttgcagtgagccgagatcacaccactgcactctagcctaggcagcagagtgagactgtctcaaaaaaaaaaaaaaaaaaaaatcatgaaattaatgttgatataacactatttagtgtacaggtcgtatttagattttgtcaattgcttcgataatgtcctttatagcaaaagaaaatcctagatcatctgttttgcattaagtttttctgtctctgtagtgtcctttaatctgaaagttaccacgtctttcttttgtatttcacgacatagacatatttgaagactactgactttttaagataatgccctcaattgggtttcctgtggtttcatgattagattcaggttatgcacttctggcgggagtagcacaaggttgaagcagttgtagtcttcttttctctctctctctctctttttttttttttttttttaaagagacaaggtctcccttcgttggagtgcagtggtgccatggcagctcactacagcttggacctactccactcagtgatccttctgctttagcctcctgagtagctggactataggtgtgtgccattgcacctggccaatttttaaatattttataggggctggatctcacactgtgttgcccaggctggtctcagactcctactctcgccatcctcctgcgttggccgaccacagtgctgagtttacaggcgtgagccactgtgcccgamtaatgctgcagccttcttaatgtatcccatcaggaggcatatgctgtgattatcccattctctggccctgctaactttgatcacttgaattaaggtggtgtctatctcatggaaaagttaccatttttccctttgtagttaatctgtgtcttaaaggaagagaatttgagactatgtaaatatagttactgctcatacaattaactgactagtttcagaattcattgatgtttcttacctgagtcaattattatgatagtaggcagatgatgattttcatggttccttctatatttattagttggaactgtactgaaaggaagaaaccttcctttctctattatttactttttgatttacatcactggactcatgaattcttgctttattcaatagattatagtccattactcccattatgcattttgttgctcaaattatcctagatttggccagtgggagtcccttcagtctggcttttgtgtccttttgacaagtgctcatcattctttgaggacttttcttccaggcacaaaatcttcaaggactcagcttatactttccttgtcccagccctggaatcagccatttctccaaagagtcctggtttcctttagtggagagtggtataaaaaccgagatgtaggcactatgtattctcgttgctactgaggtgtcacccattctagaccttctcaggggatagatgctctcattgtaaacataaatgtagtcacattacacaaaattttctgtggcttgctttttaaatttgtactccttccattaggctttgaaactgtctgtttccctttaacttggccaacatttaagagaataaatcttgttaattttgccaatctaatgggcaaggaagacattattgttttaattgcatttcccaaattaccaaaaatattggataccttttcttgttaatgtatattttaacttctaatgaattacctgtttatatcctttgttcattttttcttgttgggctgtttttccttatcttactagattgtggaagttacggtaactttgaattttattcttggcagctttagaatgtttttttaagtgtgatgcttttttaatttttttttaaagtcctaaatgacaaggaacccaagcttttctgagtaccccctgcatgccaggcctccctggacatcctgtgggaggttctgtccaaaggtgagctgtggtgttgaggagtggttagagcatcccccgagggtagttaaaagaggctcaactgggactaaaacccagttatatcacctaacttccttcacaggattgaaaaatgaaagcttttcaatgagggataaaaattgattacctggatttgccagtatcaacaatttctgttttcagtattttggtttataaatcaggaatttcttttacacagtcctttttgctgagcatacacatctttcgaaaccatttattttatccctagaactattgtggactctggtgctgcactttctgtgagcatccagctagctgtgtgactttgggcaagtggcttaatctttctgtgcctcagttatttcatccacaaaactgggctgctggtagtagcagccccagaggcttgttgggggattaaatgaattaacatttaatcctggtgcctagtaagtgtgcagaacggaagcattacaatggattcgtatacagagtgtgggtggttggcagagcttggaattagatcagcctttcctctgtggatttaatctcttagttgtctctttctgttttttttgagatggagtctcactctgtcgcctaggctagagtgcagtggctctagcctgcaacctcggctcactgcaacctccgccccctgggttcaagcagtactcctgcctcaccctccctagtagctgagattacaggcatataccaccatgcctggctaattttgtatttttagtagagacggggtttcaccatgttggccaggctgttcttgaactcctcacctcaggtgatccacccacctctgccccccaaagtgctgggattacaggcatgagccactgcacccggccttagctgtccctttcaccatagcctgtctgggattggaaagccagggtcctgggtgcagtgtgcatgtctctttctggtctttgcacatacctttgtcatgccctatcaggctgtcaggcccaggcctgccagccagccagcccagctggcctctggtgtttgcccacagccctaacctggagcatgggtgagactgctggccttttaatatgaaacttgttcagtgaggctcacctggcgagggacttaggcacagtaagcagatgtatatggtgggggcagtggggggatcatgctctggtgaggtctattttctggaatagggtcaggaagacagggatgtcctctgatgtccaggaagaagggtggggacctctgaaagaggaaagtgtttacccgctgccagctccggtcctgggatcctcctagagcgctttccctgagacacctggtagttttcctgacctccggttgctgyagcgcccctctttttgcacctcactaggtggtattctgatgtctcctgaaaaccccctgcccctttcctgcccctcccatagccctcacgcaggtggtgtcagctgctgttatggaagctgtctattattaattcaccctagcatattgaacgcccttctttccctctctcatgttgcttgcatctctaaakggtgtattctcaaaccaattaatttgaattttcaagaaggatgacctaagtgtataaactctggaaatgtgaaggaagtatttaggcagatggttgtttctgggaaacagggctctactaggaaacaaggatgcccagttcaagcttctccctggattatggggtgtgtcagttgggatgcttttggttgccaacagtgacatttattatctcagagaactggagtctccatcagcatgtcagcagtttcatcaaggacctcgattctgctcctctgtccagccatcactgccggtttcatcctagggggttagtctcctcatgattctgagatggtcgttgggggcagtgggactgcgtgcttccttgttcctgtccagcaggagcagggaaggagacaaagcagctgattccccagccacagtgtctaccagtccttccctctggcctgtggagcaaagggtcacgtggccttccctggaccagcaacatgaggctgtgagagtgctgtgtgctggttggcttaggctggtggtcctccaggtgtggtcctcagaccagtagcatcagcattacctgagaacttgttagaactggagattagtggatcctaccccacccactgaatcagaaactctgggatggggcccagaaagctgtgctttaagaagacttccaggtgattctgatgcaaggtcacattggagaacagctcttttagtttaatcaagactcccctactccccagctggagacagggctgacttttcctgaggaccggggaggaggttaggtcctagaatagcaagaaggaagagaggatggtgggtggccagcccacagtgtgaactagccagtgtttacggccctgggggccgctttgctctccggagtccttcccctgccccccattcgccagcttgtccacccatataagtttctcagcccccttgcctcaagcttctccagctcctccaagcatggcctgtactctccctgtacarctcggtgctaaaggaagcaacctcagtaacactccagctccaggtccctctctggcctagcagggatggagtctacctggctggtgctgaagagtcccaaagagctgttatgactcaccttctgaagccattcctgaagtgtgttcatttgtgtaggggttgcctacgctgctactccttgctcagctaggaaaaaagagcagtgcagttagtaggtgcttgagaaatatttagggaattggcctggagacagcccaagtgactactttcagtggtgatttttacctgtgttatgtccccttttttgcaagtacaactccaacttgatgtttgggtgaaataaatagccacctccacggtgtaatttgtgagatcacaatgacccacttttccgaatttttcctgaaactaaagagttgagatatttctgggttttcagctttaaagattcatcttaatacataaaaataacgtttaggagtagtcttgcactgagctctaaccacattagcactaattattgcggaaggaagggcacctgaggaggaaacatgctagagaagggtccacacagcatgtttcaaaatgcartggttcatgaaatcartttgaggttgtaactggcattaaaaagctttttgaaatagcaaatatccaagtacgtttcctatgggaaggataagcattttttggtaaaacatctagttattcacatgtagtgtatttggggtgttgttatggtgtgactgtttcttagagtggattttggtaaagatgtgtcaaaccctagggctgagtgcagggggtcctaacctgtaggaaggtggggcctacgctggatgtgtatacacttggggtcttttcctgggcgtgcgacctgtgacttttgtcagaacctggtggtctgtgactcgccatagatcaagaaccaatgacctaaaaccagaggagactttcagtggtgagggccagtgggagtggagctgggggcgtgaggagcaggcacaaagtcctgagcctggtcctgctctggcrtattgttcgtggtagtaagccatctgagccaaatcctcctgatgaggagtcctctgcacagccacactgacagacaggagagacagtggcaggcagtgtgttgatcacctgaggtcgggggttcaagaccatcctggccaacgtagtgaaaacccgtctctactaaaaatacaaaaattagctgggtgtggtggtgcacacctgtaatcccagctacttgggaggctgaggcaggagaatcgcttgaacccaggaggtggaggttgcagtgagccgagatcacatcactgcactccagcctgggtgacagggcaaaactccctctcaaaaaaaaatttaactctggatgccagatgggtcctttacctaacaggtggatcagcatatttctacataagagagagagagagagtctccttgtttggggctggccccagtgaaagcattgctgcttttgactccccgctggaatcctctgtgccttaacactgtcaggacagttcccaaggctggcttagagtcagctatgatccccattatttaatgcaggcgctagtctggtttgtatcacaaagcttatgtagtagtggctttggcatgtctgtgtttgttttttgggggtaggggcaagttggattgtagtgctggatgtgaacccaagtcagctttctcatctgtaaaatggggaaggtgctaggctcacaggagggtggtggggattgataatatacataggagagggctgtgaactgcagtgcactggaccggtgcaaacatgaatgtttcgacccctgctccacttgacagtcttggtaactgttttccccacagtactcttatttttcacatgtgctcaaagggctggagtacaccctattgttgactcctgctcagggtaccttccaggggaaatatcacagaagagggaggtgctgagaggcagggacatccagcgaagttgagaggagaaggatgtgggcggggggtgggaggaggaagtggagggcttgcactctgtaaactcttagtcagctggtcactgacccaactgagccttttactgacactgtttttttaaagaatggaaggactaaggattgtatgagctgaaatgttgagtattttcacatttcttattcattcttcgtgctctgtgtatacaaatgttaaatgatcacattacataattgggtgatactcaaatggcaatacagtggtatgtttgacagaacccaatgttttaaaatagggctaggtgccaagaaatgtcaggataggctgagtaaggtgactcaggccagtgatcccagcactttgggaggccaaggcaggaggatctcttgagcccaggagttcagaccggcctgagcaacaaagcaagaccttgtctctactaaaaattaaaaaattagccaggtatagtagtgcacacctatattcccagcttcttgggaggctgaggcgggaggatcacttgaatccaggaggtcgaggctgcagtgagctatgatcgcaccagtgcactccaacctgggtgacagagtgagaccctgtctctacaaaaaaagaaaaaaaaaagataccccagaatcttccaaatattgtcattcctatggtttggaagaggggagtgagtaaatggattggccttagggacgacaccttgctggtagactgtgcccacctcaggtagaagggaagcgctagcagtctcatttgtggtttgtccccaacttgccagtgacttggtgaagtcatgcctgaatctcaccctcctcctttcttgttcatctagtgaaggtgatttcctttgttcctcccccgtcgaatcctccctgacagtggaatggagtggtgatagtgcccaggggctacatgggtgaagtgtggtatgttcttgatttagttggcattggactaagacacacacacacatacaagtgtctatttagggaagttgttctttggtctgttgccttggaaatactgcctttttattctttcactttctctcccctctgcagtgattcagcagtagctttctagagaagaagaaacatagtgtcagagaccctggagtaccaaggatatgtcagtggagagggaagctgcctgtgtgtcacacagaccacattcttcctggtccagctagagcgtcccgtgcctttccttggcttttccagcctctctccatcactccttctgaggccctttgcagacagtcccccagtacaactacagcatttttgtaagtccagcccttgtcattttcccattgactgatggagaccacttgactccagcatactttatgcacacttatcttctggttcaggtctggactgtctttctctttctggcagctttctttcctgttagccattcctgacttgtttcaaaaaggatacatggacttgaaattaccagttaaagcagaaaatgattaaaaagaaaaaaagggcttcaaatgtcaaatggatacaactatataagttgtagaaggtgctctgaacacgttacagggaggttgccattgctaaaagcttttacattttttatttatttatttttagagacagagtcttgctgtgttgcccaggctggagtgcagtggtgtgatcatagctcactgtagccttgacctcctgggctcaagcatcctcctgcctcagcctcccaagtagcaatgactgcatgcgtgtgccaccacacttggctaatttttaattttaattttttctagagactgggtcttgttgtgttgctcaggctggtcttgaactccgggcatcaagcaatcctcctgcctcagcctcccaaattgctgggattacagggcatgagccactgtacccagctacttttacgtttttcattctcacccctttcttctggaaacactgcagagaccatgagaacaggagcttgtcttacttgatagtgcaaacagtcttacaaatagtgttcaaccatcgattgcccaaaacacgtgttttgtgactrttattgtaggtgcctttgaactgtatggtgtgttaaataactccattggagggaggaagatctttgtgttttgagttgattatttaattattctttaattagtctaatgtctttaccaagctagatattaatatcttttgtcaaagagagaagaaagccagtggatgggttgtgaagtggtgaggggccacttcacaaatggtgagtgggtgggtttttatttccagcagtgtcactggaaacaactttgtaccaacttgcatggtaaggagcattcaggttttaaagttaatctcattcagtttctcctgtgggacaacattggcctttctcattggggatttgactgttgggccttgtccctgggtatgtcccagcccagacactcagggcactggccaccctgcctcagcccctctggagcaaagagagttttaagcagtagtggatgtaactcatttaaaataggattagatctagctgggttagcttagtggcatgcacctggtgaggctgtattctctagctacttgggagaccgaggcaggaggattgcatgagcccaggagtttgataccagcctggtcggtatagtgagaccagcctgtctcaaacaaacaaacaaaaacaggattacatgagctatgactaaattccagggcagtaactgctgtgtcattctttgggaactggtcatcccaggatttgatcagtgtttcatatcataggttggctgttttgtaaactattaggattgtaccagtgtttgtcatgggaactagcagcctgtgacgtagactgtgaacctaacttaattgactactgtaatgaatacaaacagttgctatttttacctcagaacgtagatttgtctgcaaattaaacatttgagacaataaacaggagtttggtttattaaagctgtttgagcttgctacttaggcaggcctagaaataggattggctagctttttctgattatgtagatgttgactatattagggagaaactcttatttttgttttattttattttagagacggggtctcgctctgttgcccaggctatagtgtagtagacagccatagctcgctgcagcctcaaactctagggctcaagcagttctcccacctcagcctcccaattagcaaggactacaggcatatgccactgtgcccagctaattaaacaaaaawttttttttttttttttttttgtttaaatgaggtcttgttatgttgcccaggctggtctggaactcctggcctcaaatgatcctcctgccttaacctccgaaagtgcttggattgcaagcatgagccatcacaccctgcctaacttaacgtttaaacaaggcttgagcctgggcaaaatagtgaaacttcatctttactaaaaattaaaaaattagctgggcatggtggtgcacacacwtctgtagtcccagctgctcaggaggctgaggcaggaggatagcttcagcccaggagttcaaagttgcagtgagctatgattgtaccgctgcactccagtcttggtgacaggggcttgcctctgcctcagaaaaaaaaaatcatcaaatagccctttctcaccttctctaccctgggagtggctacggataggcagcaactgaacacaacacgtttcctggtacccaagatgaatcattgctgcctgtgatgcctgagcctagtgattatcttccagattgttttgctagccagttctttctccataaaaacattcagattttttttcctctttgagagtggagtattttacttgagggagctgaccaccgaacttcatagaaatgccttcctgccccttcatggctgtgctgttctgtgtgttttttggggcttgctttcccattctgctggtatcctgggtgagactctggcccaatgaatgggatgctgcacattttttttccaggagaaacaaaaggtgttgggacccctaagtatgcagcatgtatgcagagagtgaggcatggccaggggggatgtggctctgatttccacattgcatctccagaccttaagcgggtaggcagcatcggcggatcatggcagggagagaagtacagcggaggcgaagttctcaaagcatggctgactgtggaaggtggctctcagcacactctttgtggcccgctaacacccgtcaggatggtagccaccacacgcccaaaggcacccgaagtgcttgattttgactgacttttaccacatttgccaccagtgtgattggagcattcatggagcacagaatatgacaccaagtcaggattgcatagtgctcaggcagagctttgtccttcggaaatgccgctcactcatgagacaagatggatagttcaggtctggactggcccaggagtgggagtgacactgagtagacctcggccaggggcttgcccctaaaccagtggtccctgcacctgggaaaatcagcactctgattgcctcacctggtttcccgcccactcctccctaccctggttgagtggcctaagggagggtagagttcagggagctattaggaggaagggggtcgctgctgagtagccaaaaggaaaaacaacatgaaagtaagaaagtctaccaggacaccctggagggctggcgtgcagagtgctgagggggacacctgtgtccgtgtttgggaggccctcttaccctctcctccttggtgtgcaactggttaatagtaattccttgagggtctggagaagttgctcaagtgttagattctactttactgcatgctacaggggcattgtgtcccacaatggcattcacagtgtgaagattgccagagttctctatggacacaccctgcgaacatcatggatctgggctgtcataagacttaagcatccttcagggcagggacaatagcttggttttctttgtaggtccagagtgccccactgtgcctggcacaaaataggcatataatcaatgtttgttgagtgaacgaatgaataaagctagtctgtccttgtcaaagtagcaagaaaagcctcagcctctcttgggaagacagcctgcttccctgaggtcaagttgaggttcagtctaactgaggagaaggaggggagaccagaatccactgcacagctgctgccccagtaagttctcagggagaaaccagaactgtcagtttgctgagtcaaaggcagaagcctgttctcagcagtgaccttttttatccttggcacacaagcccttttgtccaggtggctggaacctaggtctgcttccacttctgggtgagaaggtgccacacctttgggtttggtcatcgtgtgtgtgtggtgtgtgtgtgtgtgtgtgtatgtttaaaattaaaagtaaaaattttccccatatacatgtacacatatatgcaagtgtggtattataggtgcaagggtgcagagaagcctagtagggtaggggcacccaggaaaggtggcctcttcctcttgtgggttttggggagcatcacagggcctcagggaagggtgagttatgtgtcatggaagggcagtggctcaacctgggggtcttcagagataaatgaggagggactggggcaatgcatcaggaaggaggctcaggagaggcagggccagatcacccggggggctcgagccccttcaggccttttgtaaagtttgggaattcattcatcccacactggagggtgtcagacttttttaagactctttcattctttttgtttgtgtcattactttaagtgacagaagcagttccatagtcattttcrtggtttggggagaccctttcttggatcatagtaattcttacaataatgcctgtgctctaaccaccagttttaggggattgtgggccgcgacttggcctccttgtctccgctctgtgttggctttacagttgtggatgctgcggctcacccagcgctgtgtggcagtgggtcctgctgcaggatgtccacaatgcagaccacagggcagggtgtccctggcacccatggggtcaggggtgaagctgttatctgtgaaatgacagaaatgaaacccagcattggagaagaatcgtctgcgccccctctaatccacctgtgaaacactgtgctgaaacaccatgaggaagaggaagcattggggtgtaaagaaacccagaaatgctggtttctagaaatggtattaattgtctcaggggctctccctacagtgtgaaatagctggctgggcagctgcagccggttccatcttctccatagccacgcccttcccgtgacctcatggggtatctgcacagtgggtgcagtgcaaaaagacacagtcaagcctgtgagccagtagctggcgagggggtggtttggtagtgagagatgattacagggacgggggttggctcatggttctgccacaccaccctccatctctaactgggactctgacttggaatatagacttcactatgccacatgatgtagtgacatggcagaggaggcaaacagagtggaaggagacaagtcagagaagaaggaagtgaagggcggagagcaagggatgctcattgccaaggccgtggcagtcactgccagcaacaggtgtgggcctagctttgattctgtcacctgcaggggtgcctgccccagagcagggctccttgaaatcttccatccccttattggctgtgcactaatgtctcttggagagacttctcaaaaacctccctgtacttaacttggtttgacaaatttgataacattttatgttttaataggcaaacattttcatggcttaaaaattgtaaaatatagcaggatatgtggtaaagcctgtttcctaccctatcctctagccatccatgtcccctcccttaagacaccaatgccatgtgcttgttgggtttttttctgaagttatgctgtgtatatgccagcaggcctgcatgtgcagacatgagacagttttccacatccctggtgccatgctgcgtgctcgctgtgtgcctcttctgacggtttcactggcccacaaggagttttgtgttccattgtccagctgcatgctggcctgctgccaggctgtgctgcagattcttcaaccagtgctctctggatgcctgttagcytctttccagcctgtgcttcacactaatacgttagttttgtgaaggaagctgcaccccccttgctctgaggtctgggcctaggctctggctggattgagcatcattctagctggaaaaagagggtggggttagacgacgtgtttaagcttctgcccgtttatttcaattatgacctggcctgtagggttttctttgggaaatgggcagttaatggttagatactatttgtaaggcacatgtctctaaaatattaccttctagtggccaggcgtggtggctcacgcctatgatcccagcactttggaaggccaaggtgggcggatcatgaggtcaggacatcgagaccatcctggctaacacagtgaaaccccatctctactaaaaatacaaaaaattagctgggcgtggtggcaggcgcctgtagtcctagctactcaggagtctgagataggagaatcgcttgaacccgggaggcagaggttgcagtgagccgagatcgtgccactgcactttagcctgggcaacagatggagactctgtctcaaaaataaataaataaatagataaaaataaaataaaatattaccttctagttacacacagaccttttatttttttaattattattgttttttttttgagacagggtgtcactctgtcaaccagactggagtgtagtggcaggatcatggctcactgcagcctctgccttccaggctcaagtgatcttcccactttagcctcctgagtagctgggactacaggtgtatgccaccatgcctggctaatttttaatttttttttgtgggtttggctatgttgcctaggctggtattgaactcctgggctcaagcaatccacctgcctcagcttttcaaagtgctgggattactggtgtgatccaccatgtccagccaacacacagacattttattttttatttatttttaatttttaattttttaaaatttytattcaagacagaatcgtgctctgttgcaatcttggctcactgcaacctccacctcccgggttcaagccattctcctgcctcagcctcccaagtggctgggattacaggtgtgtgccatcacatccggctaatttttgtatttttagtagaaacggggtttcaccatgtcggccaggctggtcttgaactcctgacctcagatgatctgcccgcctcggcctccgaaagtgctgggattacagacgtgagccaccgcgcccagcccacagacattttaaactaacctgtagcatcctgagtgaggcttgtcaaagctgcttttgaccccagtttcaggtacattggctctgttgggctttcctctgcctggcctatcaagcggccaactcaagctgcaggtgcaagggcagatggttctgcagggaccttaatgacagccaggcccaggaacacacagtgcttgtgtggaagtctacatttcagctgtgatggtgtctcgctgaggctggttctggccatgccctcccagcatttcagctgttccaaccaaggtgctctacatctcagagggaaggcaacggcctgggcagcacgttgcacgtacattttggagtcatgttggttggtggtcttcagtttctgaatctgtgatatggcatggtcattcatcacaggcgaggtgatgcaaagttaccaactgggagcacacctgccccttctcattcactcacgcagcaggtagttttcaggcacaaaggaattgacttgtggagctggccctggggtctgtctgtaggagagcaggaagtagtagccacctgcggagggctcacaggcatgtgcctgcgagactgcttacaagcccctgtgcgggatttagggcagaccagagccatgagcgtccatggtcaagtgaaggtctggtaggtgtgagctgttagccctagggtctgctgcatgcggtgccaggggctgaggaatgctgaggcagcttttcctccagtctctgctcgctccgtgcacagcccttgtctcctgcctgatagtggtcagtagtcagttggcttagggtacacggtctccacccagtgaacctggcgctggcagaagcttgtagaagaatgggtgcaaaaaagatatctcagagggcctgcagatggctgtttttaggaagtgaataggcttcttctttttcttcattttttctttaagatactcttgaggttttgaggctccaccctgagctctttgtggctgagggctgctgtggcttgatgaaggggacagtcttcaaatcttgcacaggctggggaaggttgggacagcacagccctgagtctcgaacaaaatggggcagaggggagggcaggagagccgtcagattcatggggccacatcctcgcagcaacccaggggaagctgaggccccagggtctgcatgatggaggccgagcacgacggaggaagtggaattattgcacatggtgggtttcgacacttgggactcgctcctcaaagaggaaaatcgagagtgggggtgcacagagcaagggctgaagaaacaaaaagcagggggtttaggggagagataaacctctttgcatgagtcaagctgaaaagcagtttggaaggtcaagtgctagccagtgtctttttttgcctgcccagcctcttcttctgccatgtctgccctgacaggggcagagttctcagttcccatgtcagaactcggcaccagcttctctgttgacagttgcaaggcctgtggctgagagaagtacttgtgctgtgtttctgcaaggtaagatggccctgatcacagctcatgatgcctgagatcaggagggtctgctccatgagatatcagcagaggccatcctgtgaaatattttaactaattgaactgaatgttgaagacaaggcctgtggcagtgttgtatttatatgtgacaagccgagagtccttggacaaccttggaaactcctttttaggacagaatcaactgagacgatacacacgaaggagcttttgtgagcagagtacagagctcgttattgcagtacaaggttgtaggttttcacacagcttttgaggatgggttggtggcccagggaggatgtcaggaactgtccttcactaatggggattctcgagttcctaccacgtgccagatagcgtgctgattgctttgtatccacttcccttttaatcccttgtattagcttcctgtggttgctgtaacaaactcggtggcttaaagcgaaaggaacttattctctcactgttctggcctccagaatcactgggctgaatcaagctgtgggcaaggccatgttccctccagtagcttagggcggaatccattctgtggctgctggcttgcctcggctgccggccccttcctcatcttcacaccagcagggtaacatcttctctccgtgactccgcttctctctgcttctgtcacacggccctctcttctctccgaaatctcctgccttcatataaggacatttgtgatggcatttggggcctaccagtgtaatctaggataatctcatctcaagattcgaaacttaattgagtctgcaaatcctttgctgtataaggtaacattaataggttccaaggatttgaacgtgaacctcttttgcagggggcattatttgacctgccatacctcacagcagcctgatgaggaccatactgtcccacatacagtgggcttaatgaggaagctgaggcttggggaggcctaggggtggccatggtcctttcctctcccagactctggggtagctgactctggggtcattttgtcatgttgctgggcactcacttggtgaacagataatcccctgtcattttactatgttgttacatgggtttgaaaaaagagtttttcaactctctggctgagcccctgttcctgtgagggcctgtggtttttcctcccggctccaccctggtttcggcgcagtacttgagcagacggtggcttgggtctcactctagcgccctcccccttcctctctggctgtgtgcccaggctggccctgcccaccttgctcagtctctgctccatctgccacaagtctcactccagccctccccccagtagcttaggaagggaccttcttgttacgttttttgttttgttttgttttttgtttttttgtttttttgagatggagtctcactctgttgcccaggctggaatgcagtggcgtgatctctgctcactgcaacctctgtctcctggattcaagcgattctcctgcctcagcctcttgagtagctgggactacaggcgtacgccaccatgcacagctaatttttgtatttttaatagagatggggtttcaccatgttggccaggttggtcttgaactcttgacctcaagcaatctgcccgccttggccttccaaagtgctgggattacaggcgtgagccaccgtgcccggccttgttatgttttttaagctaaccctgtagagcactcactgtgcaccagcacctgttggctcaagggggtgacagacattccctatcacagattacaatgagtcaccggcatttttggaatttcactaagcgtcgttgctgtgctgtgcctcagcatgcagcacttcatttaatcctctggacaccttgaatgataagtgtctgtcatcccattttacccgtgagagaattgcggctcagagaagttgtcacccagctggttggtggcagaggtttcagaggtctttctgtgcataaaaccctcacttatggttatgccaggtaggccttggaggggatagacccatcgccaaactcacaggagagagaggagggcactcacaggtgatgatgtctatctgtcttctttctggtggggacccagagttttatttccatctcgttttctttatgaatgcttgtctcacacttatgtattttttgggcagtccctgaataactacaccaggcttctgaatgccgagtttcttagagtagccgggaaagggcctttttcttttcctcttggatgttctcttagtctgttttgtgctgctataaaagaatacctgaggctgggtagtttttaaagaaaagaggtttacttggctcacaattctgatggctggaaggttcaagactggacatctgcatctggtgaggcctcaggctgcttctactcgtggtggaaggtgaaggggagctgtcgtgtgctgagctcacatggcgagagaggaaggaagggagcgggtggtggtggtggtgtcccaggctcttttcacagccagctcttgtgggaaccaacggagtgagaactcacgcaccctcaaagcggggggtggttgggggagggcattaatgtatacatgagggatctgcccccatgacccaaatacttcccattaggccccacttctaacattcgggattaaatttcagtgtggagtttggaggggacaaacattgtcctcttgtgcctgtgccacacttgcccctccgtccccctcatctgctgatgattcatcacactgttaacttggtctctmcatctgtttaaacgctttctcctttcccctattatgttgctgttaagactgtgaagctgtcagcaatgttagcgacaccgtccacatgtggggacaacaggtccagtgaacctagcatcatcagtgtcctttgcccttggaactgagtggaaattatcttctcagcctccatggatttaacttctgtgttcttgatgtgaagcttcttttccttaagttagagtttttgcatatacatcccacacatacacttgcatttgattttcttgtctgtatatgcacacacaacacacacttgattttcttgcaccataataacgtttttctgattttaaattagaaaaggacaaatgagttgaatagttatctattagttatagataattatctattatctaattattatctagttctctatttaatagttatctattagttattaactgtctaatagttatttatttcttgggaacttaagtaccaacttagtggtaattttacatgaaatgaaatgttctctgggttccagataacttataaatgggcttttagagtacagcctgttggttgaacaggccgtaagttcagcctcatctttgtcgagttccacaactaagttttacaattatttatgaatgatagtgcttagcatactttccaactcagtgagaccatgaactaattgaatttgtaataaccctgagtaaatcttagtggactaatagtaaaactttgaggttttacagtaagaaagtgagatccttagatataccaattttaatgtctcagtaaagaaaacaattttattgattgattgattgattgagacagggtcttgctctgttgtctagtctggagtacagccatgtaatcatagctcattgcagccttgaactcctggacttaagtgatcctcccacctcagggttctgagtagttgggagtacagaaatgccttaccatgcctaaattttattttttatttttttgtagggatgggggtcttgctttgttacccagggtggtcttgaacccctggcctcaaatgatcctctcaccttgacctcccaaagcgctaggatttcaggtatgagccaccatgtatggctgaaaacagaaaatttataaggtgccactaggggagggtaataaaggaaggaaggggaatgaaatccaaaccaaaataaatgctgtttagtgtgtggctggtgggtcgcatttctcattctaagaactgtggcatttctttttgatggttctgttgatcctgaaaccagtgagactgcagtttgtgaaggatgatgatagaagtcgataactcctcatggttcattgctggaccatgagtttagctgtaactagatgcaaagctcatggctgagattgagagccagagagacccaaagtctctacatcacgcccacactggtacttccagcctaggaggcgtggtgaatgcctcccacagtggttgctgagatggctttgagcagagcagagatgagtcaaccatggcaggataaagtgaacagctgggaaaaggggttttgggggctgggggtaaggggaactggaatagtgttgcaattttccccatcctggctgtaccttaccatcacctaggggcttttgaaaaacatggcagcctgccctccacccatgctgtgctaattagtgtaatcctgggtggggccagcatgacatttgccacctttcccatgaggtgatttggaggtacagctggggtggagagcagtgggccttagaggtttagaacccagcctcctggctgggcacggtggctcacgcctgtaatcccggcactttgggaggccgaggtgggtagatcacgaggtcaggagttcaagaccagcctggccaagatggtgaaaccccatctctactaaaaatacaaaaattagtcgggtgtggtggctggcatgcgcctgtaatcccagcttctcgggaggctgaggcaaggaatggcttgaacctgggaggcggaggttgcagtgagccgagatcgcgccattgcactccagcctgggcaacagagcaagactccgtctcaaaaaaaaaaaaaagaacttgggccgggtgcggtggctcatgcctgtaatgtcagcactttgagaggccaaggcaggcagatcacctgaggtcaggagttcgaggctagcctgaccaacatggagaaaccctgtctctactaaaaatacaaaaaattagccgggcgttggggcgcatccctgtaatcccagctacttgggaggctgaggcaggagaatcccttgaacctgggaggtggaggttgtggtgagctgagatcacgccattgcactccagcctgggcagcaagaaagaaattccgtctcaaacaacaacaacaacaacaaaaagaacttggcctcctgatgaaataggcccacctgtttcaaatccccacatattggtgttgagccagtctcttagatgccgagcctcagtcccctccttctctcaggctgtgaaggtgaactgtgatgtgcagagctgcagcatgttctgctgtgcaccaaggagggttccacagtcatagaggcatagtcatgactgatgtgaaagggccaacgcacgtgacctcctgcccctgtccgtccacatctcacttggtaaaaccacagccctggttctggccacttctcagcacagtggcctgtggctggagaagaacacatgacatgttgatgagtctgtaaattcatgaccacagagctccagtgagccattgggagtgcttggcactcagagtgtttccctgtggtcctagactggggagcggcccctggattttaaagagctctggacccagtggtgcaggtggggagacctggcccctggaggctgacccagtgcacgtgcagccccacctggggttcccctgattggactcctgcctcaggaggggcatgagactcacttggcgctgcttctgagctctaagtccttgctccttagtggtctgtcccttccctccgcagggaggcatggcccgctgggcttcggcccctgcaaggaggcctggtggggcctttcgccttctcagccaggcactgaaggagcaggaaggggaagcatgataccaggaccacaggaagaagtggtgctgagttgggtggtcacttccttggtgtgacctctggttagacgtggttcagggccatgttgcaggaggagctggaagacatttctttttttctttttttttttgttttttgagacggagtcttgctctgttgcccaggctggagtgcagtggcgcgacctcggctcactgcaagctccgcctcccgggtttaagctgttctcctgcctcagcctcccgagcagctgggactacaggcacgcaccaccacgcccggctaatttttgtatttttagtagagacggggtttcaccatgttagccaggctgatctcgaactcctgacctggtgatccacccaccttggcctcccaaagtactgggattacatgcgtgagccaccgcacccagccactggaagacatttctaaagaaaccatcaccatccttctctgaataggtttcagtgtggttttatgtttgttgcaaccttgttgacctgtagtttcagaaaccagaatggtttggcccaagcttttgatttgagatcacactaaaatagttttagctgagggtgttggaggtgcctcctgtgtatatgagtgtgcgtgtatgtggtgtgcctgtgcgtgcatgcatgtgtgtgtctgtggcttcactgtagatggccgttgtgaatgatgtcctgacctgagtcctgtgagaaacactgttgagttacttcacagtcattccacacaggagaaaaggatgaatgaccctgttgggttaaaaaattgagctttgaaaagcttttttccctttgtacttggcaatctcgcaaagctatcaggagagaatgtggaattaaaatatatagcaggtgggagtatggttttttaacttacacttaaggtttctgtggtatctcatcatatgtggaatatttctgttagaccatctgagaattttaagctctggtggatggaagtaaggttgcttttgaacagaagtctgccatgcygctgcttctcacaggctgcagcctcaggttgagcgctcaggaaccaaggtcaacgctcagtgtgtgtttgccaagtagactgtgtagatttgaagtgcttagactggctgtctgtaagcttttaaaattcttcatttaataatctataaatgtcgaagcctcccaagacgttgctggccctgttagtaagtttgccgcagccccctagccgccaggagtgcccgagaacccctgttggggctgaagtcacagacagcaccgtggagttcgggactgtagctctgaaattctgccacaggccaagcaaactgccaggggtgtgtggtctggggtgaggactgattgaagaagtaacaatcttggatgactttgaaaagctctgggagttgccattgactgtgatgttgatgctgggagtgtgctggagggccacctgtccttgtccctctttttgtgccccacaaggagggtgtaggaatcaagagtttcagctgggcattggtctgctccaacaaggcctctttttgatctcccatgtgactccattttctcgttctctcctgtggctgggcctgtttctgcctgccgtggagcagaagtatggtycacatgggkggagacctacaggggccaaggagggctgggccttgaaagtgatgagcttgagtccctgttggggtccggggttgggggaagggcacaaggtacacagctgggcttgacccagccctgctcctgggagttccctcagagagtgcccagagcagaagagtctgtgctgtgagcacacccacggcagcgtgcacagactcgagtcccccagcagattctcttggctgccctggatggagatasggtgaaactctgctggggagagcacagtccagtggagaagccaatctgatgtggacagatgagctctgtggcaagtgtccaaggaaccaggctggtggtgcagatgtctgtccccttctgctgaagtgctctctctgtcatgcagctgttcttcatgtgtcctctgtcctctggaagatgacttcctgagggagaggccacagcacatatgtctgtgtcccctcccctagccccagcccagggctyactgagggtctgtggtgggtcttcaaatctgtgcatcctcagtaggaagcatctgcagaaaggaggagtgaggtttgagaacctgatattctcctcttacagaagagggcattggggcccagaaagggcagtgacttgcccagagtcttgcagcttagctggggcatggctggctgtggagtccagcctccaggcctccctctccatgaggtgctctttcctgctgccctgagctgcacttctgcttgccacagtgtgggagtgccctaggcaggagaaaggagtgtattgtaggtgcagtgtagagtgaggagggcagtgcgggtgcagtgtagagtgaggagggcagtgtgggtgcagtgaagagtgtggagggcagtgtgggtgcagtgaagagtgaggagggcagtgtgggtgcagtggagagtgaggagggcagtgcgggtgcagtgtagagtgaggagggcagtgtgggtgcagtgaagagtgtggagggcagtgtgggtgcagtggagagtgaggagggcagtgtgggtggagtggagagagtggagggtagtgtgggtgcagtggagagtgtggagggcagtgtgggtgcagtgtagagtgtggcgggtagtgtgggtggagtggagagtgtggcgggtagtgcgggtggagtggagagtgaggagggcagtgtgggtggagtggagagtgaggagggcagtgtgaggacagtggagagtgagaagggcagtgtgaggacagtggagagtgttgagggcagtgtgaggacagtggagagtgaggaggacagtgtggggacagtggagagtgttgagggcagtgtgggtgcagttgagagtgtggagggcagtgtaggtgcagtgtagaggggctgacaccgtgtggtgggccacctgcttcccctccttactctgggcactggccatgatgggttacaatgtggtcagggcctctcaggaggtgccactcagtgagtgacctcacccgggccagatggtgaccataagccggttgctacctctggagtcttggtgggtgggcggatggcacccagggtcacacagcattaaaaagtggatccaggcctttagtatcttgattttccacttcaccaggtgattgcatgaaaacatgttggaaaggtaatacatgtgattggggaagataagtttatttactgtgggacattttcataacttctgtttgagggcattacatatctcacataattacatgctatgaaggtattacctttggtctcattcaaaaattacaaagtgatatatcgagaagaatcacctctcccactttgccttccagttcctctccccagaggcaagcagtttgcccagcatttttgtgagcccttcgggggcagtctgccatatacagacayggacgttttcataccctctttcttctggagtgtgcattcgtttgagcagcttgtttggaaagctgtatatgcaggttgtgaagtcacttttggttttgatttcagcctcccattctttccctttctgcatttgtggtatctaatatcacyttgacagcctcaagagcggcctgtgtgtgtgggttttggtgtccatggtgcagtgggcgagggccacccgcagccttcccagtgcttggtgaggcccaagagtggattttgttttttgaagcaggattcttacacaaaaggacatctctgaagtagttggggttgggagcttgctttttgctctattgtgttgtcttctctataatgtggaatatcttaaagatccagttccacctgtgctacgaagagccctgggtgggatgagcccacgctggcaccacatggccgctcaccccacaggcattatggggagagccagagcaggtgaatggcctgcccgggccctcctgcttggtgagtgacagacaagacccaaaccaggcttctggccctagccctgggcctttgttgtaccttgatgccctgggaggcagcagacccatctcacctgggtgccatcaccctgacatttggcagcctctctttgcagattgccatcagcatcagcctaagtgaggtgcaggaatttcatagttacaggttggtgttttttaaaaaaattctatttcatggataaaaacatcttcaaataagttttcttatgcaccaaacccatctggggccctgggggatacaaaagttatttttaattaatcacttaataaaagcttatttggggctcctgcagtggctcagctttgttaaagatgaagagttaaagatgacttaggcccttctcctaaggagctacaggagacaagggtgtacactgtatcagaakttttttttctttgtggcaacagaaagggccatgtcacaataagcagagggtatttatttctgtctggaagtgggtgaaactttacagggaaattgctgtttaaattggtcatgtagcatgagtacaaattgtcaagcagacaagaacaggaggggcactcttaagtggagcggacagctgagcaaaggcatagagagggcacttgtgagatgctgtcgggagcagcttgtgagtgtggtacttaggaagcttgggagacagaggagggccaggagatccatcctgggtgcaacttcatgctgcattctgtgtgtgccgagagccacagaggggatttaagccasggagttattagcccattagatttacaaattaagagagacctctaaaaccccatgggcggtgtttcaagttctgaggtcatctttctttctcagctatttaaatttgtctcttgaccaaccaggatgacagatgaggtaggagagggagcataagccttggaggaaagcaaaactatgggtaacacagaagtagtcagaatatagtgcaaaatacatttaatctggctgaaattacttgtaaaatttagcaggacattgaacatttacagatactttgtttttttgctttaggcgtcagtattacattgcatgaccaacaatggttgtagtctcctgctgtttgctggggcatgctgggctgtgtgggcagggctggggttcagccaccctctcccttctacctgcttttctcacctggggtgggggctttgggaggaggggagcagtactacccatagtgggcagggatgggcctctggggcggggggagcctgtgtgtccaycttgcctgccactaattttaaataacagtgtggaatgctgttataatggtttttattttaaatttttttccacaaatgcactatcttctcatttttttatcaaggctaatctacaaatgtttaatccacccacaggtaatccagatttgatgcagaattttactgaaatcaactccaaatagctttgtggtaacaagtctttgcaatgtgattttgcctatgtttttctccttaatgagtcagacttgccacatgaaatttttaccatcccaaaactttttgaagaatttaattagaatgggtacataggataatgaagattcacattgtagaaacttttaaaatttgagtttcgattgttcctggaattttaatttctcttatttggtgctaggtgattcccagttttagggccaggtgttgccaggacacacaagccagtgatagtttgactaagctttagggttgtatattaaagtaatgcctggctggatgcccagtcaaactaagacatgctaagctccacatttgagcagtaatggccctgtttgctgtccctcgggagggttcacacccaggagctcagagcagggactttctcctccagggtgggcccctcgctctggggaagagctctccttcaccaagccccctttaggtatctggtctccagccacagtcagggaggctctcagctggggtgctgggacccagccctggggtgtgtgtggggaggagccctgcttgggggaggggtggcgctcctggagacctctcctggctcagaggggagtgatgggcattctgaagcgtgtccagcagggcccacctccctctgcgctcatggtttccacagtggtttgcctcattcaccatcacctgagaatggccaagatagccttgcctcccttcctgtcttccagaaattctcatggggccctccagcccgttctcttcctggcctgtgacgatagcgggttaagtttgtacttttaacagtaattaaccttcttcaaggccttgtttgcygttataagtgttccctgttctctgggtactcacagccccttccttgctgtccttgatccagcggcatggcctgagtgcctccatccccctgtttctggatggctagaagagcctctggggtatctgattgtcagatgggcttagcaggagtggtagtagtaatagtggcaaatacttaagtagcatttttgtgcactgggcacatttagagggattaagtcatctgattcttgcagtaaccccatgaagtagatgattctgtaacacccatttcaggagcaggagactgaggagcagaaggtgaaatgagttctccctggggacgtgtagcgtggcgggtgagcggcagttggggttggagcccggatggtctggctctggggccatgcacagcatgctgtgtgcagctcccccgccgtcccgtctccctgagctgcctgcttcaggcacgcttcttggctctttgtcctgaatggtgtggtggtacagcttggtcttcctgcctggtagggaaaccatagccatgggagtcctagtactgagcaagtgactgttcctgacccgtttccagattctaggggcagctttacagcctttctctgagatacttggacaccatgttaccagaccacagcctaacaacagaggatgaaccagagcctcaatgtcggcgagtcttgggccattttggctgttgattgcctctctcctgccctgtatctccaggaactgtcaacgttggtcttgtagaaactgctctctctttgtgagtgaacaagaccatggctgtctcagtccctccgttagtgactatccttgttcaacccagagtccaggagtctgatgaacagaggctttctccctctacctcaccctgccttttacctctccctgccctgtgtgggtcttgcccaggagacagcggttggatgagggaggagaggctaagggcccctctaatgtggacagcctgggccctgctgtgggaagagagccacatggcatggattggaaatggagagggcagaatttgagtcaggaggaccaccagcagccgtgctagctcttgaggcctaggtcttctggcctttaaaatgggactggagtgggaggtggattcagtgcgagtgcagtccctgcggcctacaacctactgttattgtgcggtgctggtctccaaactccaggtctattttgtagcctattgaggaactgcctctgatctccctaaaataggatgtgctattttggacactgccgtaggtgggagggatgtgtgtttaaagctaaaatagagcgcactttaatttgcgggtgtttcctttttctttctcagccacactgtgtttaagtcacagtgtcctccctcccacccaggagcacagcctcaggcaggccctgctcttggtggaggcctcgtcatgactgatgagggaggtggccaccagagaggaggattcctgtcgcttgggaccaggactgctccaagtccagggagcttttacaaggctctgttcctggatggcttctctgccgatctgaggtccagggtgtgagaagctgagccagccttgcagtccagctgagtgcctctccaccagacctgcgctgctgttagagtcaaggcgaggcagggctgtgggggtaggggtggcagagcacacccctgatccctagttagtggagttaactctgggcactccctcccccgactttctttgcaacaaatcatggtgatctcttttgacctttttgatggttaccaatgtggctgtgaagagggtccctgccccagctggggagaatagggtgaatgggagtaggaaggttgagggggtgagggtagaagggtgtgatggatttccgagaaggttgcaggtatgtgtctgtcctattctgtcctgacttactctgcattcagttctagctgagcatgaatgcagcccgcacccatgactttctgtggtggtgctatttttctgttttttgaaaagaaagaggtccggtttttttgtagattgttaggacttaactggaaataattgtgtaagtcttcaggcatctttcgaagatggcaggctagagatagctactccaacttgaatgcctagcagtcacctagaagacttgttcaatgcagatactgggccctacccacagggagtcagccttcataggtcgggcacttcctcccggctcctgggtggtactgctactgccagttcacagaccacacttccagttgccctagagtgcttgttcctgttccactccccactcaagatattattcgctgatttttatcaccttccccaaactaggctacttattttggtgctaattggtggcacttctaattttagaagtgtggggaggtgctcctgtccccatttggctgcagtggtgctgatggggggtatctgctgtgccttgggtgggaacttctcctgtgtgtgcttcgtgagatatcccgaggctaccctactttgatgagttgagcaaggtgtcttagaagccaggcgctgactgctctatcataattagaagacagttagcaataaatacatagtcagtggcatctctgcatggggatggctggtttgaagcagcttgctccagccatgggaaacagagttttgaccctactatttatgaactgacagtgtgggctgcatcaggatctttccaggtatgccaggaggcacagaacccacgtataacctgcagcccacagtttctgtgacacagaaagtgtggtcaggtgctgggaaatcattgtctcatagataaaacatctgacacgcaccagcttttctgwaacaactaatggttgcaaatggaattcggggtacacaggatagcaacagatttcttcctgtccttgaagaaaactgtctcctttgtccctgtttgaccaacttcgattgagctggagccctttgtgcctggccctgggctgtcccttctgtcagggtctctgtctggtacaggggtcagctctcccttgggctgtgcacttacctaaaactgcctcccagacacctagtttgtgacttcctagaaagcctgagacaggaagctattttcttaaggctttagaaactgcccccaaacagcacagaatggcagggtcctgcccccagggagtgctgcttgaggtctgtttcctgcagtcagggcttccagccagcttgctgtccttgccagcacctcctctgctgcccgctagacacggagcctctggctgacaccctccctgccagccccagaggcctgccttctcagcctctgctgaaactaaagctttttttctgtttctgtagggcattgggtggagccttgccaggggctcctggttctgactgtcttgggtgggtggggaactcagccctgagaggttggctcactgagcatttaccatatgctgggcattgggccagatgtctgtctaggatcagtttattaatccccagctacctgatgaggtaattattattcatttccattttgcagaggagggaagggatgctcagagagaggtggagtgacttaccagatttttatctggtgccctatcatatgctcttacgacacagagcagctttttgctgtagaaaggactgtcgtcattttacctgtgttaggaacatcatcactgactgtggttcccctgcactgacattctgggcattaagggctgagtctgggctctttctcctatgggtgtctgtcctctcacttggccccaggccttggtgaccctctgtgcactgaaggagtaaatgactgaggtggccagctagctcccgtgcatttgcacacatggtccctcactcctggcccccatcccttgccaggcagaatgtgcccgtctccagtcccttgcattgctggcagcctcagaccggagagcactgaatcttccactagcctgtcttcttgccagctgcagccccagggcgcgtgtgtccgtctccgcagccaaactccccctgtgctggcctgtggagggtgagtggggggcagggtgccgcacactctggacccttccagccccaggaaggagttgtggtgctgcacgtgctccattctcacatgcttctcaggctgcaggctgtgcattaccagtgtgcagtttaggaaactgaggcccaaagagagcaaagcagcacctggggactgaccttgagttacacaggtgtgcttcaagttcttctgctagttacctttcaatgccaacactggggagggggtgtcctaacaaaacataatttaatcagagcactgtgaacttttcctgcatctgacacgtccctctcaaggtggagggtgtcaccacctgctgcccattgtaatccctcaccccacagagaggccaggaagtgaacaggagacttggaggaatgtggacctggtgtgatcctgtgtggagcaaggatgtcttcctctgaaaattccctggggggaaagaaatggcatacatttcctataccagtgggggcttggtcccttggcacgcataaatcgaccactcttggcagccagaaccctcgctcctccagttttattctggttgcctgtggctcttggataatcctgtggtctctttggggtgctggtttctttagggagctgcatttggcttaaggctggcatatgttttagctatctgaagtggttttagatataaagattcagtgacagaattctctatataaaatgattatatcacattgagcctcagtaacagattaatggggaaggaaggatttattatgtttccaagtgatccaatgtgagcaagcaggctttgtaccaggggagaattctaagtgcttgtcctccctgtggaattgtgttttgcagaatcccaggaagacagggaggctgtgacagcctgtaaatgtgatgctcagctggccttgagtgtcagctagcttgctggtcttcagggtgctccctgtccacgcaccacctctggctgggctttccgttctctagtgaaaggttttctcagcagcacctttgcctctccttctcccttcattacgagtttgccatgttggagttggattgtttgatgtcttgtcctggcttaacaactcaacactgtgtactttaaaagctccaagtttaggctcacacctgtaatcccagttttttgggaagctgcagtgggaggatcacttgaggcaaggagtttgagaccagtttagttgacagagtaagatcctgtctttaaaataaatataattttttaaacttgaaatttaagcagaagccacgttaaagtggcacagcaggtgatgtgagggaccctgttgggccaccttgctgtaaaatgttttctgtatcctgcttttttcctctttgcctttacacctgtggttcccacattattgggctgagactctggagatctgggtaaaatcccatcctagagggacagcaggttaaatcacttttcctatcttggccagctgtggtttagcttattggcaccagtcagagcagggcctcaagggatgttaggattggttgcacctggttcagaatatggggccctgcaaggagggcagtctgaagaagagtgggattaaaaacgaaagcagccaacagaaaggtgggcacctagaggcaggtgcaactggctgtcctggaaagcagagaggggcagctgtgggcctctgtgcaatggcccctccacttgtcacacctgccagaatggaggtgtctccccagtgggcctgtcacagggaggccagcgaccagccagtcagtgctgacagtaggcaagtgtggttgacatccagggatgagcctctgagcaaccctgggatgtgatgcaaaaagatatatgtgtcctcttgcatttaagagaaatgcaaagcttttgatctaagcttacacttgaaaaaattatacttacattgcttttttgaaaataagtgaaagcataatagaggttgaacatccctgatctgaaaatccaaaatttgaagtacttccaaacctgacacttttttagcactgacatgaccttcagaggaaatgcttattggagcattttggatttcagatttttggattaggtgtgctgaatctgtacgtatataatgcaaatatttcaaaatcttaaaaaaattccaaaccctaaccacttctggtgtcaagtatttcagataagggatactcaacctgtgctaataatgattttggcatgtactctataataataaaatgtttattaggcagtcctttatgtgaaaaatgataggaataacaatacagtgaatcgcaactcagctttagacattttcatgaccaatacacttgaaactacatatgccttcccaccttctctctaggttaccattaccccaaatttgcttttcattttttccattcatcgaattctttgtgttttgtgacccagtcagtcctactagttttcgtgctaggagacaggaagcaagcattgcttagtttcactcttgtgatgcttgtggtcagaaacaggtatttcttgaaactgggcttgtggctgcagggctgccccaggcggggcagagatggtcaagtgcaaggtggggctgctgtggggccaagtcctgatggatcatgttcccccccggtcttgtctttctaatgtcttgctgcatgtgggatctgtcgccactgccagtgggaagggcaggctagtctgtgtccatctttgttgcagagttggcttccttcaggcaggttcatcctacactgaatgtccctgtggtccatgcctcaaaacacctcatcattagtattacttctgagccctgcctaaacatagcagcgtggaccagctctcagtcctttctcttcctgkccctaccccaccttcctgttggctactctgctcccatggatggttgagagggagaccctcttctgtgtggctagccaaggttgcacattggctgcacccaacagatggactgcatctgtagtcagtctagtgaagtccggtcttcctctccaccctcttgcctgagcctccacctttgcataaagaagctcctgcacccccatccctccttgcagatgcccctgcccacaccccatctcttcacataactgaaagatggctggttctcccagaagagccagaggcctctaaatggagtgaggtcctttctctgcatgtcctgtctctctccagaggtgggcttggaatctctttcgctttgaccggtgactaccatcccctccactcctgtccctcccctgcatcactccatgttacccctggccccagaggtctctgaggtcccatcaccttctgatgactctgtctgcagggatgagtctgttgttactgagccgctagccttcagcttcctctcccrtggtcattcccgaggctgcccactccccctagttgcccacaagccttatgaactcccatctccgttcctcctgtgtggcctgttctggttccctctcctccctgtcaggctcactgtatstttgtttcccatgatcctgcagtcagggaagaccaagccccagttactttcctgatgagctcaaagtccagaatgcagtcacgtgactggggtgggaagccatgcacagggccctgagagggtgtgagggattcgaggcagcctgtggaaggagagcccttccagctgagatgaattcagccccagagaggcactaaacaacctaaggatggtacagttccccagttattaaaattttgcatacttactataaagggtttagtaaaacatagtctagaggaagaaaaccagaaaagcrtgatgtgtccatctcccagtgcttaacatttttatacgtgttcttttcctctctcccactccgcgtgagtgcttctatgtctttatattggtagatcttacttagaatctgactttttcgcttgtcaagttgtcataaaactgatttccatttcaaatgtctatatggtattcacatatgacggagccattatttaccatttccctgacaggcttgtaggctgctatttaatctttcaatttatggtataaaatcctttatagtacaggtaatgctgcagtgagcatccttgtctgagatcccaccgagagtagtggcytcagtcttccaatcagtggcttttctctcacttggctggcctcttgaagcgaacagagtgtgtgtgtgtcctggtagctgagtaaactccagctccgcacatctgcttggcggggcggttgggatctaaatgagtgtgacctcagcttttgtggtagtggagaccatcctgatcatgcagggtccttgctgcttgcaggcccgtggctgctgaagagctgaagaaatgttacttctttgtaagaaacattttagactgaaataaaaacctgttataatcatgcggtctggttgcagcgtgaaatatgttcacagtctaagattcaggtgaaaaggcaggatgccaaatcttgtgtacttgctgatcttatctgtgtagaatatccaagtcagaactgattttagttaaggtatctgtggggggtggggtttccctctctatattttccaagcctgcagtaagagaactatggcaatcatctttctttttaacatatccagcttactgccctaggttggccacagtcagatttcttgaaagcccctagggctgggcgcaggtgtctggttgtccctccgagactcagggctcactctcgcttcgggaacactaatgcaactcttctggtggtgagaacccagctgagagttcctttattttgttgatttcagggtgtaggtatttaaatatttgaaagtattttgatttttaaatgagatgtgtgggaacttttttgattcatcacccttggaatggttacagagttttgtttttataatacaaaactttcttgaggtgaatctgtgactgagaaaatagacatctatttgaaatatcgtgtctaaagtactaaaatattgctggttgctaaccacttaaattgagtatttttcttcataaacattaagttttattgaaagagttgctgtgatttccagacactcttctttactgcttgttcaaataaggggagggggcctccagatgaaaaggttaaactagagtcaggcctgcttgaaagttttgagtcaggaccttcagtgggagatttgccagagtcccacacagtagggcacaggctactgcttccttgggtctctgggaggaggtttctcctctctataatggaaagttggatttctagctttttttctggatacttcatggggtactgtaattgtgttgactaattgatgctctttcctggagtctcactcattaattgggcccatttctatggaaggcacaaatattgtaatgtaagaatcagatatatgctggtgatgctgtgtgaagcagcagagctgctgtgaactctctggggtcccaaaagtctaggaagtttggaaaatcctcytccttgtctaggcctgtgcttccctgtcctctctgtttgctttgcttcctctgtctttctcctttccttgctcttggttatcttctgaaagatgaggcttcacttttccacaccttcctgaccctccctgtccccaaagcagcgatgcatctgaaatggcctaaaaaggcgtggaaacccaggggttcctrttctggcagaagttcctcagttgcccacagggcctgaggtctggggtgaggaacacctggtccagatcaaagagcttttagggtgtggggctggatttttgcatacaggttacatcrggagtccaggagtaaaattaattcttagaaggccagattacataaaaggcaaggcagagagggttctgcaaacactaaccgcctcttgggtgtctgatggtactcctctcatggcctcagcctggagggagctgatgtgggaggaatctgtgggccctgacctggaatgctgcacagtggcctctgccagtgacaggggyrggcaaggctgagtctagaagcaaatgccagcccacaaatgtgcagtgattggcgcctacagaggccagggatagctaagtactgtggagatataaaatgtggcttaccatccttgctcttaaaagaaaaaaggggaaaaaaagcaaagactagttgattcagagctaaggttgcttgttaaataaacttttaaattttagaatagttttagatatacagaaaagttgcaaagagtgcctgaagttctcccatatgatacctcctgccaggctgttgttaacatgttaatcaccatggtacattgtagtgtgttaattgtaaccaaaattgatacattattcaccaaattccatgttttattcacatttccctagtttttaacctaattgtctttttctgttctgggattctatccaggataccatgttatgtgtatttgtcatatctccctaggctccttgtggttgtgagtttctcagaatttccttgtttttgatgaccttgacagtgtttagagacagaatcaatttttattttatcttatttatttattttttttgagacaaggtcttgctatgttgcctacactggtctcaaactcttggactcaagcaattagcctgcctcagcctcccaaagtgctgggatttcaggcgtgagccaccatgcctggcctgtcttatttatttagtcatttatatcaatatggactcaatggtttttttgttgttgttgttatttgggttataattgtcaaagttgagtcaaatatagagacaattctctgttttatttgggaagcaagaattgcagttctgggcatatacacagactggatggtcttccatatgtctgaagaacaaagaaggttggaggttttataaaaagcagaaatgttacccattgttttgagagacagttcattggtactagtaatgtttcgaggagctggcaagctctgattggtgagtgtaaaactattcttagactcacagcagcttgtttcagtagctattagataaaactggtttcaggtcacaataggcagtttcagcagctggacttgcggagaattaccttcctgtggcagtgttacgtgcccagggtgctctgtccctgcttggcttcttgattctgttttagttggatatgacaggaataacccaatccatatgatcaacttttatgtaatccagtactagggtattcattgtgttgctcagattgttccagctttggccactgggggctctttcagttagctcgtgttcctctgacatacctccattattgtgggttgtttgatttttgagtacttccttattggcactgcaagatactccaggctcatcttgtgtatctcctatcccagccctagaatcacccatttctccacagaaccctcatcccttttattggagtgtagtcttagaaatcaagatatgggtgccaagtggctaaagttattgtaatctcaatttatgtgtactcagctgagcaaaagcaaagcatccaaatggcagcggcagcaagaactacctgaggatttctctccatttgccagttctgtgtttccttcttgggctttacccacacagttttctagttgcagacctgttgtgcacctcattcggagttctgtacccgaaattgtctctgtcacggtgatgtctttatgcacaggcactcactctgaagtcactcaccctctcaccagctcatggtggagatgcagtaaaaagatcttgaataaatgayttctgctagttcctctctgagtcctgtagtggctctaggtcaaaagcagtaaaacctaaccagaggaaaaaaccagagyggaaaatattttggacacacgagaagctatgtagacaggaagcaagtgggagctccttggagaggggagttgcttgagactgaagttcagggaaaggaccaggagactgggttggtactggttcctgcgggctggagggggtggagtagggagtgttgtgaaagtttcaagcacagaggactgaatggaagcctcacaatgcaacctaaggactttggattcttgcttttgagtacatgcactgtgtgtgtgtgtgtgtgtgtgtgtgtgtgtgtgtgtgtgtgtgtgtgtaaatggtgtagtttgttggctgtcagccttactaggagkctggtttggagcctgttgccttagctctgtggggtgatgatgggaatagtgaaaaagagggtgacaaaagcagagagtctcaaagaggggacagaactcagtgactgaccagtttggttgatggttggaaagaggtgtcagatacatctgagctcccaagaatggtggtacctggaagggagagaaatcaggaggagccagttctgaagggaatgtggtctcgggtctcagtggataccaggagttcaggggcgggtgactgggtaacttggaaatacaggactgggccttaggagtgtcattagggccaggccaagaggggttttggcatcatctcctgsatggccttagtggataaaactgacaaggctgcagagtggagggatatgccaacacccagccctggcttgaacctgtccctgtcccttgatgttgggaagcagagattccctgtcatgtcagatgactcagaggggccctrggatgctgaggcaycaagtgrgggctgtcatttacacaccgtctgtcgataacattggtaccaagcagtatagggtcttttatcctggagattctgaacctctgtgatggacccctgaggtcccctctactatgacagtcccattctgaggggaatttggccttaatgcttcctctttggcatagcaaactctgcttcctcttcttctggagagggtgcacagaaatgttttctctagtctgtaactatggagaggtaatttgtttctgggagggagacgaagtagggcacctttaactatttgatctgagtttttgtccttgaatcatgtggaattacacatagggtttatatacccccccaccccccaccccatgcagctgcaagattctatctgccttttcttctccttccatatgggattgacatccctgtaggatccaagtgcttgtggagtgaggaggacactttagaagggcctagggtgatggagctaatgcagaactccttgtaacctcttaaggtgtagtggctggcactgaggttggggctgtgaccatggtgagaggtgctccgggtctgggtgtgcctctcagtcttgtagatggcttgggcatgagggagggagggactgacaggaagcaggaagactccatgtgtttggcatggccgcttacttggagaatggcagtgccattgctgagatggagaagaccgggggcagagcaggctggacacagcaacagcgagcatcccagaaaattgggcatcacttgaagggctgggtgtctcatccggtttcctttttctgagcatgctgcatatcacatgggaatctctacaagcagaggaggagaaggtggtttcagaaacagcccttggccctggagaaaggcatcttgtgtgaagacgaaggtgccctgtgggaggagctgtgtccatccctcagcggtctcctccattgggcctcacagaggtacctcaagtccctgcacctgtggtatcatggttatatatggagatggaacccggggtttcaggtgagggagtttgacacttcactggttcatatgtgacatactccagaggtatttgcgacctggtttagtcctgacccctttattgttctmgtggagatactttccttcctctcttcttctgtttgaaactaggactccacatcttgccctagaattgccacccacctgtgtgacgcctgggcctccgagtagatgaggccagaatctccaacagtcacctgcagctggtggggatggagatcctctgcctgcctccggccaaacaacagcttgagtttaatcagtcctttggctgtcataacaagtcatgaggggcttttgtttgttttccaaaattattattttacaacatctggactctttctgctttgaaaacaaaacgaaaaccctttccaaagaaaataaacattttaatgatagcattttaatttaaaaaattacagtagaaaaaaataaaatgaggttacttttttaaatgttgacagagaaaaaaattcaaaacccaaactgggtcagacagacaatagtaggaacaacaagttctgcctatgtcggcttgcagcagagacccagttaatcaaaaacaaattgtatttccaaaaagggggcggaggaggagctttgtgcacttccttaggattttcacatcgtgggtagtaacatagtcagrtggcagatttttctgtttggattaaagtttctattttcagcaaccacttccctgaaagcatgctgctccctgacccgagggtctcatgagcagccatcctggacgcagcgccacgtagggcctggggagcagaaagtcagctgagtgccctgagtccccatttacacccccaggccctcaccattggctcttctttttaaagcatttactcatgctctcgtctggatgatgtggtttccaggcctccaaccaggaagaagccgcacgtttcccttgacaggaaaattgaaagctgattacctggtggcaagtgaggaaggtgagcccatcacagtgaatagtttgaaaactgaaaaggtgcagcaagccaggtgcgtttaataagatctgcagtcctgtgcatcccaagagaaggcactttgtacacagtcacctacctgagtcatgttcattttcgtccccatatcagagatgagcagacaatggagcgcagggaaatgacccttaggggcacacagtcatgggcagggttggatctgtacagcattttaactgtgttgtgattctctagttcagaattgtctttaaaatcagggaaggatatacagatgctcctcgacttaacgatggggctgcatccccacaaactcataagttcaaaatatcatatgtcacaagtgcatttttttttttgagacagaatcttgctctgtcacctgggctagagtacagtggcgcgatctcagctcactgcagcctctgccccctgggctcaagtgattctcatgcctcagcctcttgaatagctgggattataggcatgaaccaccatgcccagctaatttttgtattttcagtagtgatggggtttcaccatattggccaggctgatctcgaacactgacctcacatgatccgcgcgcctcagcctcccaaactgctgggattaccggtgtgagccaccgacaactgcattttttacttctgatgttttggtcttatgataggttttttgggatgtaacaccattgtaagttgagaagcatactgagtgaatttcacaccatcctaaagtcgaaaaatcattgaactcttgtaagttggggactgtctgtagtacatgatagaaaaattttctcctagcatggtttgctttttatgaagtttctacccaagttgtatctcactggccaggagctgctgctagagattttcctactataacatctctcttgtctgaaggggttggctctattgatgtgctacccctgggagggccaatgcattaggcctttactcattcctgtcttactcatagaatcgatcctgctttcagctggctaggaggagatctcaaaggggtgagagagcggggctctagagacctgggagccctttagggatgactggattggtgtgatcatgaaggcaagcacactcaggtcccagggggaggtgaaagcaggagctggctctagaaagggtgcccatggggcctgtacaggaagcataactcttggactgtcttgtatcagttcgatatctgagggactcactgggaaaacagagcctagccaggactcctgtccagagtgatagcagctatggtttgccaagtactgactttggatcttgcaggctattgagaattcccatttaatagataaggagcctggggctggaggggtcctggagtccagttcagttctgcagcacctcctacatgacagagccagcattggagccagtgtctctgttttctcccctgatattatgggcaatggttttatcctggagcttcagcctgaaagaccctccaccagctgcccatcaggtggacgtggttggctggtggcgtcacatttcctccttaatttggattctgagaacagtcttctgtccttgaagattggacaacacttggggacttccaagaacatgttggtgactccctttgcccctatgctgggttccctgagccctgtgttttttggaaagggtgagccctttttttggatgttggttgtgagtgggaactgagccccctacgtgtccagggagctacttcgagggagatgtggcttgtctgcctaccccgacttcctggtgactgatgatcacacacctctcatgatactaagttttcctcttattttcagcttatttactaatcaggatatatgtctgggtgactgttatttttctatttctattttttttttttttttttgagacagggtttccctctgtcatccatgctgcagcctcaacctcccaggctcgagatccactcacttcagcctcccaagtagctgggactacaggtgtgcacctccacgcctggctaatttttgtatttttttgtagagacagggtttcgctatgttgcccaggctggtcttaaacttatgagctcaagcagtctgcctgccttggcttcccaaagtgctgggattacagcctcagccccaaaataatgtctttttaaaagcacggtttaattctatctggggaggcagaactctacatggagtgtagagttcatattcaccaggttaatgccagcttccctaacatgggatattaagcaggaaggaactttgagtataacattttgttgattaagaataaagaaattaagattaaattttattgggattcacttctggaatggtggtgttaggggctgtgtggacttgttgctcagtgaaacaataactgataaaaattattttaagaaaacaaccaaacttggaaatttgccgtatatcctaagggcatacagcacatgaagaaacatttattcaagaaaatctgctagatctcagtaagaatagcagatgtctgtggcacttgagccagaacctgctccttccttctcttttcccatccgctgcccagctcagcatgagagaagctatgaagagtgaccaagaagactgggttccctttcccctaagttcccatcaagggctatggtatctccccaggagggcaggctgtcagcatccccctacctccagcaaggctgcatgttgcagaggctaaattccaggagaatgtggctagcccctactcatagggcagaggttctacctgaggctgagaataatgggtccccagttgccctttgtcagtccagctagtttgtagggcagaggttccatccttggagaatcaagccaagaagagcaaaggctactgctcccatccagcaccctgttcataaagtggaagtgtcactccgasagaagtgggacacagtctgtgcgcccagctctagaacagtgactccaacattttcccaagtaggagaggtaggctataataacagaaagctctgaagctctctgaaagatactgactttgtttataaaagtgtagggaaagttcaagcctaagggtgttctaaaaaaaaaaaaatggagagtttggtggtaattaataagaggccgataagcaataggcaaaagcttgggccagagaccaggaaagagacagtaaagagtgtctgggatcagaacaaacctcaaactctgacatcaaaaactatccctgtgaaaggtctccatttaattagataaaatgtagaacaatgtatgccctaggcagttgtcaaaaacaatagagcaatcaggcagcaattagtggggtctaacagctgggtatgaaaacaccagaggcagacagcttaacaaagagattagggaagatacagacagccctgataaaatgattgtcatcccagagagaatgtgtgttcactcaaggctgtgcccccatgaggagcaaaatcagaggttgggtggggaggggaatatacttcaccacaggagtccagccaagtcattgaaaaaataagcaaacaaaaacaagccctgggatagaggggcttgtagtatccagagttgctacagtgtcttagctaagatgtcattttcaacacaaaattataagatatgcaaagaaataatgacagaaaaatgggtatgacagaaaaaaagcaggcaacagaatcttcctgggagaggacacagatgttgggcttaacaaagactttaaaactgctattatatttgttccactggtctacgtgtctatttttataccaktaccttactggtgcccagaaataaatttatacatttgtagccaacttatttttgacaaaggtgccaagaacaggcaatggggaaaggacagtgttgtcagtgaagagtcaaactctgtaaaatatttgaagagatttattctgagccaaatatgagtgaccagccccaggagatcctgagaacatgtgcccaaggtggtcaggctacaacttagttttatatgttttaaggagacataagatatcaatcagtacatgtaagatgtatattagtttggtcygggacaacttgaaatgatgggacttcagcttataggtggattcagagattttctgattgacggttgaaagtgttaagttattacytgaagacctggaatcatagaagggawtgtttgggttaagataaggggttgtggagaccagggttttatcatgcagatgcagcttccaggtagtaggctttagagctcttatacgacctaaaatcgtgccagactcttagttaattctctcccgggtcaggaaaaagacctggaaagggaaggggattctctacagaatgtagatttttccccacaagagacagctttgcagggctacttcatagtatgtcaaataaatatattttggagtaaaatattttgatttctttcagggcctgctatctgtcatgtgatgctatactggagtcaggctggaatctggtgtcttattactgcagagagtcagttttaagatctctgttttatcagtcttaaggcctctgttttaatgttaatgctggtcaattgtgcctaaatttcaaagggaggagggtataaatgagacatgtccaacctcctcttcccatcatagccttaactagatattcgggtttactttgaaatgctcctctccaagaggaggggtccagttcagttgcttgaggggcttagaattacatttttggcttatagtctccaataaatgctgttgagaaaatgggatatccacgtacagaagaatgaaattagacccttatttcttaccatatacaaaaattaactcaaaatcaattaaatacttaaatatgagaactgacactatgaaactgctgaagaaaacataggtgaggcgcttcaggacattggtacgggcaaggctttttgaataagatctcaaaagcacaggcaacmaaagcaaaaatagaaaaatggcattacattaagctaaaaagcttctgcacagcaaaggaaacaacaaagtgaaaagacaaactgcaggattgaagaaaatatttgcaaactatacrttagacaaggggttaacatcagaaacatacaaggaactcaaacaactcaattgcaggaaacaatccaatttaaaaatgggcaaaagacctgaatagacatttcccaaaagaagacatgcaaatggccaacaggtataggaagaaatgctcaacatcactaatcatcagggaaatgcaaattaaggaaacagctgtaaagtgaggaagaagcttggggcctggagtttataatctggggttggagtgtcctggttctactgctatctgctttatgaccttgagctggttgcttttccctctctgacactgggtttcacatgtggctctgagcactcagtgaaattatcactgggaagtgcttgatggaagctcttttccaccctactcttagcaggtcagatatggggaggaaagagagggagttaggtttctctgcttcactgttgatatggacttggtgccctgtgtcccagccgctctagccgtggctgaaaggggccaaggtagagctcaggctgtggcttcagagggtgcaagcctcaaccttggcagcttccacatggttttgagcctgccagtgtacagaagtcaagaattggggtttgggaaccactgcctagatttcagaggctgtatggaaactcctgggtgtccaggtagaagtttgctgcacaggtggggccctcatgaagaatttctgctagggcagtgcagaagggaaatgtggggtgggagcccccacacagagttcctatggggcaccgcctagtggagctgtgagaagaggaccactgtcctccagagcccagaatagtagctctactgatggctttcactgtacacacctggaaaagccacagacactcaacgctagcccatgaaaggagccaggagggggactataccctgctggccatttgcacatcttcttttgggaaatgtctattcagatcttttgcccatttttaaattggattatttgttttctgcagttgagttgtttgagttccttgtatgtttctgacgttaaccccttgtctaatatgtagtttgcaaatattttcttctgattttgtcttttcactctgttgattgtctgctttgctgtgcagaagcttgggcgcaactgcccaaggctgtggaagcccacctcttgcatcagcatgacctggatatgagacatggagtcaaaggagatcattttggagccttaaggtttgactgcccygttggatttcagacttgcctgggaccggtagcccctttattttggccaatttctcccatttggaatrgctgtgtttacccaatacctgcacccccattgtatctagaaagtaactaacttgcttttgattttacaggctcataggcagaagggacgtgccttgtctcagataagactttggactgtggacttttgagttaatgctgaaatgagttaagactttgggggactgttgggaaggcatgattggttttgaaaatgtgaggacatgagatttgataggggccaggggtggaatgatatggtttggctctgtgttcctacccagatctcatgttgaattgtactcccataattcccatgtgttgttggggggaccctgtgggagataactgaatcatggggggtggattctcccatactgttctcatgatagtaagtctcatgagatctgatggtttgatgaagggaaactcatttcacytggctctcattctctcttgctttctgcgatgtaagatgtgccttttgccttctgctatgattgtgaggcctccccaaccacatggaactgagtccattaaatctctttttgattgtaaattacccagtcctgggtatgtctttatcagcagcatgaaaacgaactattacaactgtgcatcctctgcaagcagaagcaggctcttctggctcttggcctctcactggcaacactcaccaattcaggtgctggatttgggtggtgataagatggaagatgcagatacaatccataaagcactgtgttaaggactgaattgtgtctctccttcagattcatatgttgaagtactaacccccaatgtgaccgtatttggagatggcgtctgtaaasagataattaaggttaaattaggacataaaagtagaaccctaatctcatagaactggtgtccttataagaagagacctcatgaaagagatgacagagaaaaggccatgtgaggacacagctagaaggtgactgtaagccaaagagagtggcctcaccaggaactgaatcagctggcatcttgaccttggacttcccagcctccaggactgtaagaaaataaatatctattgtttaagccccctagtctgtgggattttgttatggcaacctgagcagactaatccacatgtctaatgtggaatctcaatgctctttttgccaattctgccccactgaggaactaggaaagcagtcccactcaaaattataaaagcacaagcatgaatgatgattacaaataaaaaagactgttttggagattgtcttctttctacccttcttcatatatgtttgctgaccagcctggtgacagaagccatctgtcagcctgctgtggagtcgggttgtgagcacggtgatacaggggaacagaatcgcatgtcagcagttatcccagaaatgccaggtttgcttcagattttgatttcctccctgtttcctcccctcaaacagtggtggtggatcatcaaacagtatttttagaactgctttgcagcttccctgtagaaacctttcctcactacatggtttaatcctctcatctagccttgtttaagatctgcagaatgctatatttgtttaactttatttgagatttcaaggcttttctgaatgttgctccaagtaatctgatgaatgcagaactccaaaatttatgccttaaaaggcttaactactgatatgtttggaggcttacttattttctccctttattctaaaccacacagggcagggcagctaaaaaatccccttggaattagtgtcagaaagtccctttttaaaaattaataaacttaaatttttttagagcagttttagttcacagacaaattgagtggaaagtacagagagttcctatatgtctcttatcttcacacataaagtcttttaattgggctatcgtaactttcaaggacaaaaggacagtattctcctttatggagaagtagtaagtttcttggctagattgacggccttcagtgatggtaggggagggtgcaagtgtcaggctaactgaccagcctgcagctggagtgaacctgagcccagggtccagcagggtgtacttgtgtccgtgggtctggcggagccatataagatgtcagtggcagactcatatctaattccgggggaaaccttcccagtggtcacaacctcaggccgtgtcattctccagagagaatgtgtcatttaatcctaactcctacctttttaaggtagttttgcccgtgtatctcatttgacccttagtaaggcctagtgtcatttaacttagtaacttgtggtatacagagtcctcacgcatgctttcttacttgagattgcagcgaacttctaaggtgggaatattatccccactttatgacatggggtgtgagctgagagccagaggttccaacagccagcagctggttggtgtctgtttgatgatccgccaccactgtttgaggggggaaaatagggaggaaatcaaaatccagctgtggatggagatggcgtgctgtcctccatgcatcctgctccaggtccattgtctcccaaagggcatgtctgctgttccagagaaaagtcattcagtgatacttgtgaaaacatatgaataaaggaagactttatccaggaccatcacaataggtatggggaccacagcaacgggcttgcagtggtggggggagattgggctcaactcccaatacagcacgggcaagtgggaatttgtagtctaggaacagggtagggggtcagtggatgggaacttactaagaggaaacattgagagtaaagtggattctggctaaacccacctaacaggattcttgctaaactggccaggacaatcagacatcacctagggaatggtggtagaggaacctaatcagatattgaggaggggaggtttttgctaaactggctcagcagggttctttgctaaaactggattttacaaagaagtgcacagatgggcctagaaggttcaggaacctgactctagtttggccaagcagaaaatctttgttactgccactggtggaatggctgcaagccttatatttgaagagttaaatttgttttatatatacttaaatacttagctagtttaaaatattccatatagtaaatttaagttaaaaaatgtgtttaggccaggtgcggtgggtcaggcctataatcccagcaccgggatatttttgggaggccggggcaggcggatcacttgaggtcaggagtttgagaccagcctggccaacatggtgaaaccttgtctctactaaaaatacaaaaattagctgggtgtggtggcatgtgcctgtagtcccagctgctcgggaggctgaggcaggagaatcgctgaggcaggagaattgcttgaacccgggaggtggaggttgcagtgagtcgggattgtgccactgcactccagcctgggcaacagaacaagactttgtctcaaaaaaaaaatgtatttaaagaaaaacctgtggaccacagtacaaggtcatggtagaagcaatgatttcctgagtgtcagtagttcaggaaatactgtagtagtatccatgctagcttcgggaggtgacagtggaagtcaaagtcctgcccctttccagccttgctggttgtacacagaatgttgaggtcaagaacccccccagccccccattctctgaaccttgatgccctcactgaggcagggagtaatgatttccctatggtggggcaggccttgtttttaggagcaaatgacaaaacagaataaacaccattgttaccatttggggcactccaccagcacagaatcatagactgggggagggaggtgagggctggggaaagggaccacatctggcagggggcactgaagtgcctagtttgtgatttccctggaatttgataaattaaaacctggaccaggtcaagagcccaggggctccaactctacatcagttgcgtttccatcacatttatctgcgtctcactagtggttgaagaacatgtctggcccctgcactgctgagctgagcagtgctgtgaagcgttcagcagcattagtgttagtcttggcctgtgcaggtttctctgactgatcctgtgggtatctatgacctcagttatcttcgtacatcagtgcccacctgctcccaggtacactgttctggaatgatgtgaatttgttcacaccttcctagtgggtgtgcatctggccatccaagagtctggtcctcacggaaccctggttatggggccagatgatagtcctgagggcattaggtgatacctgtgttctcctgggctggctgagttctccagatgagagagagcattccttctgccagaggcctgcccacagtggctccactgtcagtgtcctggtttgcatgtacagaggcagggcttgaagttgggtggtaagtgggggcttgaggtggctacatgttggtttacagtttttagtttttctataggtttcttccagtgggagatgggaatacttctaaaaaatgaattccaaagtcacattttccctgatctctttatttcccagctaccaagagtgttttaaaaaatgtaaaagcacacatagagattttaattagctttcactgtcactgctcttggtggtggtaattttacatatgatatgtgacagggagacactttgtgagggcctttgttctcaatgtattctctccctctcataactcagatgtaaaatttggagaaagagataatggtgaaagtacctcaacattgtcttattttcacattgatattcctactcgttagcattttccatggaaacagcaccacaaccagattaggaatctttctggaacaaagggaaaatagttcttgtgacttttgtgagcagtctcactactgcattgtttatgggtgaggtcaccaaggagacctagctcaaaggcaaaagatggccctgctctaagggttttattaatagacctgaaattgcttgccctcttgaattacccaagtggttttagtttcttttgttgtttttgagttattggattttattttatatttgcagaatcagtgcttccttcagagatagggagtttggacggactaggtttagttgtgctgatgacaaatggacctttagaacccctggagacctcctgggacaaacgagttgccctttatgtgttggtcgtgaatgttgcctgttcatgtggtggtgggtgccatcttgacccagctttgccaggtctgagcaggggtctgtctttgctggtgagaagggatgctcattgcaattcttgtgggcaggttcctccctggtttgccccaagtgagaaagagatttgtcttcaaaagcccagtaggagagtccaagagagtaccaggacttttgagattggtttgaacaattgagatcctagggagttcttcactgcctgcaagctaaaacccagctctgtggtctggtgttaaaggatctccagaattgacctcgtcctggctctccagccccattctctgtccttgatacacaagactttcctgtttcctgagtgagtgcttgttgctggatgcacctgtgcctgttccttttgaagtcagatcaactcgcacctcatctggatcatcttttgccagatttcaagcttcttccttgcctctgtagcagcatggggcatgcatctcattttgtcttggagttgtgttatctgaatgttttactccatcattaaactgttggattcttgcaggcagagatcacttctgattcacttgtgtgttcactgtaagtgcctagctcagtacttgttgaacagatgaatggacagttccagattacagactcctttggacactctcatcagaaggcatttcaggtcatcaaaccaggcttgcgtgacaggatgacagagactccttctcctgcaggcagggctcctgtcttctgccctggtcccttccctattagcctgatctttgctgctggttgagaagaggtgccacatgagaagaaggcagatgttgctgttgagcatgaaggtgctgcgtgtcagttggcacttgtccctacatggttgaacttactcaaccacagctctggtgggtagctacagagcactgcccaaggaagggcatgggcctcagaggcacagcttattgcactcttttaaaaactgcatttctttttgaggtttcattattccagccactgtcagctttgcaataaagagctgtggtcagttcactgtggaagaggcccatggaggactgccagtgggggtcctccctcaccaaacacggaacgctgaacaaccagcaacacagccgagtagctgaagccatagaaccctctctccaggaaggtcctatataaacatcaggactgcttgctgcccttttgatttgttttaatgagaatagggaagactgaagtccttttgtgtctctgctaagtgttcaccccaacactgaatgtttcaaacaggattccattttcacagctaaaataaacaggttatacacyactttgccagagatctacatgtagtaaagttgctgaatgtgtgaccactttgtgtttccatgggacctagaggaccaagatgtctctccctgatttcagtttgttgttgaggaagctagaaacagcattgtaacgttggtgctgccacttggaggccttgggcaggtcatccccagtctcctggcttactgcctggtttctaaaatagcattgtcttcccggcatttcattgatctgtgatggttgcttcacatttatagccctttatggaattttgttgctactcagaaaattttttattttctcgtgaagccaattttgacacttgcgaattagaaggcaggctttcctagtgcttagaaaaataaacagagcctgcctgactccacttgtctgaagcacgttattattaactttcaacttattatcasttctgctcttaacgtggcgctgtagaaggaaatgatgtgtgtggtgttaatcttcagtgcctcttcaggcccacgtgccatcctgctgaaggtgcaggactggcaatggcaagggggatctacagctttggctggccttgacattctgcatcatgtgattgagcaagcctgagaccatcttaccagattcactctaggctctctgtcttttctttgttttcccaaagctctgttagcatggacttttgaaagttgcctgaatattaaagtactatactaataacttgctttctagtaaacaaaaccaaaagttggcttaatggttgctcactgacctggcataaactagaacacaaagcttcccatttagaaaaggttcaggcagcctcctgctgggatctgcccaacccctctaggaggtkgcatggatgcccacctcttcttccaagggtgcactttgcctttaggtttggggaaaagtactgggcgagcctttgggactgttgtgtctcatgagtgggctgaccttggtggaggcttgcgtttcccatgtggggcctgactttttatgtgtccagccagagtgatgagctcgttcactttccctgcagtgcttccttgttgaacctgaaagagaggacgtgggagcttttgtaggagagagaggacacatgctttattcttgaactgtgaggtgtatgtcaccagagagaattggagacagcggtgactgtttctcaaaacagcttgcacactcttcccttaccaaattaggattgagtaaaacctgttggtaatagtaaatagaaggaagttacaaataaaacacagtagtcataaaagcagagcagaggagccctgctcacagagccagccgtcaccacagacgcctgggcttgagttgtgtcttgctgattcagcaggagggtgcatttccccttccactttcctgttgaaatatattatttctgtacaatatttatagaatccctgtctccaccattagaaatacagaatattcttgctttttcactttgctattagttgatattgttggctaggttttgtctgtttatcctgttcacaaatttttgttttttaaactttattttttaactatttttgacagaaacaataacaatatttcttcgaggggtttaatttcagcttaatttaagaaaagaaaatcaaacatgaatgatacaaaaaagaatctgctctcatcctaaagttctgccttttgcttctctaggaagccctgtttcctgactagaatttagtgttgcttgatgggaaaagctggagatggagtcagagactgagtaaccacaggagatgcttatgaagacatgggtggggacagggcgggacataatgaggaactctacaactgaaaaagatgatgccttttattagcatttggtagtagtcgaattaatgtgctctgcactctcttctgcatatcggaaagagcactggactagtaaggcctgcctttaggtcctacttctgctgctgctgctgaccttgagggagcccctctaccattgtgagcctggctcccaggcatcaaactagaatagctgtctctcccagcccagcggtgtggtgtgaggaccaggcgagtcaaaacatgtgggcagcatttgcaagctgtgttgttgttgctcacacttatatttcttcccccttgagattttttacctacagagacctctagacaaggtgtttcctcccatggagaccagatgaggcaggtgagcgggcagaaggcaccttggcctgagwagttcttggtctcctcctctcttgaccctcttctgtggattggaaacattgtgagaaactacgtcccttgcttgcattggcagcagacactgttgaagtcctsggagaacacgatgctgtgaacagaccgaggggaggaatggtggctgctcctcacaagaggaaggggtcctgggcacatttggactttgcctcctggagtggcccacaatgcgggcactcccctgtggcagggagggggagtcaaggaaaggaactcagcattttcagggctgcattttcacacagcaagccctaaagctgcgtttgtttcctgaaacaatcttgatttcattcagaggaggaaaacgacattttggagagtctgcggtctggggtgctttgatcctcgttcacagtccagggaggtgtagccacatccccctcctctgccctgcttggcaactcacttttttgtggaatggtggccgctggccactgctgttttgaccaaatagctgggtggaccctgaaggggccattctggccatttctggcctcaggctgggtgacggtagaggatgtagtgtcaaggttatgcgtgactgatcctttctgtaaaacagcccatcccatccctcacattaaaggaatataaacccgagttcatttgtgttggggtttgcttgtgttaatttatagatcactttttttctaattgtttaaatgttctaaacaaaagagtttatgactaattatgtgtttatgttgtgtgtctgatacaatgtaaagccatctagttaacatgagagttatttgaccattctgtttaaagtttaagaaacacgtgctgtagggaaatctccatttggttactgaaagttgtgatggattgaaggggtggtggtgctccactgctttgtgggagctttctcccacccaagctcatgggtagtgttgaagcccccatgctacaacgtgacccccacccccagcctggggggcctggctcaagctggagagaactgggagagcacccatgcaggyggcctctggtggctggagctggagagtttcaagttgggggctgtctcagctcccaccatgtggactggctcatttgcagagtgggaggatgatggacatgggtaagcagaggggaagggccacatttgctgccagccttggagtcaatgggccagctcagccatgttcctgctgaggtgtttagctcagcccagactcctgagacaaatacgcctttctgcctaagctcacccccctgcacagcrtcctggctgctctatatagtgtcttagccaggctagcaggagttcccatgactgtcctyaccatgatggcatcgtcactgcatcccctgggttgagggggtgggtggtgagggcatggggtgaatgcaaaacactgtacggcaaggcaaaggacattgctgtggctgggatgtgggccgcccactttgcattctgtcctgagaagccatgagcagctgcagccacacctctcctgaaagggaagaaggagagaagcagagctygggttagaggctgttctagtggctggggcaagtcagggtccagcttccaggtggccagctctgggcaagggaagcaggagcaggcaccaggccaggcctgacagctttgtgtttgggtggaagaagaaaagggaagagaaatcaccatctttggcaatgaataaggcacacccagcctgctttggggtttagagcctcctgcactcccrcctccaccatagaggagccagactgggttcatgctccacagtcttccagctgcgtctcctggaatgaacctttgagtaacaactctgagtgagtgatgataccccccttattgtggacccacactcagagataagcccaactcacaggtcacggggaagcccgtgtccttatctcttcagttcccggccctcttggagcagcatgtctcctttgatgagggggttgaaatactggatgctttcctcggtcctttcatacacttattcagaaatttatgtgacacgctggaaggacttcctggacaacagacgggcaaactttcagttaattgtgtgagggcttcaagtggtttcaagtgacaatggagtaagaaatgagacttgtcaaagtccttgcctgttgtaggagagagaaccgcgctgctcctggtgcacgctgactgcagtcctaaccacgcagctctgacagcagaccgccatgtacagtgttcctgttgtctttgtctgtggtattgtgaaattgatgtggtaatcaaatgacgaatgaggcctggtgcgygggagtgagaggggtcatgtatgggaacactgggttgattcacctcaagaaaaagccccagaatccctggctgcagaacccaggggtgccgctgcctggaaaggacagagtagcaagccagcccctcacccaagggaaggcttcagaagaggcttggcccccaccattgtgggcctcaggttgtctaccattcatctttgttacactttgtgatgtagctctggaccaagcctcttatcatctttgtatccctaaggcctgctccataatagaccctcaactgtttgttaaagcaggagtccacagtccccgggctgcagaccagtactggcctgtggcctgttaggaactgggctgcacagcaggaggcgagtggcaggcattactgcctgagctccacttcttgtcaatcagcggtggcattagattctcgtaggagcacaaaccctgttgtgaactgcgtatgtgagggatctgggttgcgtgctccttatgagaatctaactaatgcctgatgatctgaggtggaacagtttcgtcgcgaaaccactccccttgaccagccccccaaaattgtcttccacaaaaccagtccctggtgtcaataaggttggggactgctgtgttaaagagattgccagtttacagagaagaaacagcatgaggtgcagaagcaagaaattggaggtgctgaagaaagagtggctgaagtgtgtggtgtggaaggcagtcggcagatccccgcccaccccaggctgctcctggcacctcccagacattgcgcttgtgattattgacacatctcactcatctcccagattgtgagcacctgttttgctcagcacaaacattttaaagcacttttttcagggcaacttattttcaaactgcttcttacagaaaatcccctgaacgttcatggtatatgggtgaaccacaaggagctgagctgcagttgtaaactgggctgtcccaaagaactccaggagaagctgggaaccaagaaggacataaaagaagtgagggaattgcctgccttgttatctgaggaagggcagtcccagagagggtggctgatgcaaaggccacaccagataaaagtctaaacagcaaagaggccagggcaggagcaggatgaagacactgctaggaggttcacaggccccgtcattgcwgttggacacagactgtgaggactgtgggagggacgctggtcaaattcccagggtatgggagttggggtactaagggagttgaagtcgtacttgtggggaagatagagctaatagagttgtcaatggattggatgtgggatgtgagaggaggaggaggccaggatgttatttcttgcctggagcaagtggaaggacagaactccatctactgagatgggaaaccttgaggggctggtgaggtgaaagaggaaggctggaacggtctgggcttgttctgctcctggagcatcctcctctgccctcttgtttacagggatatccatgtccctatccaaggtatctcagtcagttcaggctgctataacaaaataactgagactggtaaacagcagaaatgtacttcttagacctgtggatgttgggaaggcgctggcatttagggtctgctgagggccttcttgccatgtcctcacatgacaaaaggtgaagggcaaaaagggcctacctagttccctccagccctttcatacagcactaatcccacctatgaggccagagccctcagggtctaatcacctcccaaaggccccgcttcttaatactatcacattgatggctacatttcaacataaggaattctgggggacacattcagactgtagcacagtgactgactccctccattggagtctgggatgtgcatttgtattctggttcaggccctgtattatagtagtaagcatatttattaaactaatgaggcatgtcagttaagtaaatgaagttaactcattgccattgctgcctgtccatcatcactggcagacagtagggcttgggaaatggaaagccagagataaatgaacatctcccagtgagcacaagctcgggggccctaagtcaggtcatttgtgtctgcaggtgagaagggatacgcattgccagcatgttacttctcttcctgtgcttgattcaatttttttttttttgagatggagtctcgctttrttgcccaggctggagtgcagtagtgcgatctgggctcactgcaacctccacctcccgggttaaagcrattcttctgcctcagcctcccaagtagctgggactacaggcacgtgccaccacgcccagctaattttttgtatttttagtagaaaggggtttcaccacgttggccaagatggtctcgatctcctgaccttgtgatctgcctgccttggcctcccaaagtgctgggattactgggcccctgtgcttgatttttctaaagcacattactttcctgtatttaagccctagcagcgttggatggatgttttgcagcatgcttgggtgttaagtgtcctttgagtcagagctttactcacagtgaccctctcctgccctgtgcaggtatagagagctgggaggtgggaggtgggagagggctgggccccagctctgaggggaggaggaagcagacctcttcagtacaagaggaccatgatgctgccccctcagaacatggatgtctatcctggagggacagagcacccacctcacttccctgggagtccagggtccactcacactcctctgattgggagactctgaattccttccaacagtagtcgtaacttcatttgacaggcgaggaaactgatgcacagagatgggaccctgtggaaggtcacatgcttcacagcggttcaccaggtctgatgccattgcctgggctcccctcccccatgccaccaagccatattgcttcaaggaacaggcctgtgctctcatgttccttttcaatagcaacctttgggcctaatttttggtgattataaactgtagcgcaagcaaagtaccgtggaccttggtgaaaagttccggttggaggaactggagaaggtaggaaagttgggtaaaactcacatagacttagctgtagagaaagggcttccaggctcacagatggctccagtacaagcgctgtgggggccagcctcaggggaggttaggaaaagccaaggtgagaacctcacatgccaaggtgacaacctcacatggctgacagcccatgtactgagctcyatgcggatgttttctgtgtttcttcacatatgtgcttgctcctcagtgtgtcctggtgagaccagtgttatttccgttatacagaaactgaggctgagagaagctcagcagctctttcacctatgggggaggagggatctgaagtgggattagctgagcaagtgggtggattcctgaggccccactctgggcctcacaggttgatccaagggtttagtctgcggaagggcaggtgttgacacctgtcttaatccattttctgctactccaacaacataccacagcctgggtagtttgtaaagaaaagcaacttatttcttacagtctggaggctgggaagtccwggagcatggtgcccgcatctggtgagggtcttcccatggtggaagagtggaaggtggaagccagcatgagagacagagaggaaatcgggctaaactcccgatttatcgggaatccactcccctcactcctacagaaacagcattaatccattcatgaggacagagtcctcgygtcctaatcacctcttaagtgccccgcctcccactactgttagaatgacaattaagttttcaacacaggaactttggagaacacgttcaaactgtatcaagagccttttgtggaccagggtgctgggggcctggtgggcttggagccagagccccgagaggcatgaggaaggccttcctgagacccctcccaggtcccctccaccttgtccgtgttcctgcagcatgtggcctttccatcctagttaatacctgggcctttgaggcagcattttttgtttttgtattttatgctagagaagcatatttgactttgtttaaaaggttaagatctttcctaagcagatggcttttgtttgaaagaaaaaaaaatggaaggcctgcttgcttccactattcccttgcaccgtaggatggggaaggacacccagggttggagtagtctccaaagtgggcaaattagaatcaaggaccccaactgctgtatcgtaggcccaactcctcctgcatcgcctcccagaatcagtccttctgcttttatgacccatgccaaccccacaaccccttcccacttgacatcagatggcagttttctccagtgttcaacatcctcttcttcctgggcggccccctcaagttggccatatttaaggaagaatgagttttggtgtgttctcatctcatggtcacacgctcttcttctcatacctgttttatcatttgctttgcattaaaagttgattcatagcacttaactttctcattggttatgtagagacattcattcactcactcactcactcactcacttactcactcattccaaatataaaccagaggaagtttctgctgccattggctattgctctggaatacttggaagcaggccttcctggtctttgctgtatgcagcacgtaccttggctggtgacagacctgagcggatgcttgggagcagaatgtgagctgttgtggcaagcctgcacacaggccagtgctgccttgtctttggagtggagcctccagtttgctggtcaccttgggcttggccattctggagttactgctcctgttctctctgttggccttgccttgtccctgctgcccctccctgtcaccgcagccattctggctctggcccattcagtttatggcatcagtggctgcattttacttaccctgtgcccatccccatgtttgtgccatgtcatagaaagtcctcctaggtgcccgttgttctcttatttgctgggcttcaagaattggtggccctgaagcccccaagggtcccaggacccctgttaggtgtagacaaggtctgagtagatccctgggtagattcagtttccatctggccctaggggacccatggaaacggaggctggtctggaacactgtggtagagagtgggtcacattttctttctaggttggattaacagctctagtagagccacttcagtgaacccgtcgtctttacgttaaagtcatctcacaccatggagtctccagagtggtgaggtccaagcctagcctagggaatattgggagtaggggaggctcaggggatgtgttcagggtgttctgagccccacctggagttagagagggggtgtggtattgtgaaatatatacttggtctacctccctcttttcctgaggtattcttagaatctctggagcggtaagagtatctttgtatgctaatgagagaatctctggagcggtaagagtatatctttgtatgctaatgagatgactggtggctgggggctcttaaatttaggatttggctggttgccagggtaaccaatcccatgattagagggctggaatttacagtcttccaccctcccacctctggggaggggagagaggctgaaggttgagctggtaaatcaatggccagtgatttagttaattatgtctataatgaagctttcattaaagacccaaaaggaggccaggtgttatggctcacacctgtaatcccaccactttgggaggtcaaggtgggaggattgcttgaagtcaggagtttgagaccagcctgggcaacatagtgagaccycatctctaattttaaaaaattagtaattatccagatgtggtggcacacacgtgtggtcccagctactcaggaggctgagatgggtggatggcttgagcccaggagtttgaggctacaataagcctgatgtcattgcactccagcctaggagacagaacaagaccctgtctctaaaagctggaaaaaaaaaaaagtacaaaaccccaaaactccaaaggactgagttctgggagcttttggatagctgagcatgcagaggttcccggagagtggcacatagggcgggcagggcagctccacgcccttcccacatgccttgctctgtgcacctcttccagctggaggttcatccgcatcctttgcagtatccttcctgtctgtctgcaggaaggtgatatttgtctttctgaggttattattaatagtaactttcagtgccagtgaatggtgtgacacctcactgatctatgattttagctgtcttggatttggggtttctgagagtaagtcctttcctctttctgcccctctaaagtagcctctttcttagaggctgctgactcatgctcagcttcatgccagcctttcattttactttctctcttgtgctgcctgtgtttggagagcagaggcacagtgaagcttctcagcccatttgctgccacagtgacagcaataggctgtggtggggtaggacgggggtggggtaggacgggatccggtgggtggggcagggagargggcccccattgcacttgggctttttctttgggttgataacgatagttcatatttcatctccatgtgaccttgaaaaaaatcactctgagcatccgtgacctcatccgtgcaactccttttaaaaattattcttagaagaaccccartgaataagcaaaagtggagctctgatgtgttaatcctcacccctcaactccagctccggggagcctgagaggttcctgaggtggagggacctgcagtactcccgctaggcctctggcaaacstttcccaggactgctgctgaaggccttgccacctcactagtcctgtgtgaatcctaacacccctcccgtcctgccagtgccctctccaccacccctttccctgccccccatggctggaagggacatcatgggaagtgggatagaacctcagggtttactgtccacttgatggcctgccgcctcttgtcggaggggtcacatgagtgcgcagagtgaggaatgggagctgctcacttcatgggttattgcttcttttttcttgacyccaagaaaaaattccagccccctagacagctcccacacattctgtctcctcttctgcttaagtgcagtttttcctcctaatgaactctggtcttcaaatggagctgggaggaaaaacaaggaccttgggaatatacgaatccttggtgaattaccttatattaatgagaccaagaagagaaatcgagttcagctgtgcaaattagctttgcgttctgggccttgatgacttaaattgcagattctaattaaatgtccccaaataactatgaagtgcttctaaggtctttttgacctaaaagtttcygtgacctgtgaactctctcaagtgtaaaattagtctgtagatgtacccctttaagcatttctatctccagaaacctcatgatgcctaggatataaaccaccctcctaagggcagagcaggctggtggagtgggcagggaccctgcagggagaggtggaaaggggtaggcatgggtgagtttcggagcttccccagggctggcaggatgttggggtacagatgtgtccctctgttaggtggcctgtctccactgtcataagtgaagggggtgaccgacaccttcactaacaggctgagcagggcagcaaggcaggcaatggaatgctttagacacactgggaaaaggttcaaaagggaagagcctcttcttcaagctgaagtcatgcctggggtgctgccctgcctctggccagcatggggtgcaaatcttcagtgacacaagagtatggctgttagagaaggaggaagacagttccccatgatcacacccccagcatggctgtcatcttgatgcagccrcctgctggctgtcccctctgtacagtacctctttaaatggctgcaaacagagcaaaggtgggctatttctttaaaaacacatgatgcagaactcacgtaagttttttttttaatgctatgttgtcttgtatacactttgtattggggtataaaaatcacctgtgtacagctcagtgaatttcacacagtaaagtctgtgtgtaacccgcacccagatcatttccagagccccggaagccctctcaccctccccagtcagtacccaccccttcaggataccactctccatactctggatgccacagmttcgtttggcctgtgcttgaacttcgtatgaatggatttgcctagaatggtcttaacttttccccttgacgttgtttctgagactcatcccattgtttcatctgttctactgttgacgaacatttaggttgtctcaggtatcttgctactgtgaatgttgctgttctaaaccttctctacaggcttttggtgagcataagtgtgcgtttctgttagcagctccccctctgagttgtatgccaggtcacagggtaggtgcatgttcaacttaagtagagacggccagttttccagcgcgggtgactatttacgctctaccagtagtatcacttccagttactccacgtcctcatcaacacttggtactgttggtcttttgtcatttttgctattccagtgcttgtgcagaggtatctcatgggttcagtttgcatttccctgatgactaatggggttgaagaacttctcctgtgtctgttggctttattatgatcattttgatagccagataatagtgtgtcttatggatgttccagaacattcttttcttacctatagctgggcatttggattgctttattattataagtaatgctgcaataagcatttttacccagtagtcttttccatgttctatactattggcaagagttttgttatcatttacaaattttgataattaatgccagatggctttctgaatgtttgaactactctaagatggagtaacaatataggagagtcctagacagcttcccccaggtcctccagcaatgtgtattctcattgaagaacaaacaaaactcttttggaggacgaatttaggtgaaggaaagcatatttagcattgcgttacttaatgagtttggtcactttttcaaaatgtttaccatgtgtgttcctcatttataaattcctaccttttgccacttgcattttggtgagttttttgttaatgtgtacaaccattactgtaaaaagcagatattagtactgtaagcactttcctgttttaccagtcacattgcacattgcttcacttgtgtgccttttgacgttaaccagcaaatcttccccttggtgatttttattgtggctcccccaccaggccactgccgtgtctgcagagatgcccagactgaaggtccctgggcacccctagtgggagggataggagcatagcctgtgagagaaactgagtcagccctgggctaagcactctgctcttgcggtcatctgattccccgaccctggtgctttgagagggatggctcatgagctgagccctgccctgtggcctgccaaacagcccctgtggtgctgggactgagtggggcctgggggcccagcagcagcagcattgtgggaactcagtggagtttgcagagccctctcctgttcacgcacatttggttttcattgcagccccatgagatgggtgcagcccatccatcctgaagggcagggccttaagagggccctgcagcttctcccagggcctacagtttgtgagtggggaaactggtctcacattctcatccccctaaaccacacccagctgctcacctggctctttaggacaggcccagactcccccagcagatcagccctgcaggggagaggaatatgtgctttctctttctcatttattttgggtttgagcaaaacttgtatttttgagccagaaggttggattggggtgtggagctcaaacaaacatggagtagctcttggcctccacgtttctaggcattgcagtctctcagaaacttcatgtttgaccagcttgttaagttttcgctttcttatttttagatgatggatttggacatgcttctatgaagaaatgccacatggtccgagagcaaacatgtccagtaagttgtttggtgaattaacccaaggacaggagcccaggtccttcaggcacagggtgtggacaccctttgagaagatcagggctgtctctggaaatatgaagacctctgagagagtgttttaaactaggcttattgctcagtctaattatcttaacttgtaaaggttggttctttctagagacagcaggagttgtagcatatagggttggaaaaacctgaaacaccttctcgctgcttaatctagttytgagagcagagtgtgagctctggagctctgagccatgtgaagcgtgtgactcagcctgtggcagtgttttacccagagccctccctttccatagcacagcaccctccacttcgcttaggcccagattacatgctttgcgggaaggaaagcctgagacccagacacacgtgaagtttatgcagctctgggaagaaagccagcaggttagagttgtgagctttgtctcactagtgttttgccacctgtatgtagcccgtggacagcagactcttctgcagctcttacccttctcacagaggttgtggtgaattgatttaaatrtttaaaggttctaagagacttgccaacagaagagcataataaagagaacaagaaaatctcgaaagccatattttataattatatgaaaaccatcattcactgtggcatatctctgctgaagaggacaggacatcctcaagggatcccatggacaccctgtgttggggagtggggaggaagaagtgaccagaaggggcagggagcagyggacagtccaccccggttcctcacatgctggggaaccctgtcactgtacctcgcccccggtaggtcacgttctttctaaatgagagcatgatttctctccatcaccgtccccatggtttcttacaagtgctccttttctcagggctactgccactttagtggactagggctcggtgccagcacttcccgggtaatcaggcgtggtctgaccgaggatcaagaagcacatcatcaccaatgacatcatgacagcaagagagcacagccctcgccatggtgccagggcccgtgcaatgcagcgggcttccaccatcgacgtggcggccgacatgctgggcctctctctggcaggtgagcctcacagggcctgcaccgggctccaggtatgagctcacagcacctgggctccacactgcagcagtgctggcaggtacccaatgattccccatgactaccctagactacagggtaccctggtttggcatccttctggttgaaccaggaaatagggaagggggatgtcagccctcttcctgtgaaccgcttctgctggagcctgactacattagttttccagtttggtggcaggggcaccaccagggtagtgtgggaatgtccaagtgttttgctggcccatgcccaggccatggtaaaagccctccctgttgtggatrtgtagatctgaggaggagcaggggtttggttgtggggtcagggacttcttagcaatctcaaaaacaaaatatttttaaaataaagaaattgtcttgcatggcagtttttgttgttgttggggggaagtagagggtcatttgtgcatttaatctgaaaacagagaaaagtttattaaggatgatttttctgtcatttcttttctattcaggaaatatacaagacccagatgagcccattttagaatttagcttaggtaggtatctttcattatttttttgttttaaaaaatattttacttaaaaatgaaaacaaaaacactaccaccagtgcatgggcttgtctcagagagcttgctgctgctgccaccactgctgcagcgtttctgagaagacggagccctcacagttgtgaacttctgtggatgggaaggcaccttggagcctccgtgcccacaggctcctgtctcctcagcatggggcccgcccccttgggggtatgctctccacaggtggctggggacagggaggtgagcccacctagagctgccaacagagaccctccccacccccaccccaatgggggaaagggaaggaggggttggggaaaccgggcatagagttcagctttgttgcccctggctgcaaggccttgtgttggctgagtttcgctctctagccctcagttccctattgtataaaaggcaacattggcacctgcatgctctctttctcaggatcagataagaatatactaaaaagtggatcagaatgtgctgagtctggggtcagcgatacgtggcatcactgtgcttacccaggaggcctgagacgcctctccatcagagcccaatgctacccagcgctcctctccccttttcccattccttggtcaacattagttggtggcctggcaccaatgtccaagaggtggtgtgacataaaagaggcacctcctggggagtcagatgacctggattccagccctgaccatgccaggctaaccacatggccttgagcctgccactcgaccttgctggaacagtttcctcctgtgctacgtgaggatgctactgcttgtttgagagacaaagaagatcaaggtggttaagcaccccccagccccaaaagacttggacaaattgcaaaacccataaaagtgtaagtacactactggccgggtacagtagctcacacctgtaatcctagcactttgagaggctaagccaggaggattgcttgaggccaggagtttgagatcagcctgggcaacatagcaagaccctgtttctaaaaaagaaaaaaaaaaaacttacctggctgtagtggcacacgcatgtattgccagctactaaggaggctgaggtggaaggagcccttgagcctaggagtttgagactgcagtgagttatgattgggccacagagggataccctgtctctaaaaaataataataaaaaagaaacaaaaaatagaatttggaagaaacagagacattgcagaaagttttaaagaaataataatttatattggccaggcatggtggctcaatcctgtaatcccagcagtttgggaggccaaggtgggcggatcacatgaggtcaggagttcaagaccagcctggccaacatggtgaaaccctgtgtctacaaaaatacaaaaattagccaggcatgatggtgcgtgcctgtaatcccagctactcgggaggctgaagcaggggaatcgcttgaagccaggaggcggaggttgcagtgagccgagattgcaccattacactctagcctgggcaacagagcgagactctgtctcaaaaaaaaaaaaaaaaagaaagaaagaaattataatttgtatactcaagaaaagatagtatatctataaaacaaaaccaggacactataaagataaaaagaacaattgaagaacaagaacaatcttagaagtttaaaatatgatagacaaaatttaaaaaattctatgaagtttggaagttagtcaaggaattcttccagaaagtaagattttaaaaacaaagtagaaartgggtaagaaatagaaatggaaattttgagagtaaatccagaaggtccgatatttagaagaaaaaacagaagagaatgttaagggaggaaatgcaaagaaagaggaaatctccgagaactgaagaatgtgtctgtaggttaaaaatgtctaccaaggcccagcacaatgctgaaagagacccataacaaggtgtattgtggtgaaatttcggatcacagggaataaaatgaagatcctgaaaacttccagaaagaaaaaaaaaaacaggtcatacccaaggatcaggaataaaactggcatggaatgtctcagtgacattggaaacttgaagacagtgagacaacacctttaattatattttcaacccagaattctctgcccaaccagactatcagtcaaatgtgagtgtaggaagaaacttgtttcagctgcacagagttgtacagcaaaaatttacttcccctgcattctttctccggaagctagtggaggatgtgttctcatcctaaagagggaccacactgagcagagaagtcatgggatccaggaaacagggtcatcacaagagagaagtggaaggaatcccacatggttcttaatgagtaatatgtgcttaactttcatcatgacaatgtggatttaacacaaattgagctaaaatgattgcatatggagagagaatgacagttggtataattgagttaaaaatcctcatccgcctataaatcaggacatttctgaatctggtgaacgaaaaacagtaatatagtcatgttaattgggcacatggaggaagaaactgctttaaaaagtaaggattaattttatataaagtgaattttaccccagttttttttgttttgtttttgtttttgtttttttgttttttttttttgagacggagtctctctctgtctcccggggtggagtgcagtggcacaatctcggctcactgcaagctccgcctcctgggttcatgtcattctcctgcctcagcctcccgagtagttgggactacaggcacccaccaccacacccagctaattttttgtatttttagtagagacggggtttcactgtgttagccaggatggtctcgatctcctgacctcgtgatctgcccgcctcggcctcccaaagtgctgggattacaggcgtgagccaccgcgcctggccaccccagttttttaaaaagcgaggagtgggagctggattattgaatggacaaatgtgttgacttttaaaataaaactttaaatttttaaaaaagtatgttcattgtaaaaccttcaatacagaaaatgttgcagagaggtagtcagttatcactttggtatatatccttccaaatatatatgtttgaccctcacagagtactatatggagattttgaatgatttttggttgtggaagtatggaattatttccaaacatgtcatcctagtgctcttgacattcttttttcatgtggcaaaataccttttttaatatatatgggatctgcttgatcattttaaatgccttcatagagtctctaatagagctgtgccatacttattttagccagcctcctactgctggacattcaggttcttcccaatctgccattataaacactatcacagtgaacgtattcatacatagatctttcatacatgttgctgattatttccttaggatacactcttgaatatagcattgttgaatcaaatatatgcagtttacctcaacagcatttatttagtgtttattcagctgggattacagacgatcaggttggagagacaaggcttatatatcagaggtgtgtggtttctatggaaatatgccaaatgaatgacgtaagtgagcctgcaggctgctcagagaaaacttaatggaagctatggaacttgagccaggaatcaaaccctggttgaaatttagataggctgggttgggggaggaggccaggagagattgtcccttgtacgaaggcatgttctgaaggtggccatgggaccatcaacccttaaagtaatctcagtcttcccagcctttggccacctgctgtaccttacgtctgtctgccatcattactgcctgaaagacctgaatattcctaccttgcataggtgtcaagaaaactcacacctgataaaagggcaggtagagagaggccacaggtcattttagggtactttgtaacttaaagaagagacaagtagatcaatcaaattagggaattcctgtccaggcagacataatagaagaaacaaaagagaacttaaaatagtaataaaaccttgaagcctctagaagaaaaataggagaactttcaaactcagggtaggcaaagatttggacagagcacaaaaagcactgtttgttttagtttgctactgctgccataacaaattaccagaaatttagcatgttaaagcaatataaatgtattatcttacagttcccttagattagaaatccagtgtgctcactgggtctttgcttagagtctcacaacaccaaaatcagtgttagcagggctggatttatttagaaggcctctggggcctatttcctatctatttccttgctcattcgcgttgttggcagaattcagttgctagtggttttaaattttaggactccatttttttgctagctatcagttaaggcctgttcccagctcatagaggccactcacattcctcttgtggacttacagtcctcttcctccatcttcaaagctggcagtggcaggtctagtgccttccatgcttggaatctctcctgcctcttcttccattgttatatctttatgattcaccctaaggccttcctcttctatttttaagggctcctgtgatagattgagcccatctgcataatccatctgaagatcacttaatcacatctgtaaagtcccttttgccatgtaatgtaatctattcatagtttctgaggattaggacataggtactttttgtcagagaggggcttctctgcctaccacttcctaaaatttaaaaaagatacattgaatttcatcaaaataagaaattgctgtccataagagacatcactgagaaaatgaatagatgaaccacaaactggaaaaaaatattcacaacacgtatacttcacaaaggacaaataaatagtaaacaaccaaatttttaaaatgagcaaaagacttgagcagacactagacaaaataagttatacaaatgaacaataagcacatgttaaaatgatgcttaacagcataagtcatcatgtaaccgcaaattaaaacacatctattagaatgggtaaaattaacaacaacaacaacaacaaaacaaaacactctacccaactggaacttttgtatattgctggtgggagtggaaaatgatacaaacacattggaaaactgttggcttctcataaagttaaatatattttagttgtatgtaattatgcagaagaaatgaaaaagtgttcacaaaaagacatgaacaacaacatttatgtcacctttatttaatagttcaaaacggaaaacaacccaaatgtctattaacagtagaataaataaattgtacaatggaatatgactcattttttaaaaaagaatgaattatcaatacatgtaacaacacagatgagtctcgaaaacattccatttgtatgaaattcaagaacagacaaaagaatagtgatggaaatcagaaaatgcttgcaaaactaggagatttgtacaagagggaactttctagtctgatgaaaaagttgtgctatcttgttttgatggtgcttacatgggtgtttatgattgttaaagctcattgaacagaaaaacctaagctttttgtattttattgtatccaataaataatgaaggttcatgaagatacatgagaagatattacagagaaccaaaattaatttttggaaataaaaatcagtttattaattttaaaccactagttgtcatttaaaaataagaatgatgagggcatatatggcagagtgaagacttccaaaaatcttcttttctataaaggcaatgagtatactggcaaaaatggtcaaaatcaattggttcagaactctgaaaattaacagaggcttacagcactctgggtagcatttatttaagaaaaatggtgtattagtctgttcttgcagttctataaagaaatacctgaggctgagtaatttataaagaaaagaagtttaattggctcatggttctgcaggctatacaagcatggcaccagcatcttctcagcttctggtgagccctcagggaggttttatttatggcagaaggaaaagcgggagcgagcatcttacatgatgagagaaggattaaacgagagagggaggaggtgccacacacttaaacaaacaggtcttgcgtaaactcagagctagaactcactcatcaccaaggggatggcactaagtcattcatgagggatttgtcccccattatccaaataccttccaccaggccctacctccaatactggggattacctttcagcatgagatttggaggggacaaaacatccaaatcatatcaaatgggttcttagagagctttatgatgttttaacttgccctgttgctatcgtcctctctctagctccaagtagactttaaaggcaacatctttgatgttatagtgaaaatcaatagcctaaaagtccctgaaggggacagaatggggttggagatcctacaaaaaagcccctttcttagagagttatcattatttggcctgtctggcagttccctggaaaaccctacatcctgtacctgcctttatttggcttaactcagaatcagtgacaacagctttttccctgagaatgtttgtcaaaaacaatcactgtccattttttaacattgcagctgccagaggtagtagtaacagttggagcaaacaaaaagctaaccaaaaaaaccttaaaagggaaagctggggaatgagatattcacagggagatttgaaaagctctttcatattcctgggaacttcaaaggccagtgaagggctgtgcacatgtccagagctgtgtgcatactcaggagacgtgaaaaggccctaaacaattacctgagattgaccctgaggttctatgcaagtggcaaatgaaggctaagacagagttataaactgccttcctgaacattgaaaatgcaccccagtatacacacagggactcttagctacagcaaaggtctgtgattctggtatttaaggaaatatctgtccaaccattatctgactactaacctaatgaagcagtcacttcagtggccacacatgacaaagagtattactttacagaattagatcagaaaaggcactgaagaaacagccacacaaaagagcagcaacaacaaagcttggggaagggagagaatctaattccagagatctcacattatattatttaaaatgtgtagttttcaacaagaagttatgagatgttgcaaaaaagaaagtatggctcatacacagatrgaaaaaacccatacagtcagtagaaaccatccctaggaggcacaaatgtttaacttagtagacaaagatttttaaatcagctattttaagtatgttcaaataactgaaggagagtatgtctaaagaactgaggaaagtatgagaacagtgtctcaccaaatagagacttgaagagatagaaactataaagatatctaaatacaaattctggagttcaaaattataataactgaaatgaaaaattcattaagagaggctcaactgtaggtttgagaaggcagaagaaagaatcagcaaacttgaagacaggtcaattgagattatccagtctgaggaacagaaaggaaaaaagaatgaagaaaaatgaacagagcctcagagacctgtgggacacaatcaagtgcaccaatatacatataataggagttccagaagaagagtaaattgagaaggggggagataaaaatgtttgaataaatcatgaccaaaaacatcccatgtttgatggaaaacatgaatctacatatccaggaagcccaatgaactccacataggataaactcaaagagatccacacttgatacatcatactcaaatcattgaaagccaaagacagaatctttaaaatagcaagaaaggagtgacttatcatgtataagggatcatcaataagagtaacagctaatttctcatcagaaaccatggaggtcaggaaggtggtagggtgatgtattcaaactgctgaaagaaaaagacaaccaagaattttctattcggccaggcgcagtggctcacgcttgtaatcccagcactttgggaggccgaggcaggcagatcacaaggtcaggagatcgagaccatcctggctaacacagtgaaacccatctctactaaaaatacaaaaaaaattagctgggcgtggtggcaggcgcctgtagtcccagctactcgggaggctgaggcaggagaattggcgtgaacccgggaggcggagcttgcwgtgagccgagatcgcaccactgcactccagcctgggcaacagagcgagactgtctcaaaaaaaaaaaaaaaaaaatttctattcatcaaaaatatctttcaaaaatgaataagcagtatgtggtgtgtttatacaattgaatgttatcaataaaaaggaacgaagtacagatatttgctagagtatggataaacctttataatgtgctaattgaagaagccagatacaaaaagccacctattgtatgattccacttatatgaaatatatggactagacaaatctatatagatagaaagtagatcagtggtttcttgggggaccagtgaatgggggtaatgggtttggtttgttgtttttggattgatgagaatgttcaggaatttgtggtgatggttgcacaactctgaatgtctttaaaaaaccacagaattgggctgggcgcaatagctcatgcctgtaatcccagcactttggaggccgaggcaggtggatcacgaggtcaggagatccagaccatcctggctaaacggtgaaaccccgtctctactaaaaaaatacaaaaaattagctgggcgtggtggtgggcgcctgtagtcccagctactcgggaggctgaggcaggagaatggcgtgaacccgggaggcagagcttgcagtgagctgagatcgcgccactgcactccagcctgggcaacagagtgagactccatctcaaaataaaaaacaaaaaaagacaaaaaatacagaattgtgtactttaagagggtgaactttatgatatgtgaatcatatcttaaaagaaacgtagtaaaaattaaagcaatgctgctgaaaactcttattaaatctgtgaaggtaaatgaaggaaccatctcacagttcaagtacaaaataacaagaaagagagattgttaatgaagagatatgacagatttggtagttctagtatttgattgataggagacctagaagcagagagagagctggaaagaggagtagcagcaagccagaagcaacagaagaattctttccagagggaagaatggacttaagactcaagaatattccagctgccaggcatctccttatgagactaacaaattctaaggagaaagaaaatctttttctagataaataacaaacatcaaatctaccataaggacaactagaaaaagtgaaaaaaaaaaaaaaatctgaactacctggtccatgctaccagagaactgataggacaataaagaatctgagagcagaggctcacttattcccttgagggcttacagtggttcccaagagaaaggccaagagaaaggattagatggattaracactaagtgtctaaagacacttagtgctttaracagtgtctyagtgagaagtggcagggattgctttctagggtccgttaggggaaggatacttgttgaaacccctctcactttgatctaraatccaaaaggctaaatctaaacctctagagtaaaggaaccagaagcaggtgttcatagggactacaggttcattaagtttctgaaagtaaatgaaaatattttagagtgctagtgctccttggaaccttgcagaagtagttacaaatcttgtctggagaaagcaccatcctagacctcaaataatttctacaagcaattcttaaaatatagtgttcagcataaaatcatgaattctcagaaacatgaggagataagaaatatgaacagaaacaataaacatagaaatagatccaaaggggctgtatatattagagttaagagacagacactaaaataactgttattgactatatgtcttagttaataggggctgctatagcagaatattgtagactgggtgacttaaaaaatagaaatttattgctcacagttctggaacctgagaagtgcaagataaagatgctaggatatctgttgtctgatgggggccagcttcctggtttgcagatggacgtcgtcttgttgtgttctcacatggcagagagcagagcagaggaagcaagctcttgtgtctcttcttttaaaggcactaatcccattcatgaagactctaccctcatgacttaatcacctctgaaaggccccacccctaataccatcacattgggatataagatttcaacacataaattttggggtttgtgtcagaggacagacctacttaaagaaactttagggggacacaaacattcagtcataacactaggtaaagaagaataaggacattattgaacattttcagagaactagaaaccatgaaaagaaccaaatagatattctagaattaaaagaaaaatttcaagaagcaaatttacaaaatgaagccagagcaataaaaataatggaaaaaaaaatcagaggagagtaaaaacagcrtagtgagaggtctaatgttacatttattttgtatctttaagaaggaacacagaaaagggtcagaagcaatatttatagttgagcatttctcccaaagtaatacaacaattcgcagaacaaataaaaacaaatgtacctaggcacatcataataaaactactgaaagccatactcagtgggaaaattataaaagctaccagaaaacacaacacttaaagtagcaacaactagaccgaccgctgacttcataacagaaaaaacagaggcctaggcacaatatatttaaagggcttagagaaaatgactacttagagaacatttccttcaagaagtaaggtggaataaagacattttcaaaccttaaaagctgaaagaatgtcagcaccacacttacagtataaacagtgctaagagatgttcctaagtagaaggctgatgattycagatggacgttcaccaatagagaaagcattgaaaattcaaagacataagatttggggtaaacatctgggttatagctgcatgaatagcaactatagaaaaacacacacacaaatgtgtatgctaacaaaggagagacctgatatggcaatcttaatgtcagaaaaagtgtaattagaacccaaaagagcagatcgagctgtgaacagtggttagttagatcaccacaggtcctttcaaaggatggagatagccagtaacttactctgaatgaacatgacaaagatatcttcccaggtaaactctcctcaaaacatgccaaggtattgctctcccccacccttccaaattcatatctcctccttccctctttgtatttttcagtcttttaatctctccttttttctccctgttctttctttcatttttgttagtgtcttccttcatcccatcactcctcctctctctgaatttcctgtgcatttgtctcacctgttgtggacacaataacatatttttaaattggagttaatacttttttctattttattttaaaattgcgataaaatgtacataaaatttattattttaaccatttttaagtatacagtttggtggcattaagtatagtcgtgtgtcatttaatggtggggctacgttctgtcaaatgtgtcattaggtgatttcatccttgtgtgaacatgatagagtgtactaacaggatcccagatggcacagcttcctaggcacctaggctacatgtatagcctgttattcctaggctaccaacctggacagctactgtactaaatattataggcaattgtaacacaatggtaagtatttgtgtgtctaaacatagaaaaggtaatgtgtttgttctgggacgttaggatggctatgacatccctaggcaataggaatttttcagctccattataatctgtgagaccattgtcatatatgtggtttatcattgactgtaaatgaacaatggctcacttaagaaaaaaaaaagagctttgtttactttgccatagaattctaattttcttccagcatccatccatccacctgccaagacacgtggagcaccatatgctcagagtcagccacagcagtcacaggatgcaagcatgggtagctctgtcttagatttcgtagactctgtggctccttcactcaattggttagagttggaatagttaccgaggtcggacttgaagggttggacctatatgagatttctggctttgtgttccactccatggacatgggaagcccccgtcagcgcagcctttcactgaagttatgacattgctgtcttggagggtggcggggagggggcgtgaaaagagattgtttcaaatttaaaaaatcacttccctgtgacaactgacgatgtgatcgtctcatctctttgaatgtcatttactctttgtgctttctttgaatgtgtttggaacagaaaactaatcagagtctggttttaaaggattsatttctttcccgtgttgattctgtagcttgcagtgagctgcatactccatcgctagatcgaaagccaaatagttttgttgcggtgagtgtcaccacccctcctcaggcattctggacgaagcatgcacagacrgagatcattgaggtgggtgctggtggtctctctctgaggggctgtgggacatgctctagtggtgtctcttgtcctgatgttcagttacttgtgcatctgtagctgaagctgtatttacgtgagttgttgctattttcccatgggttttcagtacattgatatttttcatcacatttactcatctgggtggcatttatattgccatatcctttacagttattgattaactgttggcagcttgtttttgaacartgatcctgtaagcttcattgccttgtaagaggtaagacctaattccttcttgtcacctccaattggctgctactttgcaagagtggtgctcattaatcaaagcttagaagagtattaactatttaccaccctcttgtccagacatacccctatttttgttggtttttgtttttacagccttttgagttttgtgtcacatgttaacttttcccactaagttacatgataaacatttgtggataaacatttatggatgatccttttagatcatcaagcacattacataacactaagtgtaggagttggtggcatgagattctgcagagttttatttgtaaagtgaagaattatcaaacttaaactgcatttcttcttcttcaccagttgtgcattttggaagctagcccaccctttcagtctcttagaaacttatttccaagttcacgtcaacaattctgctttctaagcagttgtcgagtgctacctacacatctagcatagtgccaggcactgtggatgatacagagcccaccagggcacagtccctgccctgaggaattgaccagctggtgggtggggaggcagaaatgaatatggctacccstgtgcacagcagagtatgggaagtattggagtaggaaggtaaggagagcaccaggaggctgggatcctatctggctgtgagagtcagagcaggcttcctagggtggggcttcatgaaattctacttcagtatgtctggggtagggcccaagactgcatttcttacaagctcccaagtgatgcccaggtagccagtcgggggactccacatgaagagcacgccaaagttctgttgtggctatgcaaatgtgtgaccacagggaaggatcatgcaggtttggggtctaactgtatcctggtcagtgtgtgaaaggcacaagtaggagagcaaggaaagaaagccttgaaggccgtggagtttatcagcagatggtagtgagccagtgtaggcttctgtgcaggggagtcacctgaccagatgtcctaacttgtataggacaggcatttgggggagtgagagttggagggagtggaaagaaaggagcgtatgacagagactttgaaggtggaccttgcaaggggagttcatgatcactggatggttgagaacaacagagaagaaggcaccaaagtgaatgcccgggcttttagcctgcttggaaagggagtcagaggtggccttagccaagggcrggtggagggagagatgagttggttgaggccccagcagcccacccaggtggagctgtccagtcagcttgaccacctggatctggatctccagagagaaaaaggagccagaggcccagggaatggtggctgtgataattacctggtgcctgagagagtatggtattacggggctttggaggacatggccaggctgccaggaaatagtcacctatgatcaaaaaactagtagctgatcctaaaaaaaggatagcttttgaaaagtcaggctttaattattccaaacacaggcttctagaaatacataataaaccacttaagccattcattttctctctttcatctgcttatttgtacctcttaaaggaataactcaaagtagtaggtttacatacacattacactttaagttataaaactaagaatgcatgtggacatccaacttgtttcagtttttaaaaattcctcctgttgagtgtgaaacccatgaaatgagtcctcaggcacagcttgtgtaatgggctgatttattgyatgtggatctgtaatggtctatgtcagacttcttttttctcttttaaaaagcagagtttttttgtttgtttgttttatgtatttatttaagccgcctttagcatttgtgttgattcaaggcagtgagaatgttagtttctcattctgaaaatgttggtgtatttcaaaagcaattacattttaaaaatccaaccctgtgttctgattatttccttttctgttctagggaaccaacaatcctatatttctaagcagtattgccttctttcaagactctcttatcaatcagatgacacaagtcaaactctccgtgtatgatgtcaaagatagatctcagggaacagttaagtaatgtgttgtagttcgtgggattttcttccctttgaaaaaattatataatcgtttgaatgagagatgaacacagattgacttcactactggctcacaagttaactcatgtctaaatgcatttgtctttgcgaattgttaagctttcccattgggcttctgacataagggtaagaggtgttgtgggaagcagtcagctggactctctggggccatggtaattgcatcagaagcaaagcaagcgcaccaatgctgcctctcttccttctcttcctcagatgtatttactgggctctggaacgttcattgtcaaagatctgctccaggacaggcatcataggttgcatttaacactaaggttggtattcagttttattcccttgaaaggatctggaatcatgaggtccagggacagatggggaaaggacccacttcttatactgagagagcacccttcccttcccagaagccagtcagcgtggggacactgtgttgtctattgaggcgaaacaaattacttagcctatcagagaatggaaacttttagcatccataggagatatgagcacagctgtaccaagccctaaaggaaggcctagatacatatctagtaatactaagtgtgtttctccattatttagcccctccccagtggaatataatctcccatagagcagggagttttgtctgctttgcttcactgctatttcccagacacctagaatgtgtctggtgctcaataaatatttatggaaggaatgagtgaatgaaagggaaacgcccactgtctcccaggatggaaagatgaaagacatcaggatgtcagtccttccaaatcattttaggggcacttcccaccaaaaccctgacatggtggtcttttttcagaaaaaggtaaaaattggagaactgtgatctgggaaagtaatctagagtagcaaggaaaatttgacaaacaattaagtccctgcagtattgagacattctgaagctactataagtaaagacagtattgcaggcattggctgtctaatcagtggacaggatcagagccctgcagcagcccttagtttgtttagagaacttgattcaggaaaaaggaaccatctttggtaaaatgagagggatcwtgtaagggaaagggctttgagaaaaatatttagttacgtcaygtgtcagagttaactctagttgggttagagttaaatgtacaaaatagacatcattctttttaaaggagctaaaggcggctgatgattgaacagatagagcaggaaaggacttcacaggcacgaggacagggcaaggaaatcacaaaggaaatggtcagtagatgggaccagacaaaaatttagaacctgattaagtgagaccttgtaaatagaaagcctgaagttccagggtgtccccaggttccctggatgaatcagatgagcccaggcyaccatcagccacccttcgggatgtcagggtaaagctgactgaggctggggtagcatcagctgtgtcatatcaggattcaagggcttcaggaagccctggctggattccattacttggagtccaggcttaggccttgggctaatataagcctcaaggtggggtgggaaggaacagaaaagggcccagggccagaacaaggtgttctgtagtcctcactctgacacgtgtccccctcaccctctgggcaggggtgagcacaggcactggcagcagctcaggaacagcattggctcctcctcagggaggccccctctgacttcaccagcacgtccacacttccctgtggtgcgtgtccgttcagacacagccctccactgtgccccatggtttccttgtctgtctcgcctgagaggagccctgtgtgcacagtgaatgctgactgactggtcagtcagctcggccctgctgccccyaggaccctgatgacccagtacggctagggctttgtatttcagcagaaaagaagcacagttgcagcaccactcattaaagcatgttgtgcatcacaggtctgcagagagtgaccgtgtaggtaacatcaccgtgattggctggcagatggaggagaagtcagaccaacggccccctgtgacccggtctgtggacactgtcaatgggagggtgagttacaccactttcctcctctcccttagaaagagcaagggaattaatcagtaaaaatgcagccctcgtggacttagcctctgtgctcagcaaagggcagggcctgctgcttgatgctgctccccacggacactccggtcctccttaggcacaccttgaagcaggaaaaagggctcctgcctgtaaagccctgctgccctggagccggcttctgttctgggtgccacactggccaattctagagggcaggagtgagtgggaaagagccctactggaagaactgcagtcagggggcaacttgggtgtggagggtgagcaaagaggcatttaggacccaggtcatctgtcctgttttaataccttcctctcccagacacatgcatgccctgcagtctcctggtgcacaccttcaccttttcacatcctcccctcttccctggtcctcctccccctctctagctacaccctcctgcacccactgtcatgcatagtctctcacacagacactcaaagaaaaattctaatttcagagccctagcgctggtaagtagtcattgttgtacaatacagagatgtctcatttcacccaaaataagcccagaatgttagttctggaaatatcccttggcatcatctattctcttccttttcgtttttacatcagaacactgacacacaaggtgaagtgactgagaaaccatgcatgcctagagaattgtgtgcgcatgaagtgattcaacacactgggaggtgaatgactttgtggcttgggcagcatatttattgtagagttcatggtggatattcatcttaagacttctgttaygatgtatttaggccactgtttctgctgaatgttctggagtcatctgaatctcacagttttcttgtgcatttccttatacattatcagatggttcttcctgtcgatgagagcttgacggaggcgttaggaatccgatccaaatacgcttcattgcgaaaggacactttgctgaaatcgggtaaacagcttcctcctttggtattcttgcctctctagtgagtatccacttgggcccgcagtcccctttgctccccacctgctgcgattgtcccagccatgcaccctaattgtcacctctctgctgcttatcattgtgttctttttgcagcatataaagagttatcacaaaaaacaattataattttccttgaaagaggattaaaaaataaaaaagaattagtaatactccaaggaagtaatacttcatctcactcttttctgtttcacattggggttggtgactgacgacagcctccctgcccccagctgcttgcactttagagttagttacatgttctgggacaggaagattgcatgttgctgggaagaaatgttcagacctagccacttggtgggttttcggtgtaagcgttttaattcccatgagatgaacagtgagaggacttgaggtgtcaccatccctgagggccgggggaggagaacccatgaggcaggtctgcagccagttcatttgcagcctgtctcccttgtcatcccacctcagtgttcggyggtgccatctgccgcatgtaccggtttccaaccactgatggtaaccatttgcggatcctggagcagatggcagagagcgtgctctccctgcacgtgccccggcagttcgtgaagctcctactagaggaagatgcagccaggtgaggccacatggaaggactgactgtccatcatacccatgtcatgtgccccttcctttctgagatatagcgggcagagcactggcatcagatagactggactgcaaacacagcctctccccctgcagctctgtggccttggcttgcctaagcctcaktttgctcattgggatcatggattcctgtgcaaggatttcataagacagtgtatttgaacccagatgtgtgccccacactcagaacctcctcttttctcttctttactctttttttttgagacagagtcttgctctgtcgctcaggctggagtgcagtggtgcgatctcagctcaatgcagcctcttctcccaggttcaagtaattctcctgcctcagcctctgaagtagctgagattacaggtgtgcgccaccaggcctggctaatttttgtatttttagtagatatggtgtttcaccatgttggtcaggctggtctcgaactactgacctcagatgatccacccacctcggcctcccaaagtgctgggattacaggtgtgagccaccatgcccggccttccttctcttcttttctttcccctctcactggtccttcagaaagttagaaataactggtaattgtttgatcctagctgcccagcagtagttttctaggttagggtcatagataagggctccagaagactgagtataacctgtcagctcactgtggtcccataagggtcttaacccttctgcatctctcaacccagggcatattttgtcagttctaaggtgaggagaagcccaacaggtggcccaggccgtgcatattatgtcccctgtctctctctgttttaattttgtgctgctgtaacagaatgccagagaatgagtaacttctaatgatcagaaaagtatttgactcaaggttctggaaactgggaagtccaaaagcatggtactggcatctggggagggccttcatgctgcaccatcctgtggtggaaggcgtcacacagcaagagcgctcttgagagaaggccaaacttgcttttataacaaacccactgttgtaataaccaacccattcccatgataatgacatcaatccattcatgagggcagagccctcatgacctcgtcatctcttaaaggtcccacttctcaaaactgtggcattcaggatgaagtttctaacatatgaactttgggggatagtctcagattgttatttctcctccttgtcctcaaatggtgttaattataaacacaatataacagaagcgtgaaagaaagcaaggcagccagaatcctgctgttttcaaagagctattttgtttaatttttttacttggaaaaaacatcaaacttaaaaataaagggcaagaggccaggcgcagtggctcacgcctgtaatcccagcactttgggaggctgaggcaggtggatcacgaggtcaggagattgagaccatcctgactaacacggtgaaacctcgtttctactaaaaatacaaaaaattagccgggcgcggtggtgggcgcctgtagtcccagctactcgggaggcagaggcaggagaatggcgtgaacccaggaggcggagcttgcagtgagccgagatcacgccactgcactccagccttggtgacagagcgagactccgtctcaaaaaaaaaaaaaaaatgcaagaagaatgcaatgagcacctagatatctttcacctaaaatcaccaattgttaatattttgccaattgctttctctatatatgcacatattttaatattttaattataaaaattttcattcagctttgcccatatttgtgtatatttacacagtggcaatctacttttccatgtatcttcagtttttatgttttaatttcccattacatggtgtattataactttaaagagtttattcattttttgttagcttgagacagggtattgctctgtcacccaggctggagtgcagtggcaccatcatagctcactacagcctgaaactcctgggctcaagccatcatcctcttacctcagcttcctgaacagatagaactacaagcacacaccactatgcccagctaattttttcatttgttgtagagacagggtcttgctgtgttgcctaggctggtccctagctcctggcctcaagtgatcctcccaccttggcctctcaaaaagctgggattccaggcatgacccaccattcctggccaagagttcattcatttaacaagtgctttagttcaagggttttgttgttgtttttagcaacaaccacatgtcaggcactgttctcagtgtgggaggcttcttggtgagctcaacgtggatgttggttggaaacagaactgggaacctcacgcaggaactccagatgtttcagcgtgtgctggaaatgaaaagggaactgtgagaagaaagagggtgatcggggcaggcctctgtgagatgatgacattaaactaacacctgaagcataggaagccaccacatgaacacgggcagacacattccagagaaactagcagcggcctggcagacagctgctgtgctcagagcggcctgaggccatggggccggctggccacgtagccctacctgctctgggtgtccttttatattaattttgctattttaataataataaaatggcacagcttttaaaaacaatttagacaagtcagatttcctaagaacttatgtaaaatttagctttttttctttctcaaaggaaaacatgagtgcagtataaaaaaaaaattgcagaaaggtttttaactaaaaacaactcggggctctactttctgatctacttcccggaagcaaccaatttttgagagttttagtgtttactgatgtatttccacatatatgtgtaaagtgttctcttcattaatcaatttcagggattagctaccgattttctatgctgagggtttggccttttataccttcccagtccccattttcctaatttggttatgctttttgtttttaaatccatcttgtgattttgctgttatgattgtgtagctgttcttcattgctgagctaaggaatttatatttcagttcttatacaggtttttttttttggagataacaattcctctttttcttctcttctcttcctcctcttcccccttcccccttctgttaccctgtgcctctgtcaagcacacacataaagacaaggtcaggcctgatttcatccacagtgacacagcgggccacttttaggttcagacagctcctctcttttttttttttgagatggagtctctattgcctaggctggagtgcagtggtgcgatcctggctcactgcaagccccgcctcccaggttcacgccattctcctgcctcagccttccaagtagctgggactacaggcgcccaccaccacgcccggctaattttttgtattttttagtagagacggggtttcaccatgttagccaggatggtctcaatctagctcctctcttacatagacacggaaggaagaagaatcagaggtgccagctcccatggtctttgtcccgtacccaaaaaggatggcaatgagacagaagggcttgtgactgcagcaggatctgtggtattccgctgctgaggagccaactctaggctgcagctgagcggttttagattctgcggctcccctatccgggagggcagaaggcccatacctcaggagaacctgggaggcaatgagaagcgctgtcctgatagcctcctaggggagatgacgaggcaagcaggaggtggctcattgcgattactcacagcctgcagtcctctctgttccgggaggatcacacgttgttttgcccagactcaggtgggctgtggtttgagcctgtgcttgagggcacctgcaggtcgtcagggtaaagcttctccctagcagcctgtcttcttctccccacctccacttagtttcccttgaacattagactaaattcccgtgaaaagctactctggacacactgccacgtggtcagtggtctgcttttcatgtagctgtctgtcctctcctccaacccagttgccctttagacaggcagtgtaaccattgtcctggcctgccctgggcatccatgatacttcccctgcaaatgctgttgtcctgggtagacctcctgggcctctctggggaaaccagttagcccacagcctgatgcatctgtgtcttgctttcakagtgtgtgagctggaggagctgggagagctgtccccttgctgggagagcctccggcgccaaattgtcacccagtaccagaccatcatcctcacataccaggagaacctgaccgacctccatcagtacagaggtgggtgcacccccatgctgtcaccacacacgcgtgcgcrcacacacacacacacactctcactctcactcagtcactccctctgctttcccagccagggatctggaacacagggtcacttacacattcccactgacagacactttaatggatttttaaaaataacttcttatgtaggtgtgaattctttcaaatatgggtttttctgatcttaattaaaaagacaaatctgtgaattgcagtgaagagtcctcctatggtgtcatctaccaaaacagccactgtggaatgaaatttaggggaggcgaaatcccgggctattactgcttcatgttgtttcttcatcttggactaatgtcagtataggatgtactaacagaaaggatgtaggccactcgccttgaaacaaagcagtttttcttgatttcccagtttaaagagtcagtggtaacttctattaaacatatgaattgttaaggggtaactctgtattttaaggctcagaaaacaaaatggagtgtgaatgaacacctcactgtttctccttgaaagatgccatttgattttcaaaacactctcagggcagatttggaaatctgttcttgttccttttttattccaagtggaatgaattttttggtttttcattactctatatattgctttagcattttgaattattctctatttttggattcttccctttgattcttttacataatggaatttcagggtttaaggaaaaccataagcccttgatgtggttttgacacagaacatgtgaacccatccataaacttgaatgagaagaagccaaatgcaggactaacaaggaggtgttgcttaggcttgatgtgagtctgaagagagggtctgagtatgtcactaggagaaacggcaacatttgcccaggaaggaaccaagggactcacccatgcctgatgcctcttacctgggaaagtgtggaacccacacaaccttgagttttctagagcagagcttctcaaatgtcactgtgcacccggatcccttgagaattgtgttgaagtggcagtctgggattgtgcctttctcacaggctctcggatgctcatggtgcggtctgtggactgcaccctacgtatcaggccatagagagcagtctcctatggcaaattggagaacacagtagctggtctgtgattcatatgctggcagtatcagtgatatttttcactagatgaaacgtttatttcttctactctctggttgtcagtttaatttgtaatccctttattttgtaggcatgtgattctccatttaattagttatggattctgattatagaaacaagattgtgcatatttgttataaaatagcgtccaggctccttaaccaaccaggcgtaaacagggaaacattgtattttgtgtgtcagaaggccggaatcaatgctatattgcatttgttatcttgatgggcctgcagggatgagaaggcctcttcatcactttcgagagttgagatgtattgctctagccaaaccagattcttagctctttgatgatggcggtctctggagtcagaacaggcagtctctggcgtggacccctttgcttattatagtagtgctgacattgtgctgcacagaatcacattttttgtatcagatctctcagtagagagctgagtcacggaaggcgcagcatcgttaccatagctttttgaagccggttctccctggcaccattcaccacctgagcacccagaaccagctctcctgaccagcaggctgcccttggcatctcacccacctgccacctggaaatgaaatgtgctcatggcaactcagaatcttctaggccactgccgacatacctgcttatatgccacagcatcctctgaattccattttctacttgcaactcgtgaatgcagcatgtatgctgatggcctttatcttctcctattccatttcttagggccctcgtttaaagcaagcagtttgaaagcagataaaaagttagaatttgttcccacaaacttgcacatacaaaggatgagagttcaagacgatggaggatcaggtacctatttttctgctccctcttgttgaatcacatttcgctgcttttctctgtgggtacttggtccctgagtaccccacatctgcccatttccctgtgtgctctgggcrgctcggaggagagatttgtcacaaggaccttcaaaaggtttctgataacagcccacaccccttccttttgtctctcctcactctagcttccctttgtatttctgcagtagaaagttgcctgtcggcccttcttcccaaggagggatgcaaacgggagttacagggtggcttcctgcagcccttgtggctccacttgaaatgttttaaaccccttgttgctgaggtgatggcactgggctccagcagacccttgggcagccagggctgtgggatcaggggaaccaaaggctgtacagcagtgggctggagggtcaggaccccagacttgtgtgcatatccctatagctggcttgtccacaggcctgagcccagagtaatggaggagagctttctgtcattcagatcagaactacgacatcgtcaccattggggcgccagcagcacactgccaaggttttaagtcaggaggtctccgcaaaaagctgcacaaatttgaagagaccaagaaacagtaagtagccagagagggtttgtggtccttgtacagctttctgatgcttcttttctcagtttaaaataaaatcaaaatatgaccgcaaaaacacccagccatcwgatctgcttttgcgtggcaggaggatctgccttatggagcctgtgctgctctgtttatgtgtgactgagctgggtgggtgatgagggcactggatcaatggtcctgtcctgcaaaatgaggagcagattgtgatccacctcagaagtggtgctccaggcaaccgccctatgtagactctgctggcttggcatcctttagagtccctggccagtcagttgagcaccataggcatcgagcctggagcatgttgtttcctagaggacagcagtggtaaacattcccagtttttgaaacattcagggggctgtacagagctactgtcctgagcaggaaatttccaggtagggagggtggtgaagggcatttcagacaaagacatggcagaagcattgcacatggtgaaatgtggccaggtgcacagtgctgggggcggagagctaagaggactggccttgctgccagcctgctctgtgaccagagttacagcccccagcagatctaggcctggttccaggagctcagggccttgcctgggagtagacaagtcagcaagcaccatttggcatgaacagggcctgaaacaagcatgctgaggatgctggggtgcatggagcagggcatccacccagcccccaggggtgggagggagagagccagaaataaacccaagctgttgtgttagatgtgcaggaggcattgatgatcttccagaacatcacctgtgaagatttcagtggctcaggaagtgggggtgatgagtgtagatgaccagtaagatccttggactgtgaccacaaagtagaggaagtagcatgaggtgtttggtttagggagaataattatgacttagcatgtgtttgggctgataggaaagacagaagtggatgaggtaaggtgaatgagaggaaaacagtgttagagccgggttctcacaggatggaaagaggcaagagcaggtgttcatcagaagggccaggagaagaggtggggctgcagagagatgtttgaggtgggaaggaacaagcagaagcatccgtcgacagcctctgcagcatgtgggctggggagggtcagactcagcaagcaagcatggaacagcgtgagggaaggtgagcaaaggcccagggagcgtcacaagaatcccatggatggtcaggtgaagagctctggcatgtgccatggagctggtggttggcacctgactgtgctgccatggctgggagtcaggacgtgatctgagaaaactgaaagaggtgaaaggtcagatcagtggctgagkgggtcagggaggcagctaggggcgtcactgatcatgggcaaggctgagcagggaacggaagagcgtaccctgtgagaagtcaccattcagatacgtgcacaggctgcctgggtgggcccagagcccggtgagtcccggagggaggagaaacagggaaggggaattcaggcccccagacaacctacttgactttgattcattcccaggggtgcttccctaagacaaaccaggtaaccagacctgtcttaggatttgctgactccaggtccctttgggaaataggaagaagacgcagcttcctgtgccaccgcagctctgcacagccagccagaaagcgtgtctgtcgctccattgcatgttgccctgtggagagtgtgagcgtgcagcttgagatggggtggggccctgaaggagaacccatagtaactctggccagtcaagaagggggccttctgggggtctttgtcccaggaggcttggggtgttgattcctgataactctgcatgttaactttagaatttatttctcaaaatacctcttagtatttttcaaatatataagtttctatttaatttctcactaatgccatcaagccacttatagatatggtattcatgatttgaactttcctttaaatgcggaggtaacttggcctgaggtgggatgtctccctggggcttgagcacagggagtgacgctgctctaaggaataagcacattgggctcatgattgtagtcatccctgtagttgggacctcaacaaataattttaagtattttgacaaaaaataagttggctttttaattttttgtttttgcatttggtatttgctaacaaactgctaatatttcattttggttcttttctttagcagttttgaggagtgttggtgagttttctgtctgtggagagagtgtctgtttgggtctcgtcctcatgcagagaaagcttgtgccatccccacacctcctcctgtgggcttcccctgcggtgctgccatggttcctagttatacacctcataaacagtcctcccttccaactgcaatgttctttaataatgaatagccaatcttcagtctgctgttttacctttaaaacctggcagctgggtgttgtcgtactcactctgagaaaggacctagttctgtttctcccaggaagaggaagggcccgacccaggaagcccctgggtgctgggttctcatgtcagcccctgggtgcagctgggaactcctgtcttcttatacaggagtcttgtggcttttcagttttcacttcactattacctcttatacaaatgaagccagcctacatcttcatgatgcttattaatttatgctgattttaataacactgttaccaaggtcagttttacccctgggggtgggtacaaaccaagatttaatacaactgagtgactttttccaccagataattagatgacagttagaaaccacggtgtctgctgcctgggcttctctactgcttccccaggctcataacagaggctctgcagtggtgcttcattcagaggcacctgcagcccctcaagaaatgctgctgcctcagagcctgtgacccatggggctcaggggctatggctgggccctgctggaggtgtcaggctctgctggtggcatctgacaggaggaagcactgaggacattccccgatgtccaggctgaggcctctcaacttccccctgggggtccttttccctgggggtactttaggtacaagggagggaggagggcatctagggacggttgctgctgctcctgcctccttaatggagcagacccatgctacttctgtggaagtggcctctcagcctcccctccctgccttttctctactggggactctttcaaggcctgatctttcccataacgggacaagtaaagtacttaggggttgagtctagcggggcagaggaagaggaatgggaggggagaggcctttggctttaccaaggagctgcccccaaggcctgctccttggtaaatcccaacccaggtgttttgggttgaaccttgttcctggggaactttctgcgttcctgggttccctctgaggaccctccatagcccaatctgggcctggtcaccccttgccgtctcccccctgctccccatatacaagactgtccctgaagcagggaggggatggagcggggagggttacaggcagaaggagtgtccctgcctggagactgtgaggggctaaatcccaggcagagaggacccagcctcccaatcctcctacccttgcagaacccagctccatgggggctcagcctctgcagaggtgatcctgctcttctaatgtccagagtgactgttgctcagcagttaccagcagttcctggccagggccacaagactccacccttacgctctcatggcatcttcagtttagcccatgaccccagctctgggtaggtccgggtctggggtgggggcctaatgcaaagtccaagggctatacctaggatactgcctcctggggctgcccctaggcttcatgtctacacctccatcctgccgccctcatgtggctgcctggtttttaaaactaggtagttgagcacacatgcttgtattttcctcatcatcctaaacagcacctctttgaaatttgccttttcttgcccctgccatgtatatcccatgcataagtcccaggtatcatcattaaaacatgacttgtgagaatacagggcaagtatagggtagtgcttttctcttggcctgggcagagggtatgtatttgttgaagggtacacagccacctccttacacagaagtagatctacatacagcacattttatatatgtactctaaatattgggggcctgggaagaatcctttttttttttccactgtttttggagtcagggtcttgctctgtcacccaggctggagtgcactggcaccgtcataactcactacagcctcaaactcctgggctcagttgaccctcctgcctcagcctcctaagtagccagaaccacaagcacaagccaccatgcctagctaatttttaaatttttttaaaaggtggggtctcacgatgttgcccaggctgatcttgaactcccaggctcaagcaatccacccaccttggcctaccaaagtgctaggattataggccaccatgcttggctgaattgattttttaaaatcctattttgagattgtctttttaagatgaaatggtcttagaaggcagctattcatttggaagagtgattgcagattggaaagtagtgtgcacatcatgctgtggaatgactcctgttgtgccccacgagcttgagtgcggtctgctgcatgggcttctggcacatccattgttttttactgtggcgtgtgggcttgtggtggtggtgtttctttccggggtgctttggttttcggtttttgcatgtttgccacataatccagcaagggaaggggtagtggtggtttcttgatgaaccactttgggacttccctgggaaggggccaatggggaagattctcagccctgaccaaggtgactgtcatctccaggggaagtgatggaggatgtggtgagaggtgccctcgctcctcctctctctctcttccccagaattcaaagggtagccctttagggaccagtcaggacccctcatcccatgagcgaagggacacccattctacccagagctcacaatttcaaattttaggaggagacctctgcattggtggcttgtacttcttcctgctttcttcagcttcctcagatggtctgaaaaataaatttataatattggattgattgggatcaggctaagagacatgcaatttatcatcaccgtttagttggacccaacacactggccaggcccccacagcgggaggatgtgaagttggtctttcagagcctcctgattgtgctgggaggggctgggctgtaggcttggcatcagatccctagacacacacgctgcttggtggcgaagaggtgggaaggagggagagccagggttacaaagccactgaggagtccggctttgcctgtggcttggcatgttctccactttttcttcatttgatgaaacgttatttttcaaagtagggaagtcctggagcgaaggaaagggaaaggaaaccccattttctagggacttgctggggtcagacatgagaggaaggacgactgtgggtatgttcacagggagcttgaatgcctgattggccaaaagaaaaaataggttttggttgtttggggacaaagtctaacacccactgcagtctctgctacactgtgataacctgaccccttcttctgtaaatggcctctatgtctccacttaagtactgcttataagttaatagatgaggttgtgaggtggaagattacgatcatttgggtgattaygggatatgattgttcaatacctgttcatacatttacatacacaagtaaaaatacagatacatgcaaatacagataaaagactgagtcatagtttaatatttcaagctcctgccatatagacaggaagaatctcctaagatatactttgctcatcaacaactagagtagcttgagagaacatccctgagtcacagaacacttcatcttagggtcaattgtggctggggttggaatgatgctgtcatccttttcagattctggagaatcccttagaatccattcttatcctttccagtacatcatctggctgccagtccataatctacataccccaggatgttgtcagagccaaggagatcatcgcccagatcaacaccctgaaaacccaagtgagttactacgcagagcggctgtcaagggcagccaaggacaggtctgccactggccttgagaggacactcgccatcttggcagacaaggtaggaggggtgccctgctacatatgggctggggagtttccttgggtttctggaagccaccaggcagcccaggtktacctaagatggtccacaaagagcgtgacattgggatgactttgaaggtctaccttaggtccatttcgcacaaaggcccagggaggttttgtgatttgtccgcagagctggacagaccaagggcagagcccagggctcatgactcttaggtgcagcttcaggcacatgtgcccttcagcaagtccatggggctcattttgttgagggtgatacagttccacttctttctcagtaacagcctaactagcactttttttttttggccacatttctattttagttgaatttgaaaacagaaactgagctattatacagacataagataagaagaatataattttattggcttacatatagtcagtaaaccagcttctacttagccataacttgatcctggttttaaaatatgtaagtattaatccctactgaggaagtggctattatcagacccttttgatggatgatacttttccccattacttggtctctctctcagcgcacacaaacacgctctcatacacacacacacgctctcatacacacacacacaccccagattctgactatacctccacactcacactcactgtgctgttgagctgctgttcctgatcagaatgtgttatatccttcacaggtgttcacacagcatagagtgtgaggtggggattagatcccctggaaaagaaagatgtagttgtcagcagtaacattatgaaccacagaacccgtgttgcatgcagaattctccaaaaccagacatgttgtgccaggaggccagctacccagaacccagaacttgaggtattagatgctgaggaacaaaagataagacttacacaattgaaccaaagtaaggcctgacccctggacacttgttccctggaaggtggaagtctgtcaaggctggggcagtgggctctctctgcaggcccctcccctagcaatcacaggtcagaggtaggcagggatcagagaatgtcagagatttctcaacctcttctcttccttggtgggaaattcttgttaagattcagcccaagtgggccacatggcagtctttgtactcagacatcttgagggatgtagcccttcagttgctttgcactgtggagaaaggcagaggggtgcagtgctgggctttaagcccattctccatttctgagataaggcaggggcctccccagcccctggcctgggctcagcagccttggtttgtgtgcayctgcagacacggcagctggtcacggtctgcgactgcaagctcctggccaactccatccatgggctgaacgctgcacggcctgactacattgcctccaaggcctctcccacttcgactgaggaggagcaggtgatgcttagaaatgaccaggacaccctcatggcccggtggacagggagaaacagccgatcttccctgcaggtggactggcacgaggaggagtgggtgagtctgctgctgtggctgtcatcccactgctgaacttgggctgaaaaccacaaaacctgttgccagtctctgcccctctgaagtgcctcaaggttcaactgctgtgaacaagctccaggtttccttcctggatggctccttggctcctgatgcagggagggaggagactgttttcaaacccttgtgtccagataggggtagggctgtgctgggggctgggccagcctcagacctggatgaagaggaagacaagtgggttttcctcccgtgttggaggtctctccttcccctgcctcctgtgccttctatggccttgggatgcttgagaccagtcagwgctctgtttgctgttagattttccagggctatgtgtatttggggacgtgggagctctggtgctggggcaagtagatatggattttggagctgccgccctgacattacatcacattattgttcctcagagaattggccctgggagcaggatctgtgtttcttgagggagtgacacattgtacaacttgtttttaccatttattgagactactgcttagaggcattgttctacaagcactgaactattaatcagcagcaaagtcccatcctatacactgtgcgtgtttctgcaaatcactcccagaccttcctctcctcctccccacctcccctatcgaaatttctgttcccttctatcaaaaggaggcctccattttgtctgtgtgtgatgattgtaggaagtctgcagtggcaagaggaggagatgagacagtgccctgtggcctttcaggcagcactggagggccacctggcctccagaagagttactagcaaacatctcccaaactctaaaaacaatggccgcaggacatcgattcatcgttgaaaagcaaatgcaactttagtggggaattaggaatcatctttatatttctaaactttgaggtattttaacaagtgtggaagcctagggcaggggatcagtggagggcgatttggtttgtgttatgtttgtgtttctgttcgggagagctgacccacatgggcccctttgatttggaaggagaaagtgtggctgaacgtggacaagagcctagagtgcatcattcagcgtgtggacaagctgctgcagaaggagcggctgcatggcgagggctgtgaggatgtcttcccctgtgcaggcagctgcaccagcaagaaaggtaacccggacagccacgcctactggatcagaccagaagaccccttctgtgatgtcccctcctcaccatgcccctccaccatgccctccrctgcatgccatcctcatctgaccacacgtgcgtatgcatccatgcttcccatatgctgcctccatttcaccttgtgctgcttccatttgtctgtgtctctgactccatgccctcctcccccatgcagactgcagggagggctgccaggtggagcgggggcgtcccagtgcatggagcagcaggcagtgagagcggagtctccggttgcctttccatgtaactggagcccatgtgtgattctgcatctctgccagtcagaatctcagggtcctcttgagatacaccaccatggctataagggttgggctcctgggcttttcaggtttgtaaagcaatctgagaacctgaaggaggccaggatgcagatgcctttctgatgtgattgtctatggcattaggaattggtagaatgaaaggggaaaggggaattgttcagggacacagctggatgagagatattggcaggtccagtggacatgtctaaaagctggttggcattggctgggcactctcttatgcagcagaggcatgttgccttgggacttggtaacacagagaatgggaccctgttcctgggcttctggtggtctgagtcaggtggtttggcagracccttcagggtaggacactggcatgaagcagcatgcttcagaacagtctcctgtctgcagagacacagcataccaggacactgtcctgcagatggccttaaagctgggaaacagtccctgcaactgagatgtctccgccttttcctgtaagagccatagagttacaagctaggcagctgagacttgcccacagacctagcttctgcctcctttttgttctcctgtgggagttttaagtcatagtaggtaaggcccagatgtgctgggattaagcttcatgtgatgagggcttttaaattctgaattggagaacttccattcaaggtataagcgtgcctcttggtcagagcctcttggcaaatcccccttcaggttgtaagatgccctttgcctctttactctgcctgcagtctgtttccagggcactgtctcacttgagcctctgtctcgacagttatcacgtcacccatctctccatctatgggggattatggtttcacttccccacacctgtgattggctcatggaactattttgtctctattcatgttctcttttttatgtgaatcgtgttcctttttaaaattttctgaaaattcattgtttatttctttttactttattatcttgtttgtgattttaaatttttctacagataatgaaaagggtaatttattggctgttttaaatgtgggagctagtttatttcatcagatgggattatatccctaacttaagtgtcattttttttctaggcacatcctgtattgtttaaatatagatacatttttattcagttttaaagttagttaagtgagcatttatatatgctatttagggtttgacttgcgtgtgccataaaaatcagctgttgtaataatgggaatgtgaagcttacatttgagagagtctaactctgctgatcagtactcaaatgtatgaaaccatatgccaccaaattatctgtggatggtccttaatttaaacatctttagcacagccaggaagctgttcagtcctcagtgtaagtaggaggatcagaaagaaccagtctgtgagctatttattttggtgagtcttgtccacagtgccacagcatggctctgtcatgactttttataccattccaagttactggagccattgttttggcttaatgagcaggtatgttcacaccaacatatttattatgtgagaataactctgtactgctctgaaaggcatcatcacttttcattccagttctctaccctgtcctaggtccttggtttttatttttcaccagggagctgccctgcctcagagctgccctgccctgatcagagagcactgtctggcaggtgagggtcacccagggccaaggccttgtgggggacccactgacaagtccctgccagccaaaaccacagaggctcctcaaacttcccttcttctcatctctccaaaagtctcccatccccctccacccccgcctgccaaggtgcaccactatcgccccaccaggatttggtggcttccaccgccttcctcctgtacactctgttgctctcctcatacccaaagagatggttagaccaagtttttcttagtctggggtctatgggtacacccaggttcttgtacccctgagattatgtgctggaatttgcatgtgtgtacagaggaagtccagagtggtcacctattctcaactccatgacctaagacaagttacaagccattattccaggagtaccagagaagaccccctttttctcccctttgattgaaagatgaatttagcaaattgggtttaatccctgatgccttcacaggaatggtcccaacctagctgtttgggatcaccacagaagctcataaaacaggctcctagaccttcctcctcattcataagctcagaatcctagaagaggggttatggggaggcaaaaatctgtattttttcaaggcctcacataacctgattagcagatcaatatgtaagagccacagttctatatcactgtgggtttctatctttgttagcaacatggtctcagggcatctgggttaacgaagaggtcgaactcttgaacttgcagatgcctttgtattctctttcccctttgccagtttgaaaagtcacttccaaagacgattagagaggaaggatcctttgccccttctttacaacctaggttgtaaaatccccataaagctggttctggctgttcttggggatccgagaccacctcatttccacatcctgaagacattgtttgaactgaaaagctcagacataaattaacataaatgttttcttccatgattccttttcaaacttgttttctcttagatggtgcacccagttaatgagaaattttggtttttaagggaaatacgaaattgaagtaagtacatcccagtgtgacttagtataggtgaaatggaatcaaaagtggtattctttgaggacctgaagggacattctaattggagactacccctaaatcacaaaacttaacatttgttttaaatttgggagattggcatagagttttttttggtatactggtttcattcctggatcttaacactttggatctcagcagtcgatcctgagcccaggcttccccggtgaatcagagcagtgggactgaccgtggaacacgccgtgtactggtcagtctctctccttacaagtttgcttccagatgccgcaagccaacgcggggctctgccactacaatgtgatttatgtgggtgcttttttctgtggcatttatcacattgtaataagctagatcgcacatcccgaagagcattttatgttgaactattggcaacatgaatgtttaagctggggaatctgtcattgtttaccactgagagggcttggctgccttggagcagccagagtactttcgtgagccttcttggggaagaggcagccaggcacccagacctcttttctgtttgttagccgccttactgcaagctgctgacgcagctgctgctctgagattgagttgcttggtttgaactgtgtgctgctccttaatcatccatgtcgccctccatttctgtgcagattgcagtccccctcctgaagagtccagcccaggtacgtggtttccgttcaaggctcctgctgatgcccttttaattgatactcargtagtgttttgtagctaaattacaaaagattgccttatgatcccagagttgggaaagtattccaggacctccttcgttgtgaggcataaaacacttttcgcaggtttgatgagggaccagttgggctgaggaaattgtggcctgaggcagactaccacatgtatttgttttactcttacattctaaagtctttacagatgagcgtgttgggcttcctgaagtggttgacctgaggtagggaggtacacatctggacttcctgggtgcagttttagaattcttaccagacattgctatgggcctcagttgcagttagtaccagaaatgtaatctctttgcttcctttgcatgtagaaaccaatgtttatggttctagttcaggggttggcaagctacagctctgagctaaatcttgtccacagtctgctcttataaataatgttttgttagaaaccaaccttgcccacttgttcatgtattgtctgcagctgcttttgtgcagcagtgccagagttcgttgcagcagagaacccgtggccttcaaagcctaaaatatttactgtctagctctttacagaaaatgtgtgctgacccctgatctagttcatattgagtttcctgggtatggcttgtggttttgagcatgagtcccccaaataatatgatttgatgttctttttcttacattccaaaaatcagctgcatggtcagtctattgcttgcatatttctgactggttataaatgtaagacagcaggatactttgttgatgtctagaatgtagcgagtccatgactgtgggatttaccaggctaacaagctattcctgtgcattgctagtgaagcctgtccacccatacagccccatgagtcagcatagtgtggcagctcctggcagcaaccccaggacgctcttagaagttagctcattggcgggctaatctgattggacacctcatactctcccagtttgctttcagccccttcacagtttctctttccccaaaagtcagtgtcgctttgagcaggctttgggccccacccccttggaccctcaaggttactgaggccttggtagatgtacaaacagttgatcttggtctcctcctccgttgcctccccgggcccatgcctcagctgacctccacggcaggccagtgccttcggactgagctggctgtcgcctgagcctcagtggtgcccaagcctggggccatacccagcagttagggccaagagagggctggtggcatgtgcatctgcccccacagaagctcagggggtcttctcagttctgggctcctgagggttgcagaactaatgggaagtctcatgggtccccgggcagcacacagacaatgcctggcctgtagagccctccttgttgtgtgtcagctgggacatttccagaagcactgatggctttttcacagttgatgctgatggactaaaatggtccttgcaaggagttcttttggcttttcctggagaactgcatttaatctgggctaaaatatacacacttacaaaggcacacacactctccctttctccctcccctactgatgaggggaaaatgcagaagcaaagtacggatttgaaagtgctcttcaaagttatctaaattagtatggcccatgaattcactaccggtctgcgaacattacgggttaggaactagataaggagttttctacaaaaacgtgggtcagcgacgtcactcaggacattgtttcactgagctgattttttctcataacaaggctttgtcagtgaaggaggcagagtataaacccttcaccgattccagtgacccaggtgcctttacttcactagatcctgcgtggaaatcatgttactgcccaagaaactcactttggttgaacttttaaaaaattgttccaggcatgtctgagtccttctctgggcagataacgacactcaccttctaccaagttccatatctcctcttttccaggacaaacatcttagtgctttttagccattcttcctatactacaattttttttcatttttttcctaatgtagcgaagcaatcgttctcataggaatttagtttaaagagatataggcaaagtgaaaaagttgtatggagagagcttgtttagtcaagtaagaccagttgtatattttgatcattttcagattaaaataatcatgattttcatgatatgcatgacagctagaagagcaaagtaaaattggcaacatttgctttaagagcatgtacttcttagagaaggatagtcttaaagactgcctgcctttccccaaaccgtttggcgagaaaaacttgtttgcctttggcatttttaataggcacttcatataattggcatacattcaacagaattcttcaaagaaacaaaaacatggtctctgagaactttagtggaggaaagagactcggacattatctagtgcctctctctcattttataaaaaaggacccacatggctgaggggtcgagggccttgcctgtggtcacctctgctcagcagtggccggggccgggcctccacattttccacctctcagttcagtgtccttcgtcaccatgattcatttgctaagacctgtctgctgtggacttgctaaatttaagcctgctttttccattacagatacaaatcctgtccacaaacagttagcgtgcctgcatgtacaattaggccacctccaamttttgagctgctacatatacttaaacatttgcattaaccaaacactgagtgtagggaattcttttatatgtttcagtatttctttaggttggtttctcagtgaagtgctaaccatccagcttgagagaacagggccaagccgcccttctctcggtctctgagattctgtttatctaagacagagtttatcctctggcagccgcacagctcccacagcccatggccttccctgagtgccgtgccgggacatggcctggcgcattctgtggctcgaaccctcaccctaaggggcatgtactgcctgggcttcactccatgacttctcaccatgtttggtgtggtggattcaccaagtggtgatggtcacatgcctatttctggtcttaatcacctgttacaaatataaccttaatgagagcctgtcttctcttttaaatgtcttctaaataggaaggaaaaaaagagtcaaaacccaaaatatctttcaccctgtttttctcccttgaggttctatttttaaaaagttgttttggtatagggtcaaagtttccctatattcctaaaagaaaactaagctagaaatagtactggggaaggaaggtgggggtggggaaggaagtgagtgcaaggtggggccgttctgagggctgaaaacttgggagctgtrgggaatagtcctcctccaggtgtgcaggggtaagaattgaacacagttgcacacaaggcttggcaagggcagaggagtctctgacttgactttatacccaggtcaagagaagggagatcacagagaacctttctgggtgtccttcctctccgggtggaggtgctacagggctgtggaaggagatgggcctctggggacagagcattttctggcctcgtcatgacttgcagaagcttctttgttgttttcctccgaaggcattgtcttgagtatttctgtttagggtccccaacaggttcaggagaccaggcatgtcttggaggtaccggagtagaactggtgtttgaggttgctggaaagagctggggctagagggctagagggctagagactgggttggttccagacagagctggaagatgaggtggagatgggggagtgggaggactgcagtggttaggggccaggtgacttgttaaattgccagaacctaattcttaaaatctctctctcattgtgatgaccccttcgcttgtgccccaggtgaatggagtgaggccctttacccgctgctgaccactctcaccgactgcgtggccatgatgagtgacaaggccaagaaggccatggtattcctgctcatgcaggacagcgcgcccaccatagccacctacctgagcctgcagtaccgccgtgacgtggtcttctgccagacggtaggccccgggagcaccccgagggagaccacgggcacctctcagctcagaaaagacaggcttaggaagcccttccctctcacttcacttgtaaaagaccccagatggccatatttcctcctggtggtgctttaaaggttatttaatagagaggtctacatttcaacacagtcaggagaactaccttggcagcccatgcttgcttctcccaaggaactggcacctgcagagtctgccgattctgcacccaggagatagtgagggcatgcatgggtggcacaggcttctttgctgcgtttttttttttttttttttttactgcacagaggttgagtgagggcaacacaggtatttgctgtcagtgcaaacattgctcgtataacagtaggtgccttagctctgcagcttgttgcaggactctcttattgttgagagaagtgaagccttgaaatgaatgtaacaagtttaatagttgccagtaatcaaattagtaaagtgaacagtgatttggggttgggctggttctctacaggttccctcacccatcctggagagtcctgtttcatcccatagaaaatctcccactggggaaactttgagtgaccatgttgtctctcacttctgttttttgctggggctaactcagtttccagccaggggtggcatggctctatgagtagatagaccctttcactgtgagtaattaataatgggcttccagaagttccagcctaggaataaagccaggtataggtcaggtcagaagctgggccaaaaaccaaacccacttggtgagcgacaggaatagcaagcccactgttgggcgtcttcccatggccagggcatgccccacctgggcttctcaagggatgggaggtgccactgaagcccctttgagcagtggcagcagaggaagggggcggtggggggctgggcatgatctgactgccatttggtgagcaggcacctgaccctgwacctcttcaccccacgctcccacagctgaccgccctcatctgcggcttcatcattaagctgaggaactgcctgcatgacgacggcttcctgcgccagctctacaccatcgggctgctggcccagttcgagagcctgctgagcacctacggtgaggcgcccgggccaggatcgggagccccacttgcgtgtgtggtttccatcctttcttgctaggcacttttctcactataccagtaatgcgtgcttattgaaataaatccaaaatatataacagcagaccagatggcagacctggcagttacacacgcacacgccttggtttgttgttgttgctggttgaggatggatgctaattacttaaccagtaacttcctgttggactttgggttgttcctgaaacaccagtgcagcagtgacatctgtgcatgaggcacttgtgggcctgtttctgcagctactgaatgactggaaggagagttgctgggtcagagggtaggaatatttttaaatttaatagatatttccaaattgccctctaaaaaggctctcttcttcctacccttgtttattatttatttattctgagaaggtgatagaaagcatttgttaatcattggaaattgaggacatcgaatagatatcaagccctgtgtaatgggagggtctggccacagcaaagctgctttagcatctctcatttcgtgtttcaagagctggctttgctttctgagtttatgtatttgtttccctccctactatctggtgcttgcccaagaaatagtgggaagggatggcgcgtgtttccaccagatgcatgttttgatgtggctgtgggatttcagaggcattgttgactcacagaggagtgagttgcaggggaagaggctcagagactccccctccaccagagccacacctgcacccctcctgtcacagccaggcctgggcttggctgccttctgctgagactggggagagtagcagggccctctgcctgacagccctgcccctctctcatgtccaggggaggagctggcaatgctggaggacatgagccttgggatcatggacttgaggaacgtgaccttcaaagtcactcaggccacttccagcgcctccgcagacatgctgcccgtcatcacaggaaatcggtagagtgttggtttaaaattctctgagccagagagcggttttcatttttgtttatctcagggaaggtactcttctgaattttttatcctatttcattttgttaaatgctctgattacagccccctaggttagtgccactcccttaaaggtctgtggttggcagtttggccatcactaagccagagggccagcctgggcactgcagcctgctcggtggccctctggcctcacactgctctccctctctccacctttctccagcgacgggtttaacgtgcgggtccctctgccgggcccgctgtttgacgccttgccccgggagatccagagtggcatgctgctgcgagtgcagcccgtcctcttcaacgtgggcatcaatgagcagcagacactggccgagaggtgcgtgccggctcctcggggctgcgggggtgtggtggccctggagatgatgcagaaaacgtacttacccctcttcaggctctaagtgctggacagactttgtcatccttccttcctttggccaacattttcatcatggccgtgcacctcactgtctttggtgctagggacacagagtgacccagaggtggtctctgtcctcagggactcagctggtgggagagagagagacatggatgcaatgatgaagacagatacagggcattgtgggatccggagtagggcacccagcaaggtctagggggtctgtaaaggcttcttggagttgcaggggatggggctttgaattgtgaataggagttggatgatgaggtggaggggagacatgtcagattaagaagactgaagaaaggcctggcgaggagaaacagcatggagttcaggggcaccaggttccaggcagggattggcaggtaagggtagacaggctctgtgtgccaggctgagactcatgcctgaacctaaaggcaactgccctccagggtcacttgccacactgcagaggggagttgtgtgtgcctgtgtgtgcacgtgtgcctgtgtgcgcacatgtgtgtgaggagatagggtagattgggtatatgtaccctttactggccttccactagtacatgagaatgattcctgtgttgtcatttatcttcatgtgatatgtgtagaatagtctaaacagagatcttcaagtacttgctgtgaaggaaatttggtttccagaacaatatgccgtgttcctgctgggccttctgatgtccaaccccagtggttgatgtccattgacgcctaggtgtagggtcacaccaacttaggaaatatggtatcattgctgggagacactgaagaactctcagtggggcaggacacaatcagatttacatttaaagtaggtcgtttcgctggcacgtgccgggaggagatgaaggggacaagtgtgaggaggaggctgctgggaggagtccaggccagaggtgggaacctggatcagggccaggggagtgttggtgttctgcagaggggtaggctggggaactgttaaagtggtcagtggaagggtttggtcttcagtggggttggggctggggctgagtgggaggagagtacaccagacagacccacccactgagctcataaactggcaggagagtcgtgtccagaggcaggtggtgagctgggtttggactgagggcaccagcccaggaagcaaagccccaaaggtgtgagcagagctggaggcgcctatgtcagggagaggcgcagcctcactggagccccagcagggaggtggcccaggggagggaaaatgatggtgcctgcatccagtagctgcggrtcccacagacttgcaggagcagtttctagagagggctgagccagagccaggtgcattgaatagaggggagggtggaggatgcaacactgaggacagagaggacttgcaaagggcaggttcttgactttgtttctttattggccctgaggtcactggtgagctgggcttgtttataagctgagggaagagccctcagaggggaggccacaggcccagagtcagggatggcccccaagggagcaggcgtctagagaaaaggccattgtggacaccaggggtggatgggctgggacccgtaggagggaatcctgccctctgagggatgctctcgggccacagagaagctgatgctcggaaggcccctcagcagggatgtgtgagactgcactggggcccaggacctggacttcagagcctgcatttcctaatgatcaccttgtgccttccttgcaggtggcattttatggctttgtttcttaggcatttggcacatgctccttgtagcacactgagtgtgatcagggtgaacctgcacgatgacgaaagggcaagggcttcatgtcagtcccggaggggctggcagtcaggtgtgttcattctgcacacagagagtgacttcagattggagtacagggctgcatcctcacctctcagccatacctcactgccgtcccccctcctaagtgcctcagatgggaggagaccagggactctgagccaaatggctgtgaggggggatcctgtgctgcacaggatctgtaccacatcatgttctggtcatctytcaggcacgcctgtaacagtgatacatgattcctgccaatggaatgcatttaaactgatcagcaacactgtagaaatgcctttatgctcggaagagggagagtggcttagaatttagatatgcatagtaaatgtttgagagaatcagcatagttagcttccatgcagttgtgttcatgttagaagaaagtgacattagccaactaatggcatcccctataacctcccaaggtttggcgatacgtctttacaagaagtcatcaacgtggagagtttggtgcggttaaattcctactttgagcagtttaaggaagttttgcctgaggattgtaagtatttcttcagtcatggtaggtttcacttactcgtctttttatcagtttagatgtctgagctctggcttgccctgcctctgtgagtgcatgcctgtgcatgtgtgtgcactgttccctttctccctaaacacacacacgcagagagagagagagaagcttcccttggctgtggccctcattcatctctttgctgtcgattctctactagcctatgtgacatggctccttcccatgctgtcgtagtcactgacacaagatgtgtttggtggcatgcattgtgcacctsctggtaggacttgggggaatcacagaggcaggacccaccctcggccaggtgagcggcccactcacttccctttgtggtgcttagagaggaagatgcggggccaacattgctgggtgtttgggagcaaggtggccccatctcggcatctcctggaggcagtggagatggtgacagtaatctctctgcgtgtcctgcagtgaagatgctgcagctagggctctgcagccacagaactaagggaggaaccgagagctgcacagcactgtctacgagaattccctcttgagttcaacccagtgaatattccctgaggacctgctgtgtgtaaagtgctagaggatccgatggcgaatgaggggtggaccctaccttggagggaaagctggtcccagagtgccggcctctctgtgcaggcgctgccacagccactagggggcgccacgygtcagaaggtatcatcccctctgtgttacactagtgtcctctgatgggggtttccaaagagggaacccacatcggctgggctttgcattgggcaggcttcatctgcatcctgttggacggtacggtagaccttagagtttagagatagtcaaacagtactgctggtgaaccttcacaggtcacggatgtgccagacactgggctgggctctacatacgtttccacgctgaatccacaacagccctatgggtcggtgataggatccatgtccagatgaagaaaggggtgcctggctctgaagcccatgtgcttggattgtggctgaagccgtcctgctaggagagagtgatgcagaacactccggggctgggccaagaagtcgtggcttcagcagggaagcagtgggaaaaaagacgcctcttcacaggttcatctagcaagagtgtgcggttggattggaagaggggaggcaagccgctgatggccagagtgaggctgtgacacttcagatgagatgttgtttcactctgactccagcctggtwgtgacagtgagcgtggagagagggatgaggcgttaggggggtttgggctgaggatgcactcctcagcggccacgtgcagctggcgctggggaggtgagggctgtgtctgctgggagagctgacagacctggctctgggcaaggacgctggagttgccggcaacagctggggccgtcccgctgatgagagaggcgcagggctacaggggaccgacagcgagtgcagcactggccccagctgagctgatgacatgggcaaatgacttgtggggagtgcagatgtggagccacagagcagagccctttggtggttgaggccactgagtgacaagacgagaaggggctggaacagcatctggaggggcccctgctctgggggacagcgaggaagaagggactcaacagaaggcgagagagagcatcacaggctagcaggaagaaggcaggagccaggagggtgtggggcgctgccggacactggatgtgtggacaaggagctgctggtgatctctcccatacagtctcactgtggtgagggctgggccagggatcaaggggtgatgaaatggtgctgccctggaatggaccactttgtcccaaagactgtcagcaacttgagggatggggctgtgggcaggtgggacacaccctggagctgcaggggccatgggagtgctcaaaggtccgagggaaggagaacacacagggctggaagatgcaagaggacaccagagtcacagaccaggccctggagtgggcaggcggagggtgcccttgcagggagggaaggagggaggagagaaggtagggacatgaatggaggaaatatgctcaggttgggcagcctcagtctccccagtaaaacaggtgttcttgtcctgctcaacatgagagaggtgagcacagaaccggggccttgaggggagtggaggtgactggcagagatgcagttggagccagagagcctggaaaaatacagatgcctgggccccaccccagagtgtggtgggcaggacctgggcwttagggtttcagaaactccccaggtggtccctgtgtgccacagccagggtggtaaacatagcatgaagtcaaggtcctgcgaggacttggcagctgaaggccatcagtgccatggacgtcagaactgttaagaaggtgtcctcatgctctttagcagggaccggagttcaaacagcagatttgtcacatgctcgccacaagctgggccccctactayccactttatgtggattctctaatctgatccccacagcagccctgggaaatgggcaccggtttcacacccacttggcaggtgaggaaactgaggcatggagggcaagtctccccaggagctgggccaagcccaggcagcatcttctgactgctgtaggggagaggatgggcccaccggcagggccagccaaggagccacgaaggtgagcagggagggagtagggggcgcgtgctgaggcctggaggagtgggagtggtgagcggctgcagtaagtaggaagggggaatttgtgcctagcaccttagagggcaggcagtctccagggctcggggagctgttacaatgggcagtgaaggcccaggatgggcgaggcctccggaagcagagcagccaggctggaccacgcaggcaggaactagtcgactggaccatgacccaggaagctggggcagatgtgagccaggtacccctcccctcagcaggatggctggtctctgaggctgaggagatggagcccaccagctgaatacccccaaactttgtgtggttcctcagtggacaggtattcattaaagcaggggctgcaggggcaaccagcgagaagccaaagtgcatcttgggaggtgagatggtgctgtctatgccagagggcaaatatcctgacctggctaagctcccctcctctgggctcccacagcttccgtctcagctgatgccacctttccatctttctgtctctgccctgtcccctgaccggcgtggtgtggagcactcagcagcaacgtgaagtaattagcacaggacctgtgtacgccagggcgaggctgtgtggtggaaaccaggtgtgcagttagatcccaagtgctgccatgtacttggtttggcttcggggattccggcgctgtggctgttttccttagccatgaccttgaggctcttctctttgtctctgataatcccagtgtttgaaaatcccagagtacctttccaggagtggttgatttttcctcagttttgtctggggtttcttggtaaggtgacctgatggatcttcaggcccaaggggtcctggaagggcctagagactgccagagtggaggaggagctgttaggatgtgggagcaggggcttctctgggtcccgcagagatgtgttctcctggcatgggccaagggccccctggaggaggctgcactttcctgatccctcccaaggtttccaggcctgctcaatggctcagacccactgccccagtttcttctaccctcgggaagttttgacgaccagctggatccctctcactccctcctaactccctcatctgggaggggtgcgggaggcatgggtatttacaaggagtcctgtaggtgattcggtggccattcccagcccctcagaagaactgaagggagatgaaggaaatgtcctttgaaggtggcagtaaaagaaattaagtgctcaccacaccagcagccatgtcctatccccaaacacctccatcccttcttcaaccgggaactcattgttttaccactgtgtgccccagcagctcacttgggtgggctccctctgccgggggagttcctgggtgcgtcacccactcccacgaactccttttctcttccaggcctgcctcggtctcgcagtcagacgtgcctgccagagctgctgcggtttctgggtcagaacgtgcatgcccggaagaataagaacgtcgacattctctggcaagctgctgaggtactggttacagagaggaaaaggaggctattgcggtgcccacagctgaacgtcatgacagaaacattacaaagtagaatctcagcaggagagcagagctctccatactgggagaggagggagtcactgagtacgttctgaagctctgaaagagactgaacagttcacagagtccattcctttggggctgcctgaattctgataagcttaacacagtccatctcttggggcatttactagccaggctgatgacagttgtcaccctcagaagcctggcgatcgataccagctgaaaaccactgtctactgcatcatttaatagggtcagaaggaggccatgtgacctttcaggtctctttaaaccatctttatcgtccattgtgcctctgatctcctcattttcccaagcacttaccctgctcatattttctccaaagtttacttgtggaattccaagccactgctctgagcctgggtaacagaccaatttcatagctggtcattcattcacccttgatgaggggcgaggttaattcttctccacagcagcataacctgcccagcgctgggactcgggcacacatggccccagtggcattcccgctccctgcctgggcctgaggagagggatggtgagcccaggagggaggtggcactgcactgcccaccacacctcagccaccacgcctcgtcacagagctcgagcagcagagggtccagccctccacagcttccctgagcagctcactctgaagtgtgcctctccgtcttgtcaggaaggtgcttctctcagccccgagtctcttctacagcagcagaccgtctcagctgctcatggtgcatggccgccacttcgggttggttattagtcctgtgttcaagccgggcttcatgaagccgcactttttgaatgtgctccacttctgggtttgttaacagttgtggctgctgataccattttgttgaattcagctttaaagagtgaacattcccctccatcttttgagttcctcagctggtcagactttatctttgtgggaagcgtggggtggatcaatctgcaggtctcccctctctgggcctggctgccctctaaatcttttcattataacagaacacattttgaagcacaaagtgacaggaagttcggcaggtttctcaggcctcatttttgaggtatcctcttggttttggggcctcatctggcattgcttgctcaggccaggcccagcaagyggggtgtagggcagggcacacactggctacgggggtctctgcagcaggacagagggggctccctacttttatttttcctggggggttgctaaacccccctggccaggctgtgacagcctcttacctaagtaccttaagagattttgtgtgaaaagcaagcctttcccacaggacacgaagaatacagagggtggccgggctcggtggctcacgcctgtaatcccagcactttgggaggccgaggtaggtgagtcagctgaggtcaggagttcgagaccagcctggccaacatggtgaaaccccatctctactaaaaatacaaaaattagccaggcgtggtgacgcatgcctgtaatcccagctactcgggcggctgaggtaggagaattgcttgaacctgggaggcggaggttgcagtaagccgaaatcacactactgcactccagcctgggtgatagagtgagactccatctcaaaaaaaaaaaaaaaagaatgcagagggtgacacagctaggtgtctgaacagtggtgggggatgtgcgttcactgatgcgttctccttggaatacacacacaggcagtttacagacgagtagtgcagagaccttgtgcatatcttgtttgggaactgtggttctacctgtctattgccatataatagaaaaatcattaagtatagggacaactgaccatcccctgtcaccagaacagaaaagcagtccatcaagtcctgtatttcttgttcccagtagagatctcagggtaacaagcatgagtgtagaggtgcaaggctctcagagacccttggctgcatgggttctcacgttgtccaccgaatcccaggcatcccctggggataaggggttgtggggcagcagtgccagccactcaggtactgagtccttccatccccagtttgagcagagctgctctccttttcaggcwcttatttctttttgtttgtgtgtatgaataaagggtccctggctgaatagctggartatctttagtcaggtctaagcctatatctcatggatggggagacccagcagtgcaccacaagtggctggtgtccctctgggatggaagcctggcactgcagtgccctcttgggcaaggatgcatcactggccatccctgcctgccttccagaacctcacgttagctctggatgcagcatctatgaatttaaagctttttgaaacctatagttccagcttccgtcatgtgtttgggtcatgaactctacagcccacagaatttagtgcacataccaagttcactcttgctttgtcagttacaactttacaaatttgattaatttactctccattagcttagggtctgcttatctgcttagggcctgttatttttttttctttctttttgttggtctgttctcagaagaagcctattctccttctgattgtcttgcctgaacattgggtcttttgttttgcctttccctagacgaggttcttagcactgtaccatgttcgtgtctagtgatgatcctggtagtgactggcatgctctttggctttgctggcctgacaagcaggtgttgtgccatcttcaggagttgatgagacactgatatttttctggcatacaacagatacccggagcccaccatcatatcacttggatgatgtttcattaaataccagccttggtgtcatagtgcagtatctgatacggtgcatagtcctttatctgaagcccctgtggccagatgctttggaatgcacaggttttcagattttagaaagtactgtggtacacagttggtgtttacttatgtaagtaatatggtgcccatcgcatatgtgtaccatggtatacatacaggatttaacatccccgggggagcctgagacagcactctgcaaccaagctcatattattgccacactgaaaagtatgaatatttacataaaatgggataagtaaagattgcaagtagtcttatatcagctcaggtctggttgtgctgccaaatgagattgccacagatttacacgaaaaaattaccttgtttcagagcttgatggatttggtgactgtgtgcctaggattgtatctagaggtgcagggaaaatgccctgaaatctccccatggggagaggaggtgcactcaggtggccttttcccagtccagaggctgccctgccccctactctgtgagccattcagttgtgaggagggaagtgtgctggcagtaactctgctaccgggaaagtatggcgggaggaggcctgtggggctggtggtcaggaggtggccaaagggcagtgcaacttctgagctgctcccgtctgttcaggtgaaagaggagagtagagatagtaggtctgttccctaccttccagggagacctrgagacctggcccaggactgtgggcatcctgagagtggctctggcttccccagtgggtcatatttgccgccctctttccctgagggatcagcagtgaagggctgaacgtgataagagggcccaggcatggcttggaaggggacagcggactgcaaaagagtgtcctgtgggagaaggcaggccacacaggggatggcagggatgatggcaggcctacaggcggcaggcccccaaaagggctggtgtctgtaagtgacttggtttctattgccagctctggcagggcatggagttggggaacaaaattggagcgtctggccaggcctgggtgttgagtttctgttcctgcccttgctgggctggttgggagcctttcctgtgtgtgaagggtgctgcctttctgtggagcctcgcctctaagcacggcccatgtttctgttggcagatctgccgccgccttaatggggtccggttcaccagctgcaagagygctaaggaccgtacagccatgtcggtgacactggagcagtgcctgatcctgcaacacgagcatggcatggccccgcaggtcttcacccaggccctggagtgcatgcgcaggtgagtgccgcagccaggccgcgcgccccgcctgccccggcccgtgtaaactgcagatgagctggtaccctgctcctgcctgcagggcctaccctgcatgagccccttgactccagccttcacacttgagtttgacaaacccgtcaaactattggcactatcaaattcagacagggttctcttgtaaggtaaggtggggggtaacagctagcaggactttctgagcaggactgcccagaaaactggtagactggtgggcaagccacgggtcaggcagctaaacgggaagctgggaagcagccatgacatgcagtgccctgttggccacctgctggccgtgggtgtgacttagggccagtgctttctcagcaggcatctgctgttgtcgtcgtgtatatattgatatctgtacatttccaaacttgagtgaagcaacgcgtctgcaggttgcatcggtctgctctgctgcttctctagcagtcgacaccatttgctcttatgagcaaagtgtcaaatgagtgttttatcatgagagctgtcagtgtgctctggcgacctcaccctaatgatgttctgattctgaggcagcaggcgtgtttgcagaatgaaacccggaactaaaagtgtctactgttgatcgatgccttgtttcaagcactgctgggcagccccctacctcacataccaaaagaaaggataagaaacctggtttcccgtctccttcgatgtagtcaccaatgctgttaaagtctcgtttccaacagtcacttctactaaatgttctgtatcatttgtcctctcaccaaattatttaaagtgttcaattctcttatcctttctgtatgtttctgccgtttgaccttctcacaatactgcacaaaagcgacgcgtgagctcctgcctcttgataagtgcattttgtaaaaatggaatcgttttgtcccgttttgtctttccaagttcatctcaacctctctgttaaagctcgccatccctctgcccaggctcagggaagcaatggagactcaaagaccggtgctctggggcgcctttttaaaattttaattccctggtctgctccccaggagccttggtgccattcaggcctgatgtccagtgtgaccctggtgctgagggacggcagccacgcctgtgcccattagctgcacggtggtgggaggggacattctggtgagctgcagacctcagccagtgaagaaaggagaacaaagtggacagggatccctgtggtagtggcagcaaggagcaggatcagggccagtcaggagctggcaccccaagttaggcacacagtccatgcggaaacctctactcagttctcgggctctcgaacaagttcaacggaaacaattcattctgaccacctctgaacacaaagacctcaggagaccagtgacaaagtggccccctggagagccacmgtgygatggcaggcctgtcactgagcccagacccgcaagggccccayccgcctgcccctagcmcacttgggttgtgtgctcaggacagccgttacagttacagctgttaggatgtatagtgcacaaagcactttttataacttttactcacataaggaattgaaaatccttgtaggaaaattaggaaatacagataagcccctacacwagttcctcagaaccctcccacaaagaatcccccagtttcctaatgtgaacaggtagcgctgcggacatttggatacatactgtctagataagagacatgcgtacatgcctatgggcgtgagtatgtacacatgggccaaccagtccctgaattacacagaacaaaaacacccacatgcacaaacaagtgtaattatatttgcaaataacagtcttgtgagcattttttaggttaataaatgtagaccttatcactttttttttctttttttttttttgagatggaatcttgctctgtcacccaggctggagtgcaatggtgcagtcttggctcactgcatcctccacctccagagtttaagcaattctgcccttgcctcctgagtagctgggattacagatgcccaccaccacacctggctaattttttgtatttttagtagaaacggggtttggccatgttggccgggatgttctcaaactcctgacctcaggtgatccgcccaccttggcctcccatagtgctgggattacagacgtgagccaccatgcccagccgcattttacacactataatttatccaatttgctgtcattgaatatttaagctgtatatggttttccagcattttaatcaaaggtgcagtgaatatccttatacattcccctagccacattgccttaggttaaaaagtatacacctttgtaaggcttttgaataattttagtacagatcaccaaatggtccccacagtagccactctcctgcccagtgtcccagagtgcacgaggcactgcccatgccgggcgctgtctttcctgtcactcttgtgaggcttctgaagctgtaagggctgttgtttctctgcattagcagtaagggccctggggcctggcaaagggaaggcccttcctcctgtgggaacaggcagcattccctccaccctgccctcttcctttctaaaccccacccctgcctccaatcatggatgccttttttacttgcttatttctttgttttctgaaatctctacagtgaacatgtatcactttaatagtttttaaagaagttataaaaacaaaacaaagctcaatcctactttacctgtgcctgccccagaattctcgcaccagctctggggacatggctcactgccaccttgagccaacccttgcaggtctgaggctcttgtcacaggcatttgttttaaggtgacttctgttttcgatacgatcccatgaggggaagacatgtacctgttcaggcggctgcaagccgaggtggctgggtcacaagctagcagctctggctgctggggtgccgagtacctgcagtttagctgagggccccagaaggcagcataaacttccaccctgcccgtgggtgcaggaggacattttggttcctggctttctggcttgcatcttatcagacggaagagtagagcatgcaggtgggggtggagggggtgggggccaagctggcacccaggcttttctcctggaggcccagggtgaaccatggccagtgctgtgctgtaaatgttcagccaccagctctctccccaaaagccctgatctgtaatgtttgccatttctgtggcataaacgcttctaccagggcccatttcaagctcccatgtggcaccattgaacatggagttgggaagagattcacacatttggccactggggtgttcctgtccccagtcctggggctgaacccctcgaagtaggccttcctgagtagccacagggccctgccagcctctcctggcagggaatgtggcagtgggtcggtgctccgcagcttgggaattgtgccctctcagaatggcacattccagcagggccatgggggcttcggggctcctctgggagagctggggagggctctgtgtgaagaggaaccctgggcctcctgcctccccatctccaagtggagccttcacaggctgcctgctgtgtcctcaggcctctgattctgtgtcactgctgccacttggcagacataaatgtgcttccagagtcatgtggttctaggtaccatctcacctcagtgcagttcttctgtagcaccaaaagggggaagaagccccaaatttctagtgtggtattgtttggattccacccttggggatgctttcagaaccctaacttgcaaagatggaaacagcagtcgctcatgcctgccactgctgagcctggaacccgaggcggggctggtgggggctctgcgcttggttggttggtacctgaggtaaatggtttttgtttgcgtggttgatcaagaggcagctttggccaaatcctttgtaccaccccctgctcaggcatctgtgagaaggtcaaatccccaatggttcttcatgttccgcttgcttctcagaaatccctgtctgtgcagcatgtgggggcatggccgggcagcatggagttgtgcttggccagccgagagagtgaacatggaaaaccattcgttcaacctacatgtgtttattttcagtagattgcagtattttttcttattttcacttctctttctctccttttttcctgtaactgtgctggttttgttttggtcttcctctcatacccgtttctgcatttcatcttttctttctattgtgacttcatttcatttttttttaaccttatcttttgtttctcttgtttatcccatcctttttgataaaatccatcgcatgtgtcttctttttttctttattttctttcctttcctttttcctttttctttctcccaaactttttccttttcacagcattggaacacgggaggtagtcacccagaagaacttgagcggcctggtgcccatccgagacttaaggctagaccccagcctcctctgttccatccctttattagctctgagccccaatttactgattgtgtggctctttctgagcatagcatacctggtgaccaaattgcgttgcaaatgaatatcattatgaaaaattaataagtcacaagaaaaacaaaagtgccagaacatgtccagccaccgtgtacctaactggacagaaggaatgtgtcaaaccgtggtctgccaagaaatatttcatgccttacattttgacgttttgttcttctgaactgtaaatatctgccaaattatttcaccaagaagacttgtttgtttagctcctgtagcatcttcagtgcttgtaacatgttcttacggtgccctgtcactgcatcgtttagctggcctggaattccttgtaccacrtctctaccttctgatgtacaactatttatcacctgtacctctcatgtgccctgtttccaagagaaacgagttctgtttaaagagaatttgtatatttgatactattctttaagtgtactgctaacccttcctttccttttgatgacaaacgaaaagaaaaaaacatgctttataactggcttatctagaaaaacctatctaataggacatgtactttctgctttcatttcaaagcgtagtccctgaattacagtagcaaacagtttgcagaatcctaccatttccttgcttatgtttattatttccaattaaggatgacacaaagctgtgaatacagtagtacactgtagcaagagccagacacagtcagacacagaaagatcacctactgcatacgccagacacagaaagatcacctactgcatacgccagacacagaaagatcacctactgcatatgccagccacagaaagatcacctactgcatacgccagacacagaaagatcacctactccatacgccagacacagaaagatcacctactgcatacgccaaagaaagatcacctactgcatacgccagacacagaaagatcacctgctgcatacgccagacacagaaagatcacctgctgcatacgccagacacagaaagatcacctactgcatacaccagacagaaagataacctactgcatacgccagacacagatcatctactgcatacaccagacagaaagataacctaccgcataagtcagacagaaagatcacctagtgcataagtcagacacagaaagatcacctactgcataagtcaaacagaaagatcgcctactgcatacaccagacacagaaagatcacctactgcataagtcaaacagaaagataacctcctgcatacgccagacacagaaagatcacctgctgcacacaccagacacagatcacctactgcatacgccagacacagaaagatcacctactgcatatgccagacacagaaagatcacctactgcatacgccagacacagaaagatcacctactgcatgtgactttagatttactcttcactatgtaaggatcattcagctggttcaaggaattaatgcatatagtcaccaaaggctgttaaagttatatacttttatttattttaaaacagtatttttcatttaaaaaatggtatctttaattgcagattaaagttccaacatcttttctctcttactaatcaaatatgattgataatgaaaaaaaatcaaagaaaaaatgccaaaaaaaaaagtgatccctgacttgtgggcagttgcggtggatggagctgagagagcagcagggcgctctggtttctgctggtgccccctcagtcctcacgtggcattccctgcagcgcgatgaagtgtaaccttaacacccatgtagggcagagggtaattgtccacctgtaaaagtaaccaaatagatcaggaaaaactccccacaccctgtgcaggacggtcagcagcttctctgttttccagttcatattatgttgtgcctccactttctatctccagctggttccccatacactgtagtttatgaagacgattttttttaaccaggccagaaaaatgggaatgaatttagagaagcttgcttttccagaaacttgacacccatgcatgcccagaaacccagtcgaccacaaaaggcagcgagcgacctctcttcattatctctccaggactcccagaccttaccccgggctttttctcattcagtatcagctcagagtctgggtcctaggaatcacagaagcagttagcaatgaatggcaaatgctagactcaacactttacatcctaaaatgtaagaccatcatgagcactgcaggctccctggggcaggcatcacctgtgtgtcacccctgtaagtgaatccacgcttctccaagtgcagtgtgttcacttgtctcttctaaaataaatgaggtggctgttgtggcatagctcctggtggccttcagtagggagtctgaagtcaccaaacgccagctcatgggtggtgtaagctgtggcagcatgacaatagtccctgggcagtgtcctgtccagcctgtgattatttgaaaggcatgtttgccatgtttgccactttccctctttcacattgaggcgtgcacttcaactaagaccatcttgtttgctttatttgaaagcaagagagcagagtccacagcctcattcagttcccattacacagcttcctggtcctgctcctggtaacgtggttccaatgcctgtagtggtgacttacgtgcactcccacttccacagcagggctagtggctaggcagagcccatgcacagaggaaggccctctgactgcagacagcacccctccctctcccagggctcaaggatgcttctgtggcaccctccagggacgcctcccaggaccctgccccatagcacagagaagctgcggccaggccgaggagcccctcccagggggcctcaaggacaccacggcctgatccttgattgtcaccacacctttctgcccatgtgggcttggcccgtgggctgagagaaatgagaccaaagggagcgagataaggttctttgtttctctcctccagggtctgggtgaaaatcagtatgccgcctgtgcacttggagagctagcaaaaggacaccatgagattagcctaggtggtgggttggttttggctttttaaacttaaagtatttgagaaaagaaactcagttgctctccctttatgctgaattttaatgtcactaaggccttttactcatgaaatcaggccaaatacgtatgcaaaatcttacttgctttagtgagaaataggcaggatgaaacaaagatgggagatgattcaagaaaggggtcattgacatttagtgatggtttttagttgcttatactgtagtagtgctgaggcattgttgatgtcagccagctctaggtgttcagattaaatcagctttctgaagttagggaaaccacaatcaggagtggttctctttggatggtcttataaaattgttgtataagttttttcaactagtgtgacagtcactatttacgcctatggcttgattccagcagagattttaacacaatgacctgttttccctccacaaagtgacaggagtagcagccaccccatgctcagccatagaatcactaagatactgatgcctgcagatgagttctcaagtggaagaccccactggaaccggaaaactagaggattccctaaaattatctgtcacttggggtttccattttaattttcatttcaaaaatggatgcccttgaaaagaaataatttattgatataataaaagtaatcatggagctttgaaataattaagtccctcttgctaaaatctaagaccacctcaacatgtaccattggttcctaaaaagtatgcagccgacgtgatcagtggaggtgtcctgccttagggcagcagcttggcctctgcagcaggaaaccccagttagcacaggctgtcctcgccacctctgcatgcctcgccccgggccctcttgccagctcgtccgcacaggcaggtggtgggataacagtgtcggcatgtggatcagccacatcagccggatattgcaaattcaaacatctgggggaaagtaaatacaatttgatttgaaaactacgttgaaatgaaagtataatctttattagaatttcacatctgatgtgttcagccagctaaactaggcattaactcctttaacatgtaaataaaagataatgtcaaagttcacaaattattctgcctcgctcctcacggcagtttagcatttattagtgacaggtggtttttaagcagtttgtacatttctatataaatggagaagccatatctgaagtagttcattaatgtaagagtttccaaagattaaaggagattaactgtgtataggaacctatagcttctgctttaagtggaagtacgtttttgattactgaatgaatgttaggcaaacacgattgttacttactccagggggcctcctgtggcctaggtgttcagctcagatgacacacatctagctgaggccttgaggctccgtgacaagaaagcatatccaagttaccaaattagttacaacaaccaggtggatacttttctaaactatcggagcttagcttttgaataaaaaatactgtcttaccaaaagtattttacatgttcttsataatgagactgtcattttcactttaaaaggcttgagcaattgccactgatgttttttttttttaaatgcgtgacataatggtcttcatacaatttgaattttttaaaaaatcactgtttcttggtaactgcaaattttacatctcataaggggaattttgtactaaatttgataactagttgatttcactgctagtcttagaacagcataaaaccatcaagttatactgtgctgtgggaagtcatttatgtttaaaatcrcttttgctggttagttttatgtctacacctgaacatttcccagagaactccccggacgcgctcactgagtaggtgaggccccctggctgctcatcctcccatgcagtgtttgcttttgccccctggattgccatggcaaccctccatcagatgcagctgaggatgacgctggtagtgagttctctagggaagggcacctgtgggctctcactggctcagtggcacctgtgcaagagggaacacatgggggcagcccacctgtggaagggtggctggctgctaccagaacttggtgagatccctccctcataacattccagccctgattgccaggctgctctgcagacagtgcatgaacccattggattacctggcacccagaacaactgtcctccaggagacagcagaccagaacgccttcctagccagctggctttgctacatgttgaattctgcaaggaaagtcagcattttgaatttgatgtgattacagctcttgctaatacagaaaagtccggctctttaaagctctgaagtgcaactttagtaagagtagtaatatttctttttccacttcatttgctatgtgagggaatctttgaaccacaagttatgatagaaccccaaaagacatgagctacatgaaaccattcacttggaaaaagtttgcttccacttagatacagtgctgcttttaggaacgcacaactcacagccccacgcagcatgtgtccatctctgtgcttcttaattgccttgttcagaaacctgccatcttacatatgtatttgttgtaaatgagtccggcacccatttaaattaatcttttttttaatgttatgaaaatgatcagttcatttcatcttagtttaagtcttttcttttttccttttttactgccgtcatttcttgtgcttgttttttccccagtgagggttgtcgaagagaaaatacaatgaagaatgttggaagtcgcaaatatgcatttaattccctgcagctgaaggctttccccaagcattacaggcctcccgaagggacttacggaaaagttgaaacgtgaacacacggtttcctctaattagctgttacataataaatgtgggtaccctctagtgtcatatatgaattcttcaagaagacctgaaggattggtttttattttttgtggtttttttaaaaaaaacatttcactaaagagtctctggagcatgttttttgttttttgggtttttttccccattggaatcaataggaggtaatgtttggctcaatagtgtggatagtaacaactgcctatttaaattaaatagcctttggctgtaactacacagatctcatcaatagttacctacatgaatcaagctaggtttgtctgaaatgctagaagactttttcaaatgcctgcttgctcacttacttttctacagagtaactcaaaagtaaccattgaattacaatccactttgtaaaaatctgaatgtaaaacagtaaataataaattaaataattggatcctaggcataccaataaatgttatttggggaaagaagctagcactatctcatgcagtgagaataacgggttctagtgaattatcctatctacactaccacctgaagaagttgaaagaaagattgataaatcaacgggagataagactttattagaaggtaacacctgcaaggtaccccacatagttggggccactcttttttctgtcccttatgasttacagaacagggagtctgctggagacacaaagccagcagtaaggtccctttagcctgtctcctgttctctgaagctccctgccgaggctccctcacgcccagaggacacatctccccttcttctctagatgttaatgtagggcctcagatgtggcatgtcaacactcccatggggaatttatgaccatagagatagtagaaacctaaatattttcagaaaaaaaattttttttgcaggatttccaatttatctttgaaaagacagtacaatcatgtttgaatgtctgatgaaagtgtcttatttttaggtttgcaataattgttactttcttattctcattcttatgtaagatgactattgagaaacagttgaaatttattctcctcaaatgagattttgaaagggatttatgggccataaaacttaggaatttcatagaaaattttgtctggtcatcttttataagatgatgatgagtcttatctgcacatagcagagtttgtttcttaggagtttatatgttttattgattctgtttacgatgtttacatgttcttgaaaaggttgtaaaagaaatacatatggcacatattaatgatgctgatcctaatgatttgtgaacctcttagaaattcttttgtctaaaagcctagagattcttctggttcctttagaaacatgtaacaaacttgggccaggggtgctgaggcatggggaggactgcttattggcaggaacacagagggggtgggcatcaggtagggtggaactggatgaccttccagaccccctcctactcagaagtcagcatgcaagcagcgcctgctgtctcccgatgcctgcagggaggaaaatgtctgtgaaggacactttaatgaaggacgaagctctctgctgctccctcaaagctgagttcactgtggcaggcaggaagcagagaagctcctgcccgccaaacccactgcacaggtggctgctgctggtatcagattctcctttttaagtgtcaatttctgttcacagacagtttgttttcaatatggctgatttaccctttcacctctccaccatctcatttaatttgtaaatttttagttctgtcttttctcattttaacttttaaaaaatctccttgctttttaaaaataaatattacccacatagttttcagatcttttttgtctggagagcattaaatatctgcactcatcaaagggaayatagcaaatgttgatcatctgtcagcagttttgcatgtgacacctttatatgaattattttcccaatttttgctctatgtaatgggtcaccataaaactgtaagacttggcaaatgctatagaaaaggttcaggtttcagtattctctctgaaggcatcattcctgggcttccggcagcatcacacgcttccagtgcctgcagggtgagggtgtgtggcacagaggcaagcagctcctctcttctgtaggagctttgggttttcagaggtgcagggaaggcagttttacaggttaccgtaaaacagaggttccgtccagtgttccttatgatgcctccccatttaaaaagaaaagagatctatggaaaactgggaatgtaatgtggattctgtcagagctcctacagagcacagttgcctttagtttcctttaaagatgtaaaaatattgtataatacagttttktccctacacaattgtatttgccaagcttagtgcattatgatacctttatttatttgttttgggcagtattactatatatatataaacatacagttactgttttatatattcttaggtcattcaaagccatgtatgctgtaaatgtgctagtctttagaatgacacataataaataactgacaagatattaaatgtggtcttgcctgattcatcctattaggaggactagttctatgtgaccagcctgtgactggaccattgttcttgggcattgcattgagtgctcgggtgctgaatacatgtttgtaaacatgggaccatgggagacttccattttataagcttgtttctgcctaatttgaagcagaggggcaacagcgttgaggttaagagcacggactttgggagcacacagaccaggtcccaatcctggttctgcccctgactggctggtgactctgagcaagttgcttgacctctccaagcctccgtttcctcatgtgcaaagtgtggacaacaacagtaccttcctcataaggaacgtgcgacgcgcctcagaagtacgtgttcataaatggtagccattgttgtwaccttcccgtctgtgaacatggatcacatcatctctgtgggtaacccagtcctcgttgtatgacttgtcaaaatgcagttccacttgtattaatattgaccctgttcatcgtcaccaggactgcatcttgcaccactgtgccgtcttctaggcacacacgrcccgttatctcccttggaaaaattcctctcactggaaatgtacaattaaaggatgattgaaatgtttaactcttggagtttttagtattaccaaactcctagaaatttaagctaccaccaaaaataacatgtgccttttccctttattctcattgatggtagcagtgcacctcgtttcagtgtcctgattccttgattactgtgaacactgaacatcttttatacctttatgatatttctatgtttgtgacttcattggaatgttgatctatttcatatagattgtttttaatatacaatgtattagcccctgtcatatgttgcacactttttaacctatttgtcagctgtcttttggtctgtggtaggagttatacagtattttaaatggtttatgtagtcacatatacctgtctttcattttgatgcttgttctgaaatggagtcctggcttcaccatggaaggtgggacatatgggacagccatgtccttgtgggcatggtggtgtggctgcgtgcccacgacgaggggctggactaaagtgctcactggcaccttgcttggtgcatgggccatgctcagtttaatattattaacagtttctaccttcactctcatgtctcaggattattttttcagcatttacctgttcttatttctaggatgtttatggtttcagtcctacatttagatcaatccatctggaatcatcttggtgtaagtcctgtgttgtgcttacagtatgtaaagtcagagggaatccctcaaggtcaggcctaattttgcttctctttaaagttaagccaagaagaagacatgtcaggacgcccagacatcagctaccgtgagcttcttcctgccctccctccgcatgccattctggtgctgcgcttcagtttcctgttgagtctctgcttagtagatgacttggcacaatctggctgcccagatctaggggagttgtcccagggaggctttgcgctggaggaaggtaagaggagctggaggttggagcttcccgatttgtgatttttccaagaacagaaatgattagccatgtggggaggttacttcattgtacattgttctactgcataacctccctctattctttaccagcatcacacagcaggttggcaccatttttgaatagaggtttctcacagtatcctcagcagcattgagtgttcctaatgttgtagtaatgagcagtagatgtctctcagtgggcagtgtgacctctttggtcactctaaagggctgccagcatttctcttaagctggggggagaagagctgttctgtgtataggggtattgggaacacatggacagaaggaactggcctcacatgccatcgtgttcctgggatggctcttccaagaccagcagttcctcctggcaggcaggccctcacagaactctgcatttggagatggacaaactctcttcttcttatcactttctccccaaaatgtcctcttctaccagcccctcttaagagccgattttctgtaagttatagtgagggcactgctctgctgtgcacagaaggaaccccagcccagaagcacacgctccctgtggaacctgcaggggtggcagtgatgacagaaccaagggggtcaaggaagattggagaggagtgggcagcaggaaacagctcaggctgcctgacctggcccccggctgcccatgagggcctccagagaggggcagagctggcttatcgggatccatgatggtttttacacttttaaaagtgccctcttctcagagaccctggttatttccaaaagtaggaagtaatcaaatttacagtggataaaatccagtatttgaaatcaggaagacagaaaaaaaagcaaaatagcatccttttctgagaggtatatgctgaccaaaaagatctttcattcctgtgaacaccaagcagcgcggcctctggcagagagagcgctgggttgtacagatggaaacttgtgtttagcaggctgtctgctcccaatagtggccctggctgcaactgacctcctgatgccctgctgacgctaactgtgggtaccaaccagcaccgtggacatcggccccaggatcagtctacgatttgtctggtggccaaatgatgacttttgagtgggaaaagctggtgggggctacaccgtgctctgcagtgtagtgggatcctgtgagctggcctgcacaggcactccctcccctgccaggggccccagggaggcttctccagcctgaggctgcaccctccatacgattccaccccccatcctgtgccaacagtaggcaaacggagagtagcttggtcttgtttttattagctgttgccctccaggctacgacagggttcccagggtgtagcctgaaaacacccatactctagattccctccactggaaccctgtctttgccatgatttcttcctgcatcaggcccctgtgggccttgcaggccagtccaggcaggtctttcacactgttgtcccacataacagaaaaagctgagcagacagggtaggaaacacacttgcatctccatggctccaaagaggatgcctgtgttagatggatgtagacagacacagcacttcactgcttcctcctcctcgccacccagccctccctcggtgtctgtggcctgactctctcctggtggtcctacgtctctgaccatccctcctcactctcaaattttatgttgcccaccacctgccactaatggcgtggtgttctcctgggttccctttctcacttaagatgatcttcctgaaaaatcttacacattcctgttgaacaaatggtcacttatatggtagtgactcctaaatttctaggtccatcccagactctcccccaaggtccagattacctatacatctaagcaccatgcctgtcttgcaggcatctcaaatacagcatgctcatgcctctcctcctccaagctggctgagtctccctctaatagacgaccttgggatcattttctcctccacatcccatcaatcagccactgaacctgtatctcttgagaaccatcccataatttccatccatgcaccccaaggcctggtctgtatcagtcccctcggatctggacctctcctgagcatcctcacccctcctgcaaggctagtctcaggtctgccttcctctatggtgatttctccccacaaatgaagttggccctttcaaaaaaacttcctctccttcattgttgactatgaagattctttcatgcatgtcctgtccactgtcagtcccctctgtattcacaagagcaagtgtaatgcccgctgtgaaggagctaaagtttgttgaataaacacatgaacaaatggtggttttgtggtgttcaactgaaatatttcctatttcagcactggaccacgctgtttttctcactacataatcggttacgctaaatgcatcacgagccaaattcaaaaggtcaaaggagaaggcaaatggcagagtgtggtaaaggggcgagtgagagggtctctgaaaaaagtcaggctaaaattacagggggttcaggcaatgttatcttgatctggatggccagttacatgacagattactttgttcttaacatacgaacatcctattcactttttggtatactggttgtttaacagtaaaaattaaatgtttaaaacccaccattactgagaatgatgatttccaatttcatccatgtccctacaaaggacatgaactcatcattttttatggctgcatagtattccatggtgtatatgcaccacattttcttaatccagtctatcattgttggacatttgggttggttccaagtctttgctattgtgaataatgccacaataaacatacatgtgcatgtgtctttatagcagcatgatttatagtcctttgggtatatacccagtaatgggatggctgggtcaaatggtatttccagttctagatccctgaggaatcgccacactgacttccacaatggttgaactagtttacagtcccaccaacagtgtaaaagtgttcctatttctccacatcctctccacacctgttgtttcctgactttttaatgattgccgttctaactaactggtgtgagatggtatctcatcgtggttttgatttgcattcctctgatggccagtgatgatgagcattttttcatgtgttttttggctgcataaatgtcttcttttgagaagtgtctgttcatgtccttcgcccactttttgatggggttgtttttttcttgtaaatttgtttgagttcattgtagattctggatattagccctttgtcagatgagtaggttgtgaaaattttctcccattttgtaggttgcctgttcactctgatggtagtttcttttgctgtgcagaagctctttagtttaattagatcccatttgtcaattttgtcttttgttgccattgcttttggtgttttagacatgaagtccttgcccatgcctgtgtcctgaatggtaatgcctaggttttcttctagggtttttatggttttaggtctaatgtttaagtctttaatccatcttgaattgatttttgtgtaaggtgtaaggaagggatccagtttcagctttctacatatggctagccagttttcccagcaccatttattaaatagggaatcctttccccattgcttgtttttctcaggttcattctcagtaaactatcgcaagaacaaaaaaccaaacaccgcatattctcactcataggtgggaattgaacaatgagatcacatggacacaggaaggggaatatcacactctggggactgttgtggggtggggggaggggggagggatagcatcgggagatatacctaatgctagatgacgagttagtgggtgcagcgcaccagcatggcacatgtatacacatgtaactaacctgcacaatgtgcacatgtaccctaaaacttaaagtataaaaaaaaaatagtcaccaactacattcaaaccatgagagggtagctgcagatttaaattctctgaagtaaagttgaatcattatctctgtattaaataggttgacttctgagtgatgaaccttacttcttccaaggagctttcccacgtccctgctactacataacaaggtttatttaatatgtcttttcttaattttcccatagcacattttaatatttttatcagggatatgtaataataccattccataattaaaatagaatatgagacataaaaggtaaaacaataatgatggtgtaagtattatagaaaacataatacatgtactatctttgaaaaattttagagctgtagtttgcacgatagaaaatatatatcaacatttcatcacatcagaaatatatgcaatgttagatctattacattgtgacattttaggaaaaaaagaactgggattttacttttgtattcctaagattgtggccagattttgaatgactaatatttatagaattgaattaaatgtatttctaaaagtttaaaaaaaaaacaacccaccattgttgaacaatctccaaaggaaattaaggaaacagttctatgtacagtagcatcataaagaaaatactcaggaataaacaaccaaagaggcaaaagtcttgtatattgaaaactacaaaattttgctgcaaagaaattaagaatgccaaaaaatggaaagacatcttgcgcacatggattgaaagacctaatattgttaagatgacagtactatcaaaagtgagctacagattcaatgtaccccccccccatcaaattcccaactgatttttttgtgtgtggaaatagaaaaatccatcctaagatttacatcgaatctcaaggaaccccaggtagccaaaacaatcttgaaaaagaacaaagctggaggtcgcatacttcctgatttcaaagcttattattacagagctacagtaatcaaaataatgtggcactggcataaatatgtacagacagaagtgcagaatagaatagcatgcccagaaataaaccctggcatatatggtcaaatgattttccacaggatgccaagaccattcaatggggaaagaaca

SEQ ID NO: 95768 - DNA, 24057 bp, Homo sapiens
ctctcaggctgctgaagaaaaaggattcactgccaacctttcataccaggatactgctgtgggaatgggcaacagtcattcccatcattccctcccagcatttcctgcattgcagagatggcataaaccactagaagacaggcactgggctgagttctgctgcctaccagctgtgagacatgagacacttactctctcagagggtcagtttcctcagctctaaaaaggaactcatattgacctcacaggattaatctgaggttaaggtaatatatacaaagccccttacattgttgtcctctgcagccaggagcaggtcaataggctcatctaggctctggcccttatgagcagattaggcagcaccactgcactttctaaaagcaagcctagaaggagacacatgaaaatactaacactgagggtctcttacagattatttctcttccttctgattttctatatttttctaatattttattattgaaaatgcactccttccataatctaaggggaaaaacaacctaaaactttaagattaagacagaccaaggggaatcaatgacagccattttttattggcatgttttccagaaaaagatcttttttgattctagatctttagggataaaacagcagaaaaaccatacataaacaagattaactctcaatatctaaaccatttcgaaaaggaactggtgaaataacttaattttgggtggccggggcaggtggatcacaaggtcaggagttggagaccagcctggccaatatggtgaaacccccgactatatgaaaaatacaaaaattagccaggcatagtggcagacacctgtagtcccagctactcaggaggctgaggcaggagaattgcttgaatcagggaggcagagactacagtgagcccagattgtgccactgcactccagcctgggtgacagagagagactccgtctcaaaaaaataaaaaaaagaacttagcttgccttgtaatgattaaaaaaaaaattcataaggggtagaaaagacaaattcttgaaaagaaacacttacctgtagtctgcctgggggccattgaactactaagcgcaaaatcccagccataagtgtagtgattgctctctttagaggctgtgggaagtaggaagtagacccatcagtcaactatgtcttggaaatgaacaggtttccccttctctagtattaaaaaactaagcagcaaattaattgtaaacttaacagtaaaattattggttattttaatataataagggcacgaattaatttataaatgttttattcaaccacaggtagtaattatacacattagccacatcccactttcatcaaatgagtcagtcctagattgattccacaaaattactatcatttaaagtgtcttcttcaacaatgaaggcagataaagaatgctttgccatagaatcacagaaaattaaagagctagaagggactgaagaaattccaactcctataattagaactgactgcccacatccttactttatgaatgaggatcatgaattccagaaagttcaataacttatccaagtgcatccagctatcaataaagtttgtggtctggaaccccattctcctaattcctaggcaagtgcattttcactaaatcataacacctttctgttaaaaagtagaattttttttgcttgtttgtactttttaaactattctcaatgcacacgcattgcttctataacctaaaaaggtcatatttatttaattacacacaaaacaactgtagcctactatactgacttatactgatagcagaaagattaagttcatgaactacatgtatatctcggacaggttacttaattcgtgcgttacaatttttcccccagaaaagaaagaaaatacctgtcttgcaaatgagttattctacaaagcacctaaaacagtacctggcatgtgggaagccctcaataaatggtagcttttattattattaaattactacaaagctaataagaatactcttaaaactgcagtccccaacctttctgacactggaccagtttcatggaagacaatttttccacagatagggaggggtggaagggaaggtttccggatgaaactgttcacctcagatcatcaggcattagattcttataaggagcatgcaatctagatcccttgcatgcacagttcacagtagcgttcatgctcctatgagaatctaatgttggactgctctgacaggtggtggagctcaggtggtaatgctcactcaaccacagctcacctcctgctgtgccacctggttcctaatgggccagcaaatggtctgggtctaaggcctggggtttggagacctctgctctaacacactaaaataggctaagtgttgtaattcagtgtcccgcagattctagctcattcaagttctgcaagtctttcctgtgatgtggataaagcaatggaactgtgagaatcaacgcaagacatctcctgaagacagccagacctcagaaacattcctcagcaactgaacctatctaatgctaaattattttaccagacttcctcgtatcaaggttaggtacttaatccaacatacttagcttcacactttaaaaaatctttctgatcacttagatctcaacaaaatcctaactggacttctgcttccattccaattcccctaatatcttttttgtatatcagcaataaatcatctcattaaatcttagatcatgtcactctgctcaaaaatcttccagagagccaggattctcactgttgaagtgggaggttacatataagcaagaggggaaggctacaatgatccttatatactagattggaaatggaactcatgtttagcttaatatagctattgagggatatagaagtaattacagatatgcatatatacatgggctagctctgttagctgagaggacttaaagcactagcactcagtggcaaggagcacacccagtgcccagatcttggctgcattctttaataaaaggaaccagtgctcctttgagaaatggctgattatgtctggagcactttgtaatgctagaaaggaactactggaaaaaacataacgatggggtatgtcaaagtgacactgcagtcaactgtacccaaagctggaacaatttcagcaacaaaataagtaacaaagtattactggcttataatccaaaccaaaataaataaataaataaacaaccctaaattcatactaatataaataggtgaataagttaatgagaaagaacaaatatcccattcagaagaattccaaataatttatgtaggtactctcttccagtatcttcccaaacacctaactgcctcaaaactgtcaatgatatcaaaaacaaggaaagtctgagaaactgtcacagttaagaggagcctaaggaagaagtcatgaccattaaatgtaatgtggtatcctggatgggatcctggaatagcaaaaggacatttggcaaaaactaagtaaatctaaataaagtatggactttaataacgtatcaatattggttcatcaactgtacacaggtataccaaacatgaaagggggaaacagtgtagcatatacagaaactccataccatcttcacaacttctttgaaaatctaaaactattcaaaaataaagtttatttatgaaaaaattaaaacctccaatgcttgtccattttgatcacagtgaaaatcaattttttttttttttttgagacagagtctcgctttgtcacccaggctggagtgcagtggcccaatcttggctcactgcaacctccgcctcctgggttcaaccgattatcctgcctcagcctgctgagtagctgggatcagaggcacctgccaccacgtccagctaatttttgtatttttagtggagacggggtttcaccatgttggctaggctgctcttgaactcctgacctcaggtgatccgcccgcctgggctcccaaagtgctggggttacaagcatgggccaccacccccaactctaattcttaaccctcaccctctcatgtctttgtagtacagcactaccaaccttccccacctccaggactccatctccaattactctcttgctcaatcaccagacatgctgccccccttgtttgatctagaactagtcaagcaggcatgctccctttgactgaccattccctctcctggaatgatcctgatatttacatggctaatttccttatctttttcaatttttgggtcaaatctcaccttttcaatgaggtcaacccagatcacatcatttaacattttcacccataccccaactgtcaacactcccaattcctcttcactgctttctatcgtgcttatcttctaacgtaacttaattatctgttaggttttgttgtttagtgcatgtacattcaatagcacgctaattccataggaaaagggtttttagattttgttgttttgggtctgttatattcatagaagtatcccaaacatctgtgtaaagcggtatctgccctatagcagacatataatatatttttgcagaataactgaagtttaaatatttacagacttctgaaggtgtgatagtcaaaagttacaagtttttagagacagagtctcgctatgtttctggtattgaactcagcctcaagcaatcctcaattttcccagtaattggagctaggtgtgtgtcaccacgtttgactcaaagaatacgtttattttatcttatttatttttttgagacggagtctcgctctgtcgcccaggctggagtgcagtggcacgatctgggttcactgcaagctccgcctcccgggttcacgccattctcctgcctcggcctccccagtagctgggactacaggcgcccgcccggacgcccggctaattttttgtatttttagtagagacggggtttcaccgtgttagccaggatggtctcgatctcctgacctcgtgatcctcccgcctcggcctccgaaagtgctgagattacaggcgtgagccaccacgcccggcaaggaatacgttttaataaagtaaaagttactgttaataattaggcacgtaactcctggaccctgaaacaattacgctgtcttctgtaaaacaggaaaatatcaggcatcacaggagaagtatgatcccatttctatttttttaaatgtctgtgaacgtgtgtaatcacagaaaaactctggaaggttgtcagaaaaacgttaacatacccctgggggtatgaaaaaaggcgtttttcctcccccttctcccccccagcgaccgatagttcttttgtctttttacaatgagcatgcatgcaacaggaatgttaaaaatcgatttctttttctaaaccgacaatgtatacaattattaaagggggaaaaacacttctgaaatgcaaaacatggaatcactcttgcagagataccagagatctctgaaagctggaagcgtgtctcttctctgaactcctagtgcctaacaagcagtaggcagccctcattactgcctcttggcaaaaagggcagaacaaacagcttttggtaggtctcgatcaaaatggtaacaaatcacagttttaataaaatggcaaatattctaactgccaactcttggatgtttgcattataaaatgaagcaatacaaagataaaggcaattttctgtcttcattaaaaaaaaaaaaaagcaaccttaatacccagtggcaaccctaagttatgaataaagcagcagcacagaaaatgctgcttgggttccctttcccaagctgtccagcctcggcggctccgttcttgagctccaagagtctgggcacaaaaagccgcgtggccctggatcctgcaaattgggaaacggggggatcctgcaggccaatggccttacgggagccaatgtgacgggatcaggggcagacccatttaggttgccgtaaccggccaattcagtacgcaatagggaaaatcaattaggatctgcagagggttcccggatacaccttgcgaagaatgccgcactctccgccactcattccccactcaccggcacccgctaaaccttcagcctgaaattttcctccgaagggaagcrgagcagaggaagaactaccaagtgctacactcaaagcctgccgtcgcagtgagcgcgacctccaaaytgaggcatttttgttccggcgaaatccctcccactcaggaaagtccctagaaagagagcgcaggcgcctgggtatcacatgaccacttcccggaagcgcagcagacccgctcaacttcatcctgggttgaggcggaggagaacttccagaattatggcgaagtccgggctgaggcmggacccgcagagcacagctgcagccactgtgctaaagcgggcagtagaactagattcggagtcgcggtatccgcaggctctggtgtgttaccaagaggggattgatctgctcctgcaggttctgaaaggtgagcaatgagccaaggcggggaggacctgaggaaaaggagctggttcctgctgtgtctggggtgaagtgaaagagttaaaaatgatttttccacaccacgaagaagcagttaaatacagaaggtgggatattctataggacaactgggccgctttcttttagatctttaatagattgatgttacctagaaaaggtggggaggctactagtctagattttaaaagacttaagagatataagatataacgcaatgtaatatataagctttgataggacctgggtttgtacgaactttaaaagacatttttggatctattagaaaagtttgaatatagattggggggcattaaaattattttcttaggcaatatgattttttttccaaaactttccttaatttttagagatgcagaccaaagtgttttagaaagagatgctatgatgtctttagttaattttccttaagcaaaaatttcttaaaaatcgaagctctatttgagcaaaaatgctaattttaaaaatttcggtgatgggtaataagggtgtttattatacgattatttttaattttctgtttaaacatttgcatttaaagcaagccaaagtaaaattatgtagcggtagaagaagaaaagtttttcttaaacggatgargttcggtgtgagaaatgcgcagggttgtggaggagacaagtgagacttttcgtattattcaatgttgagaaatacccaaatattccttaacacccagcacaaccctggctcacagtagacactcaatatttatgtattaaattgataagatcagctcctgctccccaacccccgacactcccggtctggactaagctccctctgttctttctagtttaagcttcttataattaaagtgttacagaagctttggggcagcagaggggagccctttatggtttggtgctttggtcagaactacaaactctaccggccgggcgcggtggctcactcctgtaatcccagcacttttttgggaggccgaggcaggtggatcatgaggtcaagagatcgagaccatyctggccaacatggtgaaaccccgtctctactgaaaatacaaaaattagccgggcatggtggcacgcacctgtagtcccagccacttgggaggctgaggcaggagaattgcttgaatccgggaggcggaggttgcagtgagccgagatcgcgccactgcactccagtctgccaatagaacaagactccgtctcaaaaaaaagaaaaaataactgtaaactctaccttgcctggggcattatttgatgataatgatgacagtgacaacagcaataagcatagatatcacgtttcagtgctgagtgccaggcattgcagaaaacattaaaagcatgatctcgtttcatccgtaccaattgccctatcaagtaggagttgatggtattctcgttttacagcataaaaagtattgttcgctttcaagttctgccactaggaggtggtagagtcacagtcggagcccaaggccccaacgactctggtatactgaatcccaaaagagagatggtgtactgtgttggtcaggtggaacactgctcaagttttggctgcactaggaatctgaagcaggagaatcacagttctgctctagggtgcttcactgatcccgtagaggttacagagacaatgatgtcacatagatgggttaagaccaaaatgcaaatagcgctaatacagggaataagtgccaggagagagatatctatagataaacgcaatgaggatttaaacagttaaaggtcatgtgagggtggaaaggtagaggtggagtttgattggggctttggaggaaaaataatttcagaagtcagaaattcatctaagagtcttcaaattcctgtgctgtcttacgaaataagtagtttggttgagcatgtrtctgaagaggaagagtgagaagtaaagtttaaaggtagataggggcttggatcacattgtggatggccttgactaccaggagattttaacttattccacaggcaaggagaaaccatttaaggtttttaaaaaggagtaacataattggagttgcatttcagggcttgtctctttcaggaatgtgctcttttctcacagatatttatttgcgtggcacactctctctcctatttcaggcctttacacaaataccaccttctttgtgaggctttcccagacctccagtgtaaaattataaccccatcccagcactccctgtcctccttcattattttatttaatagcacttacctcaatctaatatacatgttttgccaatttatttttattgttctcttcctactygaacaatagaagagaattttgtctgttttacgaactgctgtatccacagcacttagaacagtgctgggcatgttgttagttctcaataaatatttcttgaataaaggactgaatatggcaaggatgtaaagtagacattaacctgtagagactgaagttaagcasaccamttaaggagctcctgctggaatcaaaataagaggtgtgtatagccattatagaaaacastatggagattcctcaaaaaattraaaagagaactaccatatgatccattgatcccactactgggtatatatccaaaggaaatgaaatcattatgttgaaragatatttgtactcccaagcttactgcagcactattcataatagctaagatagggaatcaacccaagtgtctatcagcagatgaataaagaaaatatggcacatatatacagtagagtactgttcagccataaaaaatgaaatcctgtcatttgtgacatggacaaacttgtaggaaattgttaagtgaaataagccagacacagaaagacaaataccacatgatctaactcatatgtggaatctaaaaaagttaatatcatagaagtagagagtagaatagtggttaccagaagctgggaagggcagtgggtaggaggaatggggagaggttggtcaaagggtacaaaattacagttagatgccaggtgcagtggctcacgcctgcaatcccagtactttgggagactgaggtgggtggatcacttgaggtcaggagttcgagaccagcctggccaacatggtgaaaccctctcttaaaaaaaaaaaatttacagttaaataagaggaataaattctggtgtcttattacacaatagggtgactagagttaataatgtgttgtatgtttcaacatagctagaatgaaggattttcaatgttcttaccacaaagaaacaataaatatttaagatgacagatatcctaattaccctgatttgatcattacacaatgtatacatgtatcaaaacatcacattgtaccccattaatatgtataattattatgtgccaattaaaattaataaaacctttttaaaaagatgaggcatgataagggcctgaatgaaccagggagatgataccagtattaagataaggagggggcactggcacatgattagatatgggagtaaggttaatgggaatcaaagatggctgtaagggtccaagcctgagaaactgtagcgtaatgattgaaggatgggtctatgtgtgagacactgccagctgatcaaggacaatgactaagactgaactactacataatttaaagtctagcaaggttgaggaaaggttgtgttttgcttttatttgggcaggagagggatgggggaaagctagaatgagctctgtggaatcaaagttatcagcatgaactcatggtttttaatatttatatagatggacagaaacaaatacatatagatgtatgtatatatagatgtatgtgttagtaagcctacatatacctcctagctgtattgactgagagggtctagaagtagtggtgggactcccccagcagcaatgaacacagctggcacccagaatttggtttctcaatgccattcttcaataaaagtgaccgaggctccttggaaaagggtatttcagggctggggcaaaaaataaacaagatgagttttaacaaatcttttggcttccctgggccacattggaaaaataattgtcttgggttacatgtaaaatacactaacactaacgacagctgatgagctaaaacacacacacacgcgcacacacacacgcacacatacacacacccctcataatgttttaagaaagtttacgaatggccaggtgtggtggctcatgcctgtaatcccagcactttgggagccctaggcgggtggattgcttgaggtcaggagttcaagaccagcctgaccaacatggcgaaaccctgtctctactaaaaatacaaaaaattagccgggtgtggtggcgggcgcctataatcccagctactccggaggctgaggcaggagaatcgcttgaacctgggaggcggaggttgcagtaagccgagattgcgcctccagcctgggcaacacagcgagactccgtctcaaaaaaaaaaaaaaaagtttatgaatttgtgttgggcctcattcagagctgtcctgggccacatgcaagagttggacaaatttggtttaaaacatcttgtggctgtgcatggtggctcatgcctgtaatcccagcacttcggaaggccaaggcaggcggattgcctgagcccaggagttcgagactagcctgggcaacatggtgataccccatctctacagaaaatagaaaagaaatacaaaaactagccaggcatagtaatgtgtgcctgtagtctcagctacttgggaggctgaggtgggaggattccttgtgcctgggaggcagaggttgcagtgagccgagatcatgtcactgcactccagcctgggcgacagagccagactgtgtctcagcgaaacaaaatgaaacaaaaaaatcctgaatcaaaatgtaaggacataatagcgatgcgggcttgacaaaaggacacaggaactaacatgaaggagatgtcaaagccaaagctgataaaatttgagcaggaaaatgatagtattggattataactcatagagtaaaataaatatccctgagcccatactatttaattgaataaatagattgagaaggaatgacggaaatagaaaaccaccattttgcaaacatcacagtcatagttgttgcaggcaaggaccatcaacagatgctaaaattagtgggagaaagagtgatgggaagcaggatatctttccataaggtacttacaaattacaaaagagaaaatagtgattttacagtggagaaatctgaactacacctttaccaaatggtcagttaatatcatcagcagtaagacacatcaacatcatgtacccactgagcaagggacatcacttctgtgattttcttgccaaaaatgcataaaccaagtctaatgatgagaaaacatcagactgtccaaaatgagagacattctgcaaaaataactgaccaatattattcctaaatgtcaaggacatagaaggcagagaaagattaaggaactaacacagattggaggagactaaggacacataactaaatgcaatatgggatcctggaccagaaagcaaactttcattagtgggaaaattggtgaaattcaaataaggtttgtagataagttcatagtattgtttcagtgttaatttcctagctctgatacttgtagtatggtttgtgatatgttaacattaagagaatctaggtgaaggaggttatctgtaccatttttgcaacttttctgtaaatataaaaaattaactcaaaatgttttttaaaatgagagattaaaatgaaattattggctgggcagtgtggctcacgcctgtaatcccagcactttgggaggccgaggtgggcggatcacctgagatcaggagtcggagaccagcctgaccaatatggtgaaacgccgtctctactaaaaatacaaaaatgggccgggcacggtggctcacgcctgtaatcccagcactttgggaggccgaggcaggaggatcacttgaggtcaggagttcgagaccagcctgaccaacatggtgaaacccagtctctactaaaaatacaaaaactagccaggcatagtggtgggcgcctgtagtcccagctactcaggagtctaagacaggagaattgcttgaacccgggaggtggaggttgcagagagccgagatcatgccactgcactccagcctgggcgacagagcgagattccgtctcaaaacaaacaaacaaaaaatgagattatttatggaaaatataagcgatgttgaaaggaaaaaagggaaggaacaagaagtgatttgttgactgatttgggaggaggggtggttgggtaaaactttatgatcatgtatattcaaaaataacatttttgtggtagctggaaaaatgtgcattaactataatggggaggtctggaagagtagctggttttgtggaagataaatattttttgctacttttaattatgcaaaaatttcaaacttgtgggtagttaggataaaatagtgctcagacatgagtttgacatgtaatgagccacctttcatcccaccagatttgatgtcccagagatgagacatagtgtcaagagctcccactcctaaaccaagctgcatcacgcttcgtgtaaatatgaaggtcttgtatgttcaagccaaatttgagtttattgtgtgtgtttgaggactgaggcaagccatactagaggataggaaatttgtagaaaacttgagaaactgaaaataatgcccaaattaaatagaaaaactattttgatacttgataatatatatttttaaatttgtaggtaccaaagataatactaagagatgtaatctcagagaaaaaatttccaaatacatggacagagcggaaaacataaagaagtacttggaccaagaaaaagaaggtaaagaggttgttttagaaaatgcatccataaacaactgtgactgtccattcacccaatgtttctggctcctgccctttggagctctgtgtggtctggaccagttgtccctgggagcttacaggatttaatctgtatttccactcccatacaggagttgttcttaattttttgtttgtttgtttgttttggcttttgtttttagttgggggtgggaatatcagacacccctttgaacatctcatgaaagctatacttactggagaatgttccatgccatttttaaggggttcacaaatccctatgaagcttatgtgtggaccctatgttaagaaatactacagggaatactgaatgtaaattgtgtattttatttatatttccctttatgaaatgaccaaaatcatgaaagaagctaaagaaactcctgggatttctctcagattttgttgtgaatcaaaacacctcaggagttaagcattcctaatgattagaggtcaggtaggtattgttccctattattagttccctactcctaagcatccagtttacaaatgtctgtaaatggccatttccacccttacctgagtgcatacttgctgctttctatagccaaaggtactgctgccctcaaaagccagtgcccccaggccccagcttttcttcctctctatactttctacacccctttccccatctcttcctactatcctgtatcagtacataccctggggaccccccactgagctcctttgttcagtgggaataaagttatgtttccttagccccgatttgaaatttagaatgaaattttactccaaaacattgatgaaatatagtacctccagcattgtggttttgagtacatggaattaaattaacctctatacggctatcttggcttaaaaaataaggcatagttgccaatgttatctatgtggaaatatttggaacagaatccaaactactgatttttaaacaaagtgtaaagtataatttaggggctaccattagggtttttttttttttttttagacggagtctcgctgtgtcgcccaggctggagtgcagtggcgcgatctctgcttactgcaacctctgcctgctgggttcaagcaattcttctgtcccagcctcccgagtagctgggactacaggcacccgccgccaagcctggctcatttttgtatttttagtagagttgaggttttgccatattggtcaggctggtctctaactcctgacctcaggtgatcctcccgcctcagcctcccaaagtgctgggattacaagtgtgagccaccatgcccagccaggggtcatatttttttaaaaccttaaaggtttctgataactttttcaatattcattttgaatgaacaaaagcaatagatctatcctcttgatcctgtgacatcccagtctttagcttattaagaagtactataaatttctgtttaaaactgtacacgtgccaagaaagactttgaagcttcatattatactgcattaatttttttttttttttttaaggcagagtcttgctctgttgcccaggctggagtgcggtggcatgatctcagctcactgcaacatccacctgggttcaagtgattctcctgcctcagccccccaggtagttgggactacaggcacctgacatcatgcctggctactttttatatttttagtagagctggggtttcaccatgttggccaggctggtctcgaactcctgacctcaaatgatctacctaccttggcctcccaaaatgctgggattacaggcgtgagccaccgcgctctgccctgcattcatgtttaatactcactttagttattagattgcaagacataaaaagacaagtctgaagaggaggaccagatagccactgagtttcagtatgtggtgctacccatggcgacagggagttattggatacctttatatatacactactcccttcaacaaactgcctggtctataggatcttgctcaaggacctgttccaggaaacctctagattttcccccttgcctagcctctgtgaaggcagaaatcactaatggagtggtttgccttaaatacctttgtacgtgtaacatcctgcaatgtatatgatatttagtaggcattcaataagtatttgctgaataagttaaaaaaattaatatgtatctgatgctgattaatcactctatataaaatataaaatgtgtaaaaaaaaaatggtcactggttttactgttgaagcctgtgttttatagatggaaaatatcacaagcaaattaaaatagaagagaatgcaacaggtttcagttatgagtcactttttcgcgaataccttaatgagacagttacagaagtttggatagaagatccttatattagacatactcatcaggtatgtgaacatactaaaatataatgaaatatcatattcaatgtactaaattagtaataatccattctaatgtcttttagctgtataactttcttcgattttgtgagatgcttattaagagaccatgtaaagtaaaaactattcaccttctcacctctctggatgaagtaggtacctgaaagcacttactctttcttattaactttattcagttacaagatgtagtccagtcaaggagaacacagatgcagtgcttcagctagatttgtttccttgggaattaacttattatctaacagtatgcataacatgtcataaaaaaagttattgattttaggatgctgattttgtatttggccactttgctaaatgcacttattcaaatagtttgttagtttagtctcttggatattctaggaggcaatcacactgtctgcactatgaacaattttgtttctttaccaattattatatctgggggatggtagcatgatatgatatggtagtgggcatctctatcttggttttgacttaaaataagaatgcttctaaataattatgatttctacgattgatttcaaaagcagtcagctccacctggatgattaaaactattctaaactacatttaaggagacaggatggagttatgttcacattagaaaaaaagatgattttgataaaaataattgctctttaaactacctcacattggttgtttttttgagataatagacattgaaactagtatagaacatttccatcttaatccacctgtgatatagattgtatagcttagggataatttaagatagtaataataactgcggcagataatcgtatttttgctattaacagggcattgagcaagtgcagcaaagtagaggcctgcaagaaatagaagagtcactcaggagtcacggagtgctgttggaagttcaatactcttcttcaatacatgaccgagaaattaggttagtctacaataatgttttaatttttatgcagttgatatatacttaaaatttttgtaaatgttttatataattgcctataaatatttaataatttataaatatttaaaattcaaataaaactccatttagtactttttcacttttgagaagaaaaaaaacacttggctttctttttgacaaagtaagccaagtgttttgtgtgtgagtttaatatttcctaatggaatagtatttacatgttctgtgtcatatagaaaaagagaacacttttctgtctactcaactgtatatatagtgttatgatattaggataatttattttctagtgaacttaatatttacttaatgtggctttacttcttaggggttattaaatattctagtaggcatgacaatttgctgagtctataagaaaacagaatatgcagttattttagtgatatcttccttttgtttagcacagtggttatgtttatagcaagggcactcagttttaataaaaacttaatcacaaactaaatatgcaaaacagatgaaaatgcagctgctgtagttaaagcagaggtcagggtccagggctcctcctgcacattccccatctctaggtaggggaactcttgaaacaccaccagtttccctgaatacactttgccaccacttgttagcagaacacgaaaaagttttatcaacaagctgaaattcaagattaaactatcagataattaaatcaactgattgtttctatgactgttttcattgtggacacagctcataatgaaccccaggtttgattcaactcatgccactggaggaagtggtttgctttgttagggggaaattttgctgacacttaatacactacagctttattaatagtctgacttaaatgtcttgaatataatactatatactaatttcaacaggttcaacaatggatggatgattaagattggaaggggacttgattattttaagaaaccacaggtaggatataatcttatgagtaaatgtgtagcactgtttttgtatcatttttaatgatactcttttcttctcttcttagagtcgtttttcccttggatattgtgattttgatttaagaccatgtcatgaaacaacagtagacatttttcataagaagcatacaaaaaatatatgatgggtggtagcctaatttgtattatgtctactttaagtgaatattggattttttttaaaagatcacttttataatgtatgaatttaacaataaacttttatatttctactaatttatggatccatcattcagttgtgggaacaatcctaaatatttttgtaaatatattactcagcagatttacaatgtttctttcaagtaatacagctaatttaaacattttaccagcttctctgttacttggctgcgggagcatgtcaacaaataataagcatctattaggaagatgaattagatcttaattttgcctgtgggagttttaagtccaggagggaaagacaccatggattagagtgcttttaaagagacagatggagcttgggcaacctgtatcagaaaaaaaaaaaaaaaaaaaaaaaaaaaaaaaattagccgggcatggtggcatgtgcctatagtcctagctacttgggaggctgaggtggaaggatcacttgagcctaggaggttgaggctgcagtgagctgagactgcaccactgcactctagcctgggtgacagagccagaccctgtctcaaaagaaaaaaaagagacagatgggcttggggtctaataaacaggaaagtaaaatgttaattttgttacaattaagagaattgtctttggtaaacatttaccatcatgcagttgtgcagtattacctaactccatgaaggcaaatcaacccattcagttatccaaatgcattttgcagctcattcactttggctggcacatttgtaaagccttgcagcttagaatcaactgttctgggtaagcttttcatccagatgccagttgtgtggttggagacagaatagattccatggagacaggctgaagaggggttgtatgctagaggtagtgggcggtccacagctcaaagaacatgctggctgggcacagtggctcacgcctgtaatcccagcactttgggaggcaaaggcaggcggatcacctgaggtcaggagtttgagaccagcgtggccaacatggagaaaccccgtctttattaaaaatacaaaattagccagccgtggtggcgcatgcctgtaattccagctacttgggaggctgaggcaggagaattgcttgaaccctggaggtggaggctgcggtgagcggagatcatgccattgcactccagcctgggcaacaagagtaaaactccatctcaaaataaaaaaagaaacaaataaaaaaacccagctaagctaacatatgtaagaggaaaactatagtaccagtgttcagtattggagagtgcacatataaatgtcacatctgaggactattcaacagagttaaaacagtgtagaggaccaaaggtagagaccatgggaacaaggttggacagagtggtcttgggcaagccttggacactgttttccttttgtgggacagctggtaggtacaagatggagctggcataaaaggccaggaagggcttccagaacagttcctgatttttttttaaatcttttcaggttcaggtgctgataatactgaatctgaaaaattttagactcaaactaatttactaagctgtatcatatggaaattcagggtctcaggaaaacacttgaacaagtgttggcctgatccgaagttcctttctgcagagtatctttgcttatcttgcccagtaccmgatgccacgtggaaatggagtggctcttaattaaggtaagaacatgtgttaggcctctttaccttcatgttaaaataacaattctgatttctaaagcatatgaatcgttactatggagaattagcaatccacaaccctgtgcaattaacttttatccaacttctataaaaatcctggctaagacatagtgatatttaaagaaaagagtctacagacatgctatccattctagatatttggagttctatccccagatctaattagagcaccagaagcctaccaggtacagcttaaatatatcaagaaatgtgttaagaactatatgaacaactataagctttatggagggacataaaagaaaattagggtaactagaaagacaaattgtattcctgaatgggaagacttaatgtcagttctctctaacttaatttataaattaaatgacaaaagagagtaacaccaggagacttgcttgaccagctataaagacatagctacaataattttcttaaaaatgtatgggcataggcatgggcaaataaatcagtgggatagaataaaagagtccagaaacacatttgaaagagagaaattgtgtatgaatgagtatttaatatgtaataaaggtgacattttaagttagtggagaaagagctcaacaaatggttggaaaaaataacattaaggcctctgtcttactccgcataaagaaatttttctgtaatgatgttgacaccatataaagaaatctaaacgtattacagagctaattaatgaaaaatttatatatatatatatatatatatatatatttaaaaccccacttaatgaactgagtataacagaaagccccagaactcttaagagcaaaagacttggtcatgtaaatatacaaaacttgagtaaaaggaaacataagctaagttaaaaaaatgagagatcaaatttataaaattagagtcagtattcctaatatataaggatgatggccagatttttagcagtgaccttgatctgacctcctttagcctccacaaggacttgggccttagagcaatctctcctgctgtactgcatcattcctattagtacacacatctcgagccagatgccaccctattttttcattcttcatgaaaaatttcttcaaagagtgttctctgtatgtttttttttttttttttcttatttcctcaccacctatttgctttaactcacttcagtctggcgactgccccaggtactccactgaaatcgtttttgctaaggtcaacagtgatctctgtactaccatattcaatgggcacttttaaactctcgtactatgtgacctttcagaagcatttgacccagttggctactcccttcttgaaactcttgactttcatgaaacacactctcttcctccattcttcttacattttaaataccgaagttctcccaagctaggtactaggtagtaacctcttttttttttttttaattcacactctttccctaagtgattacatggttaagtgttcttagtaaaaaacaacaaaaactgctcctacctgatataagcaaaaaaggggtttattataagaatagtaggtagttgagctatagactgagacacagaggttttggagtgaaaaatcacatctagaatcactacccagaactaatcagatgacacccctgctgacactgatgcaagggctggatgcagtagcctacaccactgatatcactggcttggaaactatcacgctagcctcactgccttcattaccccagaaattcaggcccctgtcgctacttccagagaagggttctcatcattccagatgttctgcatcactagtgtctaattcaaaatatggagcagttgcatctgattggcacagcttaagtcatgtgcccacatctgagcttcaaggaaggccagcaaagagtatagtaaacttttgtttccatagaaggaagtaggctctacctcctaccaggtggagaagtccgcaaacatataaggggacccagatgctgaatatttaatagtttaaaatttaaactttagatgaattataaaagtctaaaattattcattctcatgacttaaaatactatttatatgcggtcagccctcaaatttataaattaagccaagacttctccttggagttattcaactgcctgtatgacatctcagaagcacacaaacatttcaaatataatacaccccaacctaacttttgatatacactgccctactccccatgtatactcccatccatccaatctcataagaaatctaggagtaaaggccaggtgcagtggctcacacctgtaatctcaggactctgggaggctgaggcaggcagatcacctgaggtcaggagttcaagaacagcctggccaacatagtgaaacctgtctgcactcaaaatacaaaaattagccaggcgtggtggtgcaagcctgtagttccagctacttgggaggctgagacaggaagatcacttgaacccactaggcagcagttgcagtgagctgagatcatacctctgtattccagcctaggtgacagaatgagactctgtctcaaaaaaataagactatatatatatgtgtgtgtgtgtgtgtgtgtgtgtgtgtgtgtgtgtgtgtgtatgccattttgactcctctctcatccccatatgcaaacattcagaaagttctggggaaaccactgcaaaacataccttgagtccatatgtttcaggggttacttggtcaaatttccaatttggaactcgaagcccttaacaccctttgcctgatgatatcctctctctggagaaacatggtattactgcaccaaagcacatcatatcaggatttttaacctttctcaaaaaataattttcataggtggtaacaagtgtgaaatgttcatgagtaatctcttcaaagttgtgtttacttggtatttaatattgcttttaaataacaaaaggacctgcccattaaacctgctaaactgccaatcatgtttgtcccaagaacaccttgaaaaataaaatcactcaccctacccccagtctgagataatcaattgtaggcaaaaccctgtgtccatgcctgctcttcctaaaaataaataaaaggatggggcctggaactactgagatatattaaaagaaaataactcataaacagagggagctgggcatggtgttgagcatctgtagttccagctactccagaacctgaggcaacaggatcacttgagcccagttcaaggctgtagtgacctatgagcatgccactgcactccagcctgggtgagggtaagaccctgtcttgaaagaagagaaagggagtggagaggggaggaggggggccatgggggctggagggactcatttctgaaggcctcaactctcaccaaattatgaatcaaggtttgtgacaaggtaagagtagtgaaattctgagcttgagaagagtggaaacattccccttaagaatgaggggaactcaaccagagatgaattaaatctgacaccagcagaaagatacataagttgaaaattataaatatcaaattgggctaatcttcaatgattatatgatctttccccccagcatcacctgccaaaaagagtagaaaatcaattgtttagactaaaattaaaaagtggctatggtagaaggtcaaaggagagaagcaaatgagaatactggtaagaaagtaaagcataaagtaaatttcaggctgggatagaagggaaatgatgcaaggagagattagggaagggttaagagcttagaaaagtgcaacagccttgatttttagtgggagagtagaaagataagaaaatataactaaaagggagaattttagagtttgagatatgaggagaggtggcaagaaatctgggttatatctccgagagataagaaaaacagagaactaagtctgaggtcagagtgtccaatattatatatagccccaagagagtaaaagcagcagcagctgaaatataaatacatgccaggtattaaaatcaatgaacagacagggcatggtggctcacacctgtaatcccagcactttgggaggctgaggtcggcggatcacttgaggccaagagtttgagaccagcctggccaacacagtgaaaccctgtctctaytaaaaatagaaaaaattagctgggcatggtgacaaaaccctgtagtcccactactcgggaggctgaggcatgaggatcacttgaactcaggaggtaaaggttgcagtgggccaagatcgcaccactgcactccagcctgggtgagagtgagtctctgtctcaaaataaataaatgaaataaataaaataaaataaatgaaggaagaaagagaagaaagaggatcctagaggtcagaagaaatacacagatagggataggtg

SEQ ID NO: 95769 - DNA, 50258 bp, Homo sapiens
  misc_feature (1)...(50258): n = A,T,C or G
ccggctgaccttgaactcctggcctcaagcgattcttctgcctgggcctccgaagtgctgagattacaggcctgacccacgtgctggccactttttacccattttataaatgggaaaattgaggttcagaagttaagaaatggccaggcgcggcggctcacgcctgtaatcctagcactttgggaagccaaggagggtggatcatttgaggtcaggagtttgagaccagcttggtcaaaatggtgaaacaccatctctactaaaaacacaaaaattagccgggtgtggtggcacacacctgtagtcccagctacttgggaggctgaggcaggagaatcactagaacctgggaggcagaagttgcagtgagccaagatcacaccactgcactccagcccgggcaacacagcgagactccgtctcaaaaaaaaaaaaaaaaaaaaaaagagttgagaaatgtttccacatttatggagtaatagttaataagtggcagaactgggattatgaacctaaatctgtctgactccagagcctgagccctggttgcacaggagcaaaggaatgggaaacataggaggataggggcttgtggtaatatatctaggattctgagtgagatttagatagacccagaggaaaggagatgagagggtttctaagggaaacaatcagaggtgagggaatgtaacctttcaggagaccagagcagcaaatgtatggggggaggaagagtaggaaatccgactgggtaggcatattggcagtctcagtcggtctatggagtgtagactagatgtagtaaaaggaaactgggagccactgagggggtagtttacggtgtggagatatgataaaaagtagtctttaaaattcatcaggcagatgaaaagcaaggagggtcactgagaagatctctgcactgaaatacttttgtcttcctttgttccttccttgtcctggtagccacagatgttacacaatccaaccatggcactcaggacagaagacattgcccattctttagctataaattacattcccagggcccaaacctacacagttgtattttcaagaatcaataaaagtctctgcagattgactagtggcaggaaaccagggctggacacttaatgattgttcagactcctgtcgctacccctgcacagaaggttgtcagaagcagaatcttgtcacaggttcttgggcacaaagggggcagattacacaaaccaacatcaggcagttcaacaagatcgccatagtgtgaacccccatcagtgttattcctcggcaactgcccctgaactaacttggaaaatacccaaggagaacaaggtatcttagatgaggacgatgtcagttctttcttgatctcagtaagtcaaagtaaatttatacctaaatagctgttttccagatttcagtgtcttccagccacacatattttctttttcttttttcttttctttttttctttttgagacggagtctcgttctgttgcccaggctgaagtgcagtggtgtgatcttggctcactgcgacctctgcctcctgggttcaagcaattctcctgcctaagcctccctagtagctgggactacaggtgcatgccaccacgcccagctaattttttgtatttttagtagggacagggtttcaccatgttagtcaggctggtcttgatctcctgacctcgtgatccgcctgcctcggcctcccaaagtgctgggattacaggcgtgagccactgtgcccggcccagccacacattattttcaaattaataaataagttaaaattgctggcatgcagtcatcttagcgaaactgaagagtcaaaatgaatagctagaattctctgggtgatgaccagaacatataccatgctgagtcccgatgtggccgaaggacaccgtgagctgagccagctagctagcttggttgtggtgtgctgggaatgagggttatgttatctgtgaaagagaatacaaattctgcaaagtaaacctggcagtttggggaaaatgtgtttaactcacccactcccctcctcgtttgtactattgctttcctacactttttttttttttttttttttgagacagagtcttactctgtcacccaggttggagtgcagtggtgcaatctcagctcactgcaacctctgcctcctgggttcaagcaattctccgccacagcctcccaagtagctgggattacaggtgcatgctgccacacccggctaatttttgtatttttagtagagatggggtttcaccatgttggccaggctggtctcgaactcctgacctcacgtgatccgcccaccttggcctcccaaagtgctgggattacaggtgtgagccaccgcgctggccaactttcctacttttcaatttgagtttactcaggggttggaacatttattccaacaaaatgtgcctgatgtaacctctcagtgattaagcacgcctgcttagtatgcatcaacttcagcgcagtatgtgcacctctctgaggacatctctactaagccctcagtgactgatgctgcttcactttcttcaggtgtataaattgaaaaggcaatttttacctgctatgaagtcccaagaaaacgggacttggctccttgggcatattagcctttagtcttgttagtgatgatcagatgttgcttgagcatatttggaaaataactttgtatgttgaaattttgggaaatcaaagtattatactgcaaatcacttgaaagagggcaaataccaaatggtaaagcttagccagatgtgatataatcatttcactgaagatatgagataggtaaaatttttttcttataggtaatgaacacatttgattgtaatttgagttaaagtattatagtcccttttaaaaaaaaagcccagaatgttaaaagtgtgaactccatttcagcaagttgaaaacatttgagtgtttaagatattatcacaggtctgcgtattccaggttcaacttactaggaattctggattctaagtattttaaattgaagttaaagtgaaatcaagtgtaaattaatctgtgatttttttttcgttctggttatttttaggtaaataaatgaggtcaggatgtgagactggcgaataatatatgctgagataacccattactgtgattgaattccaggaggaaattgaagaggggtgatgacgcaaaggtgaatacagacaacatgaaaacggctaatacatgttgggaaactttttttttcatttctttttctttttcttttttttttttttttgagacggagttttgctcttgttgcccaggctggagtgcaatggcacgatcttggctcactgcaacctccgcctccccaggttcaagggattctcctgcctcagcctcccaagtagctgggattacaggcacctgccaccacgcccagctattttttttcttttttttttttttagtacagacggggtttcaccatgttggctaggctggtctggaactcctgacctcagtcgacccacctgcctcggcctcccaaagtgctgggattacaggcgtgagccaccgtgcccagcccaagtgaaaaactctttaccacaattaataggtgagttcattagggatgatagcacacccttcagaaaccgtatttactacagatctcccacaactatcacactcaatactaactaaaaggccagaggattggattcatataacttttttaaaagtacacatatattttataaatataaggatattatttgcactagcaatttatctgtattcctaaagtgtcatacaaatgattcttgcaaatctgttttaactagggagaaaacaatgtattgagatagttggactagacctatctaccactaacactaaacttggaagaaaagatccaagagttcatagcttaattctaaaccatctatgcttctcacttgaaaacagagaagggctgatgtaaatgagttgtgagggtatctgactaccttaaaagcagaatatttgaaggttttagccctggaaggattcctaggtgagaaggcggcacctatttcatattctacttttggttgcctcctggcttttgttttgtgacctcaaccagactccttgtgtaggttacaatttatttgtggatgtgaacccgggctccttttgtaggttatagtttatttgtgggtgtgaacccccttcctttgcctggttcaatttcttcagtggtttaggaaagacacccctccaagcagtggcctgttttaaatccgtaggcctctcttcctaccactcacttcttggcccaaccccccttcacattcctctgcttgggaagatattggggcaaaaaaggcctcatacattttttattaagaaaccattttctctctaggatgggcacaaggtgcagggctatttccttacattagaaggtattttaaaacctgggctggagacgccatgctgtaaatttaaaataaaaaaaaaatgtaagccgaaccttctttttaaccttaagaatagtcttcactattctccaccaccttcccaccggctgtgtagaaataacgaccaccaaatgagaataggctatttactcagagctggcaagagtcagccgcgacccatcacttgatttaacagactcataggcaggcaggggagtggaaaagctttacatatactgaaaaaagggagaaacttcaggttggctctgattggaggatgttggcatcgggaagttggaggagggctatactagaagcagggcttcttacgcgattggtgtgaggagcacatttggctttctctgattggcccagagctggaagcaggggcaagaaatagggaagctgccggttaaagattaagtcctgacccttctggccgattactgaagaggttatgggtaggaggtcatggttaggtttggccattctttgtatattcagtctctcaattgggtgaggattagattttgtttctcttgacctagctagcttttagctccaaagttttgtttaacttggaagaagacagcagttctattatttctgtcaaggataaacacagacattgggatctgaaaagtattatgggaacatacataaatatcttcatagtgagggtcaggccggagagtcaccctttgccttaagcttctccatttccttactgaattcctatttctattataactgacgcttcactagcttccctccctttagtggagggcccggcctcctccgcccctactttcttcagtcttgcccttcgagggcaggagaagacggttgcgccctactaactcttcaccttacagtccagcttctccccccaccaccccggtgcgctctctcggtttgctaccctctccaccaggcctccccactccacctgcgcaacgcccccagctccgtgctctccggagtaatcccccctcagtcgcactctcacagcccggcccctgcccccgcctcacccccagttgtgccttcacctcccggttcctcctagacaggtcccccaagatacgccctcacagtccggtcccccgccgtcctctcccggcgcacgctcaagtccggtgccttccccccgcagacccccgaggcgcaccctcaagctcggtgcctctgcgccccccgcaggggcgccctcaagcctggtacccttcacatgagagccccccgggcgcaccctcaagctcggtgtacccccccataccacccgcaggcgcgccctcatgcccgaagacttcccccgcccaggtgcaccctcaagcccggtgccttcccccacaaccagcgcccccaggcgcaccctcaagcccggagcctacccgccgccaggcgcgccctacaggctcgccccgtcccaccgcgcagcgccccccgcgcactctctggagtcctccctcctgcctggtgcggcctccgggcccggtcggccccccttcctgcccccacactcagacgcgcgcccggcgtctccgggtcgctagttccgcgccttcctgcatggaggcgcgccccgagaggctcggacgcggccccttaggcccggcatcagcctccccggccagcwggagaagtcaggtcagcttcctgtccccgagcagctgcccgggggccagttttcaaaacatatccttagtcatgtaataaagagatgttcctctggtctcaactcccgatttttactttggaggggcgaaggcaggsctacccttgccagccaccatttctcaatcacgtcgcggctgtggaaaagcagccgtcctgtcccttcagaaaggaactcgtatttccccctcgaacttttctcgtcggtgtgagagaagggccctccattttctcctcaggaagctttcgcggcccggcttcctctcaccaccaagccaggaaggcagtgacgccgcggcgaatatagccgcggcggccgaggtttcgccatcttgagtggaggaggagccgcggtcgccgccatgcggagaggcagggaaagagggaggaggcggcgggcgggcgaacgggcgagcgagggagggggcagaggagccgagttagctcagccaggcggcgacttcggcggcgccacgagagcgggcagcggaggaggtagggctggacagccgggggagccggcggctcgggcggctggcctgcgcgcccctcggagcggggcgggggcgggggcgagaggaggccgtagcgagagggctgggtgggggcgggcggaggtttccgaggaggaaggagcgtccgccattttgggagcttcgagtcaacaataaaggaccgagggtgccgagcgggagtggcctcgttggtaggacacgggcccgagtcgcgaggcttggggtgaggtggtggggtcgaggtcagcggtgctttgggggctgtggggagcccccccgggccggctctgggggactctcgggcggaggcctaaggcctggccgggcctggggaggaaggcggtcggcagctgtgtggggtgggagcgcctgagaggaggcgaatataggaatgtggtgcgcagcagggtcggcaggaggaacaggctaagtactcggagtagctttatcgaagatgagggaatatgaggccgaagggggcggcaaggacttagggggatgatggtggaggttatagggtacgaggcggccctatagggggcggcagggacatgctgtattggagggctcggtttagaagcaaaccggccgctgcttgattgcagtaggccttgcgggtcaataacaagagggtatttatggagcccccgactcttggaggaaaggagggggatttctggtttagggggtccatttggggcctccttgggggagtccctattgtttgctactratggagcggttgctggctcatattgcgcagataagattgcagagccccaaccttttgtgtttatggtcagaagtgtgtgtgtttggggcgtggggcggggtgcggggggacaagaaatttccyttcagttacggggttccagtcattagtcaatgactctttcccgtatctctctcctttctcttcctcagcccccatttcccttcagaataaaacccagtcactccaacttgcaggcaaagctagaaaaactgcgctgcatttgcaaacaaaagctcttgttggcgatgacgatactgttttgggtgtgaaactgtcaattgctaactacgatctgtgaagtgctgtaattaactccgctaggggctcctcccaactagtctacgtttcttgttgtttgttttttgtttttttgttttttgtttttgaaaatgtagaaaacttgcaaatctaaattgggaaggggtaggaggaatatttccttctctgagaaaaagctgcagtgcaggtttcagtttaagaagggagcagttatcacatagtctcattttggatttaaggatataggaggtcttactgtgcatgatggacagtaatgatgatatcgttcggtctttagaggttgcccttttcatcctcttagtgctctgcaaacagctaagtctctgtgaactgcgtgatatcgctgatcataatataaaaccgtcaatacaggaaagtagctgttaaccatatctgcttaagaggtcagagtctgaagtaaacagctttgtgtatgtgataatcaggatttgcttgtgagcaacttgktcattttttttttaaggaaggcataatcaaggagcattttcttcataaatgttgagatctgttgactttaaaattttgagtttcacatgccttggtgtatggcagaaagaatcagcactcgtaagctagtgtattttatataagaaatgtaacggggttgctgggagcggtggctcacacctgtaatcccagcactttgggaggccaagacaggcggatcagctgaggtcaggagttcgatactagcctggccaacatggcaaaaccccgtctctactaaaaatagaaaaaatttagctgcgcgtggtggcaggcgcctgtaatcccagctactcgggaggctgagacrggggaatcgcttgaacccaggaggcggcggttgcagtgagccaagattgtgccactgcactccaacctgggcggcagagcgagactccgcctcaaaaaaaaaaaaaaaaaaagtgtaacggggttaaatcaaaagccaacagagtagggctttgttttcgtgtctttgtatgtttttattaactacaattaaaagtaagatttcagccgggcacggtggctctcgcctgtaatcctagcactttaggaggctaaggcgggcagatcatttgaggttaggagtccaagaccagcctggccaacttgataacaccccgtgtctactgaaaaatacagaaattagccagacctgtaatcccaccaagctacttgggaggctaaggcatgaggatcgcttgaacctgcgtggtggaggttgcagtgagctgagatcgggctactgcactccactctgggcaacagagtgagactctgtctcaaaaataataggccgggcgtggtggcttacgtctgtaatcccagcactttgggaggccgaggcgggcggatcacctgagctcagttgttcaagaccagcctggccaacatgtcgaaaccccgtctttactaaaaatacaaaaattagctgggcatggtggcgcatgcccgtaatcccagctactcaggaggctgaggcaggagaatggcgtgaacccaggaggcggagcttgcagtgagctgagagcgcgccattgcactccagcctgggtgacagtgcaagattctgtctcaaaaaatacaataaaaaataaaagtaagtaagatttccatttacgggataattttaaactgaggttgactagttttgtgggttttgtttgtttgtttgtttgtttgttttttaagcagagttttgctcttgttgcccaggctggagtacaatggcatgatctggactcactgcagcctccacctcctgggttcaagtgattctgctgcctcagcctcctaagtagctgagattacagggccaccacgcccagttaatttttgtattttagtggaacggagtttcaccgtgttggtcaggtggtcttgaactcctgacctcaggtgatccaccagtcttggcctcccaaagtgttgggattacaggcgtgagctaccgtgcccctcctaccagttcttttttttttttttaaactattaattagctttactactctggatttcttggaaagttttcttaaaattactagtgtgtttagtcttccgcggatttttttttaaacaggaattttcctgtttttttaaatttaaaattagaatagttattagctaagtttgttataaatgaataaaattattagagtcatcttggttttgtcaatttcaaaataaaaattcatttatacaaaatttgtgtatatcatccgtccttgggatcattacttgctggatgcattatggcagaaatacactattctcttgactgcttcatttattgttttaaaggacaaaaaggaaaaaagaaaatacatttttcttcttaaagttttttgttgttttttgagacaaggtctctgtcacctggctcactgcagcctccgtctgccaggttcaagcgattctcgtgcttcagcctcccaagtagctgggactccattacaggtgtgcaccaccatgcccggctaaattttgttttttgtttttttttttcttgtttgtttttgtttttgagacggagtctggctctgtcgctgaggctggagtgcagtggcacaatcttggctcactgcaacctccgcctcctgggttcaagcagttctctgcctcagccycccaagtagctggaattacaggcgctcgccaccacgcctggctaatttttgtatttttagtagagacagggtttcaccatcttggccaggctgatcctgaactcctgacctcatgatccaccttcctcggcctcctaaagtgctgggattacaggcatgagccactgcacccggcctaaattttgtatttttagtagagatggggtttcgctatgttgtccaggctggtctctaactcctgacctcaagagatcgcccgcattggcctctcaaagtgctgcgattacaggcctgagccaccagcacccagcccataaagtttaatagttgaaatttgtaagggcacaaaggtgtttttttctggaagtgtgaagttcaagtcaaaagctcacttaaatctataaggactctcggttgctattacaagtagaagaaaattaatgaattgtcttgtttaaattgtgtgatacttcagtgagttgtaatgcaattaagtataatgaatcactgacttttagagatgtcagagacttagagaattcatggggaggaaactgaagagaagagattatcattgacgagtagtgctaatttactagtctctttctacttaatctctggattgctttgaattaacaattttaaatgtttgatattggcctcattgtgtttttgagatagttcaaagttgtgtctatcctagcttggctcgtgatttggtctaagtgtagctgtattattaattctttaatataaaagatgakaattcttttaaagsggttcttttaaaagggaaacaaagtttttctgttgtgtttgctaatttaattttgtttgtttgtttcagattgacgtgagtgaattcagatataactcaagcttgttagagggctttttaaaaataaaaagttgattccgtgcaagagagcaagttactgctgcttaccgttcagagacttacaggtgcttgcctgcattgcaataaaggactcatttattgagcaagacttatatttatctcttcattttggagagcctaataaactgttattacagtttctctactgactttcaaaagttttgaagtttgaaagacctttgcaattaaaacagcatgagcacggccagaacagagaaccctgttataatgggtctgtccagtcaaaatggtcagctgagaggccctgtgaaacccactggtggccctggaggagggggcacacagacacagcaacagatgaaccagctgaaaaacaccaacacaatcaataatggcactcagcagcaagcacagagtrtgaccaccactattaagtaagtgttagagtaaattattaataaacacttgtggggaaccaagatttgtgttactttggtgttgactattaatacttatgccttaatttaaccattttgattccaaatagaggacagatgactttgttttatggccagtaggtatttgcaatagaataatatatttctgccataatttgttcagcaagtagtcatcctgaggtcagatgatacacacaaattttgtataaatggtttttggaaacatttctggctttcataattagtgtaaaagttattagcttagtttgttgtaaatgaataaaattattagtcatctcgtttttgtcagtatagtttttttacgactgcaccttaccctagttaaacagcagataaagccaactttatgtattaaatttaaagactcagtctgagtctttagagtctttaaagacttgcccagccttctgaactccaagcattattcactcagaaaattttctcgtaactttttttagcttatggaacttagcttttttactttaaaaaaaaaaaaaagttggctggttgaggtgactcatgcctgtaatccctgtactttggggaggccaatgtgggaggatcacttgagtccaggagtttgagaccagcctaggcaacataatgagactctgtctctacccmaaaaaaaaatttttaatttttttcctccttttacatataaaaagggaactaagaattttgaactcacagaacacagttctgaacagtctcagaaaccttttgttaaccttaaaattgaagagcctcctcttactagaggatattttttcttttaaagctgaaagtatgtaggctatttgttacttttaagtgcatagtttaaattacaatatttgaatggtaaccatcactttaaagattcagttataggaaattaacatttaagattcttgactccagttgatgtttggcttttgttaagaacttgccatatagggccgggtgcagtggcacacgcctgtagtccaagcacattgggaggccaaggtgggcggatcacctgaggtccggagttcgagaccagcctgacaaacatggagaaaccttgtctctactaaaaataaaccycgtctctactaaaagtacaaaattagctgggcgtggtggcacatgcccataatgctacttgggaggctgaggcaggagaatcacttaaacccgggaggcggagttgcagtgagccgagattgcaccattgcactccagcttgggcaacaagagcgaaactccatctcaaaaaaaaaaaaggccaggtgcggtagctcacgcctttaatcccagcactttgggaggctgaggcaggtagatcacgaggtcaaaagtttgaggccagcctgaccaacatggtgaaaccctgtctttactaaaaatasaaaaatcagctgggtgtgatggcatgcgcctgtaatcccagctactcaggaggctgaggcgggagaatcacttgaacccgagaggtggaggttgcagagagccaagatcgtgtcactgcactccagcctgggcaacagagaaatactccatctcaaaaaaaaaaaaaaacttgccatataaaataatttaaccctgggaatctttataagatgttgacactgggttactgaactgaggtatatgttttattacaacctagatcttttcacttcctacagaaaaatagcttatacaagctaccagactgtcatatagttaccgtatgtggttcactaggacctctaagaactaattttcagcagaattggttaggtcattgggagaattggtattagtgtatattctgttatttttaaggtgaatgctttaattggtatagaaatgaatactacttcagttgtagtttgtcttggcagaatgtaagtaggttagcaaaatttagactatttttaatttttttwawaactttttttttttttttttgagacagggtctcactttgttgcctaggctggagtatggtggcacgatcatggctcactgcagcctcaacttcccaggctcaagtgatcctcctgcctcagccctacaaatagtggggactactggcatgcaccagtagcgacggsgttttgtcatgttgcccaggctggtctggaactcctgagctcaagtgatctgcccacctcgacctctcacagtgctgggattacacatgtgagccactgcgcccagcctatttttaattttttttttttttgagatggactctcactcactctgttgcccaggctagagtgcaatggtgtgatctcgactcactgcaacctgcacctcctgggttcagttcaagccattctcctgcctctgcctcccaagtagctgggattacaggtgtccaccatcacgtctggctaatttttgtatttttagtagagatgagatttcatcatgtttgcaggctaggcttgaattcctgacctcaggtgatctgcctgcctcggcctcccagagtgctgggattacaggcgtgagccactgcacctggcctatgagaatattttctatttaaaaaattctggggctggatatgatggctcatgccgttcatcccatcactttgggaggctgaggtgggaagatcacttgaggccaggagtttgagactaacctgggcaacatagcaagaccctgtctctacaaataataaaggctgcagtgagctatgatcgcaccactgcactcaagcctgggtgacagggtaagaccccatctcaaagaaataaaaaataaattctgatttggggacaacagtggattttgatttttcttttctggttttcctacgattaatggtttcttttcagttctgcggttcttcaaatctcattttctctgccctctcttccatgaagtcctctagatcccatcaagtgtctcagaacacttctaatacttaacctccgtcactttctcattttaaatagttttttcatctcataagattataaatttcttgtggtcaggttttgcattgtatcttacgcattattattcactattttgttgaattcaacggtatgtcaaactgacatcagaaacttcgatgatacaggcttagatgaaaggctttagtaggccgggtgmggtggctcacgcctgtaatcccagcactttgggaggccaaggcaggaggatcacgaggtcaggagtttgagaccagctgaatccccgtctctactaaaaatacaaaaactagccaggtgtagtggcaagctcctgtaatcccagctgctctggaggctgaggcaggagaattgcttgaaccccgggaggtggaggttgcagtaagccgagatcatgccactgcactctagcctgggtgacatagcaagactccatctcagaaaaaaaaaaaaaggctttagtacagtagtagtcttggaattggtagcaaaaagttaccaatgttagagtatgcattatgtaggacctagttttaagtaaaataagtggtctttttgtctgtgaatggagcatttgagatgttttggggactctggttatgtaagaacagctgcagtgaaaactttttcgaagatgtcacagttaaatactttgtctgcagatgttccctgatcttttttttttttttaaagatgctttgagtatttattacttgaggtttttacctggccaaaaagagagtttatttatattctccttgtttttattctctttcatgatttctagcatttccaataaaaaagaaagattaagagatgctcattggctaatactgtgctattattttgccaggcactgtgctgagtgcattatatcaattgtttgatgtaactgttaacctattttgttttatttatttatttggracggagycttgctctgkcgcaggatcttggctcccgggttcaagcaattctcctgcctcagcctcttgagtagctgggattacaggcacatgccaccatgsctggctaatttttgtatttttggtagagagtgggtttcaccgtattggccaggctactctcgaactcctgacctcaggtgatccgcttgccttggcctcccaaagtgttgggattacaggtgtgcgcccaccttatttatttttgagacagagtctccctctgtcactcaggctggagtgcagtgtcgtgagcttggctcactgcagtgtccgcctcccaggttcaagtgattcccctgcctcagcctcccgagtagctgggactacagttgtgtcccaccatgcctggctaatttttgtattttcagtagaggtggggtttcaccatattggccaggctggtctcgaactcctgacctcaagtgatccgcccaccttggcctcccaaagtgctgggattactgatgtgagccaccacgcctggcctgttaacctattttaaaaatgagaatagmcggccatggtggctcacacctataatcctatcactttgggaggccgaggcaggtggatttcttgagcccaggagttatataagatatataaaatcttacagtttttaaatgttgagaactaatttaaactcatttaaattaaaacacatgctgtgtaggtcaaacaaaacaccttttgacaacagttacactgtatacaatattgcttaagaggatggatgccttaatcccttctgttcttgatttttttatcctcctgagattctctataagaacactttttctaaagttgyttaattatcttgttagatatattaaatggaatatattaaacttactgtgcttttttaacacttaattataattgagatgaatcatctttgttaggatgctatgaattttgatayttcaagtttactgtattctctctagacctggtgatgactggaaaaagactttaaaactccctccaaaggatctaagaatcaaaacttcggtaagttggttgtaaaataynagtagaataatggtggggaactagaagtgaggtatagctgtccctcggtatctggagggaattggtttcaggaccataacaccactgccaccctcctcctccaacccagtaagatagatattcaggctatatattcccattttgtggatgagaaaacaaatgctcagcagttagttctcttagcctattgttttcaaccgggagaatttttgtctcccgggggcatttagcaatttgtagaaacatttttgcttatcatcaataggggggaagctaaaggacagccctttacaacaaagaattttgtggcccaaagtgtcagtagtgctgagcttgagaaatttgacttagccaaagatatttgtagctcatgagtggtagaggtgggatttaacttcatatcttgtgatttgcaattcatggcatgatatttgtgtaaaaaaataacactattccaccagtccttaggagactgtgaccaagggccgggcacagtggctcttgcctgtattcccagcactttgggaggccgaggcaggcggatcacctgaggtcaggagttcaagaccagcctggccaacatgttgaaaccctgtctctactaaaaatacaaaaattagtcgggtgtggtggcgtgcgcctgtaatccagctgctcaggaggctgagacaggagaattacttgaacttgggaggcagaggttgcagtgagccgagatcacgccactgcactgcagcctgggtgacagagcgagactccatctctcgaagaaaaaaagaaggctatgaccaagtgctctttccccaaaacatagttttttaaaaagcttgtgtgtcaaagcagggacagtggtttttcttcaggaaaagttgaaatacagattaaaacaagtaatctgcatatatttatatttaagattgggcaggtaaagtactaaagtcagagaagttttctttccttttttttttttttttttttttttttttgagatagagtctggctctgtccccccaggctgtgcagtgagtgcgatctcacctcactgcaacctccgtctcctgggttcaagcgattctcctgcctcagcctcccaagtagctgcgactacaggcgtgcaccaccaccctggctaattttttgtatttttcgtggagttggagtttcaccatgttggctaggctggtcttgaacttctgacctcaggtgatctgcccgccttggcctcccaaagtgctgggattacaggcatgagccaccatgcctggcccagataaattttcttaaacacagataaatttaccaaaggacaccaaatttaccaacagggttatttattcttttattggtcctttttgtttgactaggatgtgacctccacaaaaggaaatgagtttgaagattactgtttgaaacgggagttactgatgggaatttttgaaatgggctgggaaaagnnnnnnnnnnnnnnnnnnnnnnnnnnnnnnnnnnnnnnnnnnnnnnnnnnnnnnnnnnnnnnnnnnnnnnnnnnnnnnnnnnnnnnnnnnnnnnnnnnnnnnnnnnnnnnnnnnnnnnnnnnnnnnnnnnnnnnnnnnnnnnnnnnnnnnnnnnnnnnnnnnnnnnnnnnnnnnnnnnnnnnnnnnnnnnnnnnnnnnnnnnnnnnnnnnnnnnnnnnnnnnnnnnnnnnnnnnnnnnnnnnnnnnnnnnnnnnnnnnnnnnnnnnnnnnnnnnnnnnnnnnnnnnnnnnnnnnnnnnnnnnnnnnnnnnnnnnnnnnnnnnnnnnnnnnnnnnnnnnnnnnnnnnnnnnnnnnnnnnnnnnnnnnnnnnnnnnnnnnnnnnnnnnnnnnnnnnnnnnnnnnnnnnnnnnnnnnnnnnnnnnnnnnnnnnnnnnnnnnnnnnnnnnnnnnnnnnnnnnnnnnnnnnnnnnnnnnnnnnnnnnnnnnnnnnnnnnnnnnnnnnnnnnnnnnnnnnnnnnnnnnnnnnnnnnnnnnnnnnnnnnnnnnnnnnnnnnnnnnnnnnnnnnnnnnnnnnnnnnnnnnnnnnnnnnnnnnnnnnnnnnnnnnnnnnnnnnnnnnnnnnnnnnnnnnnnnnnnnnnnnnnnnnnnnnnnnnnnnnnnnnnnnnnnnnnnnnnnnnnnnnnnnnnnnnnnnnnnnnnnnnnnnnnnnnnnnnnnnnnnnnnnnnnnnnnnnnnnnnnnnnnnnnnnnnnnnnnnnnnnnnnnnnnnnnnnnnnnnnnnnnnnnnnnnnnnnnnnnnnnnnnnnnnnnnnnnnnnnnnnnnnnnnnnnnnnnnnnnnnnnnnnnnnnnnnnnnnnnnnnnnnnnnnnnnnnnnnnnnnnnnnnnnnnnnnnnnnnnnnnnnnnnnnnnnnnnnnnnnnnnnnnnnnnnnnnnnnnnnnnnnnnnnnnnnnnnnnnnnnnnnnnnnnnnnnnnnnnnnnnnnnnnnnnnnnnnnnnnnnnnnnnnnnnnnnnnnnnnnnnnnnnnnnnnnnnnnnnnnnnnnnnnnnnnnnnnnnnnnnnnnnnnnnnnnnnnnnnnnnnnnnnnnnnnnnnnnnnnnnnnnnnnnnnnnnnnnnnnnnnnnnnnnnnnnnnnnnnnnnnnnnnnnnnnnnnnnnnnnnnnnnnnnnnnnnnnnnnnnnnnnnnnnnnnnnnnnnnnnnnnnnnnnnnnnnnnnnnnnnnnnnnnnnnnnnnnnnnnnnnnnnnnnnnnnnnnnnnnnnnnnnnnnnnnnnnnnnnnnnnnnnnnnnnnnnnnnnnnnnnnnnnnnnnnnnnnnnnnnnnnnnnnnnnnnnnnnnnnnnnnnnnnnnnnnnnnnnnnnnnnnnnnnnnnnnnnnnnnnnnnnnnnnnnnnnnnnnnnnnnnnnnnnnnnnnnnnnnnnnnnnnnnnnnnnnnnnnnnnnnnnnnnnnnnnnnnnnnnnnnnnnnnnnnnnnnnnnnnnnnnnnnnnnnnnnnnnnnnnnnnnnnnnnnnnnnnnnnnnnnnnnnnnnnnnnnnnnnnnnnnnnnnnnnnnnnnnnnnnnnnnnnnnnnnnnnnnnnnnnnnnnnnnnnnnnnnnnnnnnnnnnnnnnnnnnnnnnnnnnnnnnnnnnnnnnnnnnnnnnnnnnnnnnnnnnnnnnnnnnnnnnnnnnnnnnnnnnnnnnnnnnnnnnnnnnnnnnnnnnnnnnnnnnnnnnnnnnnnnnnnnnnnnnnnnnnnnnnnnnnnnnnnnnnnnnnnnnnnnnnnnnnnnnnnnnnnnnnnnnnnnnnnnnnnnnnnnnnnnnnnnnnnnnnnnnnnnnnnnnnnnnnnnnnnnnnnnnnnnnnnnnnnnnnnnnnnnnnnnnnnnnnnnnnnnnnnnnnnnnnnnnnnnnnnnnnnnnnnnnnnnnnnnnnnnnnnnnnnnnnnnnnnnnnnnnnnnnnnnnnnnnnnnnnnnnnnnnnnnnnnnnnnnnnnnnnnnnnnnnnnnnnnnnnnnnnnnnnnnnnnnnnnnnnnnnnnnnnnnnnnnnnnnnnnnnnnnnnnnnnnnnnnnnnnnnnnnnnnnnnnnnnnnnnnnnnnnnnnnnnnnnnnnnnnnnnnnnnnnnnnnnnnnnnnnnnnnnnnnnnnnnnnnnnnnnnnnnnnnnnnnnnnnnnnnnnnnnnnnnnnnnnnnnnnnnnnnnnnnnnnnnnnnnnnnnnnnnnnnnnnnnnnnnnnnnnnnnnnnnnnnnnnnnnnnnnnnnnnnnnnnnnnnnnnnnnnnnnnnnnnnnnnnnnnnnnnnnnnnnnnnnnnnnnnnnnnnnnnnnnnnnnnnnnnnnnnnnnnnnnnnnnnnnnnnnnnnnnnnnnnnnnnnnnnnnnnnnnnnnnnnnnnnnnnnnnnnnnnnnnnnnnnnnnnnnnnnnnnnnnnnnnnnnnnnnnnnnnnnnnnnnnnnnnnnnnnnnnnnnnnnnnnnnnnnnnnnnnnnnnnnnnnnnnnnnnnnnnnnnnnnnnnnnnnnnnnnnnnnnnnnnnnnnnnnnnnnnnnnnnnnnnnnnnnnnnnnnnnnnnnnnnnnnnnnnnnnnnnnnnnnnnnnnnnnnnnnnnnnnnnnnnnnnnnnnnnnnnnnnnnnnnnnnnnnnnnnnnnnnnnnnnnnnnnnnnnnnnnnnnnnnnnnnnnnnnnnnnnnnnnnnnnnnnnnnnnnnnnnnnnnnnnnnnnnnnnnnnnnnnnnnnnnnnnnnnnnnnnnnnnnnnnnnnnnnnnnnnnnnnnnnnnnnnnnnnnnnnnnnnnnnnnnnnnnnnnnnnnnnnnnnnnnnnnnnnnnnnnnnnnnnnnnnnnnnnnnnnnnnnnnnnnnnnnnnnnnnnnnnnnnnnnnnnnnnnnnnnnnnnnnnnnnnnnnnnnnnnnnnnnnnnnnnnnnnnnnnnnnnnnnnnnnnnnnnnnnnnnnnnnnnnnnnnnnnnnnnnnnnnnnnnnnnnnnnnnnnnnnnnnnnnnnnnnnnnnnnnnnnnnnnnnnnnnnnnnnnnnnnnnnnnnnnnnnnnnnnnnnnnnnnnnnnnnnnnnnnnnnnnnnnnnnnnnnnnnnnnnnnnnnnnnnnnnnnnnnnnnnnnnnnnnnnnnnnnnnnnnnnnnnnnnnnnnnnnnnnnnnnnnnnnnnnnnnnnnnnnnnnnnnnnnnnnnnnnnnnnnnnnnnnnnnnnnnnnnnnnnnnnnnnnnnnnnnnnnnnnnnnnnnnnnnnnnnnnnnnnnnnnnnnnnnnnnnnnnnnnnnnnnnnnnnnnnnnnnnnnnnnnnnnnnnnnnnnnnnnnnnnnnnnnnnnnnnnnnnnnnnnnnnnnnnnnnnnnnnnnnnnnnnnnnnnnnnnnnnnnnnnnnnnnnnnnnnnnnnnnnnnnnnnnnnnnnnnnnnnnnnnnnnnnnnnnnnnnnnnnnnnnnnnnnnnnnnnnnnnnnnnnnnnnnnnnnnnnnnnnnnnnnnnnnnnnnnnnnnnnnnnnnnnnnnnnnnnnnnnnnnnnnnnnnnnnnnnnnnnnnnnnnnnnnnnnnnnnnnnnnnnnnnnnnnnnnnnnnnnnnnnnnnnnnnnnnnnnnnnnnnnnnnnnnnnnnnnnnnnnnnnnnnnnnnnnnnnnnnnnnnnnnnnnnnnnnnnnnnnnnnnnnnnnnnnnnnnnnnnnnnnnnnnnnnnnnnnnnnnnnnnnnnnnnnnnnnnnnnnnnnnnnnnnnnnnnnnnnnnnnnnnnnnnnnnnnnnnnnnnnnnnnnnnnnnnnnnnnnnnnnnnnnnnnnnnnnnnnnnnnnnnnnnnnnnnnnnnnnnnnnnnnnnnnnnnnnnnnnnnnnnnnnnnnnnnnnnnnnnnnnnnnnnnnnnnnnnnnnnnnnnnnnnnnnnnnnnnnnnnnnnnnnnnnnnnnnnnnnnnnnnnnnnnnnnnnnnnnnnnnnnnnnnnnnnnnnnnnnnnnnnnnnnnnnnnnnnnnnnnnnnnnnnnnnnnnnnnnnnnnnnnnnnnnnnnnnnnnnnnnnnnnnnnnnnnnnnnnnnnnnnnnnnnnnnnnnnnnnnnnnnnnnnnnnnnnnnnnnnnnnnnnnnnnnnnnnnnnnnnnnnnnnnnnnnnnnnnnnnnnnnnnnnnnnnnnnnnnnnnnnnnnnnnnnnnnnnnnnnnnnnnnnnnnnnnnnnnnnnnnnnnnnnnnnnnnnnnnnnnnnnnnnnnnnnnnnnnnnnnnnnnnnnnnnnnnnnnnnnnnnnnnnnnnnnnnnnnnnnnnnnnnnnnnnnnnnnnnnnnnnnnnnnnnnnnnnnnnnnnnnnnnnnnnnnnnnnnnnnnnnnnnnnnnnnnnnnnnnnnnnnnnnnnnnnnnnnnnnnnnnnnnnnnnnnnnnnnnnnnnnnnnnnnnnnnnnnnnnnnnnnnnnnnnnnnnnnnnnnnnnnnnnnnnnnnnnnnnnnnnnnnnnnnnnnnnnnnnnnnnnnnnnnnnnnnnnnnnnnnnnnnnnnnnnnnnnnnnnnnnnnnnnnnnnnnnnnnnnnnnnnnnnnnnnnnnnnnnnnnnnnnnnnnnnnnnnnnnnnnnnnnnnnnnnnnnnnnnnnnnnnnnnnnnnnnnnnnnnnnnnnnnnnnnnnnnnnnnnnnnnnnnnnnnnnnnnnnnnnnnnnnnnnnnnnnnnnnnnnnnnnnnnnnnnnnnnnnnnnnnnnnnnnnnnnnnnnnnnnnnnnnnnnnnnnnnnnnnnnnnnnnnnnnnnnnnnnnnnnnnnnnnnnnnnnnnnnnnnnnnnnnnnnnnnnnnnnnnnnnnnnnnnnnnnnnnnnnnnnnnnnnnnnnnnnnnnnnnnnnnnnnnnnnnnnnnnnnnnnnnnnnnnnnnnnnnnnnnnnnnnnnnnnnnnnnnnnnnnnnnnnnnnnnnnnnnnnnnnnnnnnnnnnnnnnnnnnnnnnnnnnnnnnnnnnnnnnnnnnnnnnnnnnnnnnnnnnnnnnnnnnnnnnnnnnnnnnnnnnnnnnnnnnnnnnnnnnnnnnnnnnnnnnnnnnnnnnnnnnnnnnnnnnnnnnnnnnnnnnnnnnnnnnnnnnnnnnnnnnnnnnnnnnnnnnnnnnnnnnnnnnnnnnnnnnnnnnnnnnnnnnnnnnnnnnnnnnnnnnnnnnnnnnnnnnnnnnnnnnnnnnnnnnnnnnnnnnnnnnnnnnnnnnnnnnnnnnnnnnnnnnnnnnnnnnnnnnnnnnnnnnnnnnnnnnnnnnnnnnnnnnnnnnnnnnnnnnnnnnnnnnnnnnnnnnnnnnnnnnnnnnnnnnnnnnnnnnnnnnnnnnnnnnnnnnnnnnnnnnnnnnnnnnnnnnnnnnnnnnnnnnnnnnnnnnnnnnnnnnnnnnnnnnnnnnnnnnnnnnnnnnnnnnnnnnnnnnnnnnnnnnnnnnnnnnnnnnnnnnnnnnnnnnnnnnnnnnnnnnnnnnnnnnnnnnnnnnnnnnnnnnnnnnnnnnnnnnnnnnnnnnnnnnnnnnnnnnnnnnnnnnnnnnnnnnnnnnnnnnnnnnnnnnnnnnnnnnnnnnnnnnnnnnnnnnnnnnnnnnnnnnnnnnnnnnnnnnnnnnnnnnnnnnnnnnnnnnnnnnnnnnnnnnnnnnnnnnnnnnnnnnnnnnnnnnnnnnnnnnnnnnnnnnnnnnnnnnnnnnnnnnnnnnnnnnnnnnnnnnnnnnnnnnnnnnnnnnnnnnnnnnnnnnnnnnnnnnnnnnnnnnnnnnnnnnnnnnnnnnnnnnnnnnnnnnnnnnnnnnnnnnnnnnnnnnnnnnnnnnnnnnnnnnnnnnnnnnnnnnnnnnnnnnnnnnnnnnnnnnnnnnnnnnnnnnnnnnnnnnnnnnnnnnnnnnnnnnnnnnnnnnnnnnnnnnnnnnnnnnnnnnnnnnnnnnnnnnnnnnnnnnnnnnnnnnnnnnnnnnnnnnnnnnnnnnnnnnnnnnnnnnnnnnnnnnnnnnnnnnnnnnnnnnnnnnnnnnnnnnnnnnnnnnnnnnnnnnnnnnnnnnnnnnnnnnnnnnnnnnnnnnnnnnnnnnnnnnnnnnnnnnnnnnnnnnnnnnnnnnnnnnnnnnnnnnnnnnnnnnnnnnnnnnnnnnnnnnnnnnnnnnnnnnnnnnnnnnnnnnnnnnnnnnnnnnnnnnnnnnnnnnnnnnnnnnnnnnnnnnnnnnnnnnnnnnnnnnnnnnnnnnnnnnnnnnnnnnnnnnnnnnnnnnnnnnnnnnnnnnnnnnnnnnnnnnnnnnnnnnnnnnnnnnnnnnnnnnnnnnnnnnnnnnnnnnnnnnnnnnnnnnnnnnnnnnnnnnnnnnnnnnnnnnnnnnnnnnnnnnnnnnnnnnnnnnnnnnnnnnnnnnnnnnnnnnnnnnnnnnnnnnnnnnnnnnnnnnnnnnnnnnnnnnnnnnnnnnnnnnnnnnnnnnnnnnnnnnnnnnnnnnnnnnnnnnnnnnnnnnnnnnnnnnnnnnnnnnnnnnnnnnnnnnnnnnnnnnnnnnnnnnnnnnnnnnnnnnnnnnnnnnnnnnnnnnnnnnnnnnnnnnnnnnnnnnnnnnnnnnnnnnnnnnnnnnnnnnnnnnnnnnnnnnnnnnnnnnnnnnnnnnnnnnnnnnnnnnnnnnnnnnnnnnnnnnnnnnnnnnnnnnnnnnnnnnnnnnnnnnnnnnnnnnnnnnnnnnnnnnnnnnnnnnnnnnnnnnnnnnnnnnnnnnnnnnnnnnnnnnnnnnnnnnnnnnnnnnnnnnnnnnnnnnnnnnnnnnnnnnnnnnnnnnnnnnnnnnnnnnnnnnnnnnnnnnnnnnnnnnnnnnnnnnnnnnnnnnnnnnnnnnnnnnnnnnnnnnnnnnnnnnnnnnnnnnnnnnnnnnnnnnnnnnnnnnnnnnnnnnnnnnnnnnnnnnnnnnnnnnnnnnnnnnnnnnnnnnnnnnnnnnnnnnnnnnnnnnnnnnnnnnnnnnnnnnnnnnnnnnnnnnnnnnnnnnnnnnnnnnnnnnnnnnnnnnnnnnnnnnnnnnnnnnnnnnnntcttatgacattgggttccaatttaaaattctgtgagcagttctggtaaatactggtttataatgatgttgatgttgactggtcgtgctgatttacttggatctctgctattcatgtagaattcaaatgtaggatacttaggacacttaaagcaataccgaaagaggtatccttcagtgtatttcagagaggaatttgcttgtgtactacattcagaagtaattttgtattgtcttatctcttttaggaggagagcattcccattgctttatctggtagggatatcttagctagagcaaaaaatggaacaggcaagagcggtgcctacctcattcccttacttgaacggctagacctgaagaaggacaatatacaaggttagttgaataaaagtttgtttttaaactaaaaatgggagtttcagccttggagccatgtgtagaagatactctttttttagtcagaatttacattatctaaaatttgtattctttcttttcaggttttttctttttttagcctgatgatggtctttttattaaaaatgattcccagctttttagagatttctagttttaagagtattcttatatgatacacacttgtgacagcattccagtgagacaggaaaaataagtattagtgccctataggtaggaaagctgaggctgggcacggtgcctcacagcctgtaatcccagcactttgggaggtcaaagtgggtggatcacctgaggccagatatttaagaccagcctggccaacattgcgaaaccctgtctctactaaaaatgcaaaaattagctgggcatggtggcgcacaactgtaatcccagctactcagaagtctgaggcacgagagtcactggaacccaggaggtggaggttgcagtgagccaagattgtgccactgcactccagcctgggtgacagagtgagactctcaactcaaaaaaaaaaaaaaaaaaaaaaaaggcggctgaggtcatgagaagttaaattagttgacattgctacttataaactatggaactatttcttgtggcagatgagtgttaacagaattccttgtagaaacatgaacttctgtttaaaggctgtggattttgggattttaagagcctaggcagtggggaataaaaaattttcatagttatattcaatgtaagttaatggaattaagatttcatctctgaaactttacatttttagctttcgtgatctgtaattatcttttcttcccactttcatatgatgtaaatagagcctaggtagcaggagtttcctacctaggtattttacacagtgaatctgactcaaatgtagttggggcttttagaaatattgttaataaactttgagctaatagttgcgaactcaacatgctgaaagtttgtaattaagaacagtattggctgggtgtggtggctcacgcctgtaatcccagcacttcgggaggccgaggcaaggcagatcacctgaggtcaggagttcaagaccagcctcgctaacatggtaaaaccctgtctctactaaaaatacaaaaattagctgggtgtggtgacatgtgcctgtagtcccagctactcaaggaggctgaggcaggagaattgcttgaacctgggaggtggaggttgcagtcrgccaagatcatgtcactgcactccagcctgggtaacagagcgagactctgtctcaaaacgaagaagcagcagcagcagaaggccaggtgcagtgactcacacctgtaatcccagcactttgggaggccaaggcaggaggattgcttgaggtcaggggtttgagaccagctgggccaacatgatgaaaccccgtctctactaaaaatacaaaaaattagctgggtgtggtggcggttactcagtaggctgaggcaggagaattgcttgaacctgggaggcagaggttgcagtgggccgagatggcagccactgcacttcagcctggacaacagagcaagactccatctcaaaaaaaagaagaggaagagtttaatatttatataatagtattgctgagggagagtctaaatctgggacactataataggttctcttttcataaagagatttgtacatttgagttttcataatgtcctgtgtaatgattcaactttttatttttatttcttaatttttttggcgggggagacagagtcttgctgtgtcacccattctggagtgtggtgtcatgatcatagcttaatgcagtcttaatctcccaggctgatgtgatcctcctgcctcagcctccccagaagctgagactataggcacatgccaccattcccagctaatttttttcatttttttttttagtagagatggggtcttgctatgttgcccaggctggtcttaaactcctgagctcaaacgatcctcctgcctcagcctccaaaagtgctgggattctaggcatgagttactcactgtgctgcccagcccaattttttaatacatctcggtatctagattataaggggcagtgtttcttttctttttttttatttgagacggagtttcgctcttgttgcctggactggagtgcagtggcacaatctcggctcaccacaatctctgcctctcgggttcaagcgattcttctgcctcagcctcccaagtagctgggattacaggcatgtgccacccacgcccagctaattttgtatttttagtagagatagggtcaggctggtctcaaactcccggcctcaggtgatccacccaccttggcctcccaaagtgctgggattataggtaggtgtgagccaccgtgcctggcctttttttttttctttctttcttttgagactgagtctcactctgtcgcccaggctggagtgcagtggcgcgatcttgcctcactgcagcctctgcctccgggttcaagtgattctcctgcctcagcctcctgagtaggtgggactacaggtgcgtgccaccacgcctggataatttttgtatttttagtacagatggggtttcaccatgttggtcaggctgctctcgaactcctgacctcaggtgatctgcccaccttggcctcccagagtgctgggattacaggcgtgagccactgcatcataaggtgcagttacaggtgtgagccactgcatcataaggcgcagtatttctatagcttcttaaattttgtaaataatgatgtatagcatgttctcccacctcaccccatattttcttatatattccttgatactgtttcagcaatggtgattgttcccactagagaacttgctctacaggtcagtcaaatttgcatccaggtcagcaaacacatgggaggggccaaagtgatggcaaccacaggaggaaccaatttacgagatgacataatgaggcttgatgatacaggtaagaaatgattactaaaaggtagtgtagctctctgttattttagtcacaagtatttcagtaaattattaaaaattgtttttaagaattaaggaacagaaatactgcagtaagaaaaggaaatgaccactgcattcaagcgaaaaagacaaattaccataattgaaaacgatatttgactttattagtaattgtaaaacagcaagtttataataattttacctgtttaattggtaaagctaaaagtattagtagacgataatgtgagtttgtggacaaataggctacattgtaaatgtgggggtgtaaacttacatctctatcatgggcaatttgggagtatattttaaaattataaatgtatatataatgtgtgtgtgtgtgtgtatattttttttttttttggagatggagtcttgctctgttgcccaggctgsagtgcagaggcgcaatcttgactcactgcaatctccgcctcccaggttcaggccattctcctgtctcagtctcctgaatagctgggattacaggctcccgctaccacgccaggctaaatttttgtgtttttagtagagacggggtttcaccgtattagccaggatggtctcgatctcctgacctcgtgatccacctgcctcagcctcccaaagtgctgggattacaggcgtgagccaccgtgcccggccataaatgtatatttttaagaatctttcctgaagaaaaaagttgggtaaatgcagggctgtaggtacaaagttgtttgctrtggggtggtttgtcgtgccgaaaaattggaccaacttagaaggagattggctaactaaatacgttaaggtataatctgaataggattctacatagtcattaaagagtaaagttgacctgtattcattttcatgaagaggtttcatgatacattgccgagtggaaaaaggtaacaaaacagcaagaatgagatcactcatataaaattatatcttgattttagttagaatattatatatgataattatgtgatacattctttgtattgcataggtttttaaaaaattatcttgtttgatccttttaacaatactcggctcactgctctagattagaggcattgctcttatgtcagaagtctggtgtgccttctgctattaattgagaattatcctaagacaagaaagtatgcctactgttgaaagcagcaggtgatttaggaagctgtaccccacccaatgtagaggtgaaacaaatattwtttaagcatcctgtggtgaaatggaagtctttatcctaaaacacatctttgtgcctttttgtgttatttccacctctataacacaatgtgtttcttctctttctttcttttttttttttttttaatttgagacacagtcttactctgttgctctggctagagtgcagtggtgtgatctcggctcactgcaacgtctgcctcctgggytcaagcgattctccyacctcagcctcctgagtagctgggmttacaggctcccaccaccacacccagctaatttttgtatttttagtagagacagggtttcaccgtgttggccaggctggtctcgaactcctgacctcatgtgatccacccacctcggcctcccaaagtactgggattacagggatgagctactgcacccggcctagttgtttctamtaaaagatagtcatgtgctgcataacaatgttgtggtcagtgacggactgcacgtatgtcggtgttcccataagattataatggagctatacaatggagtaggctataccatcacatagcaatgcatttctcagaattatcattaagcagctcaggactgtaatattataaacctttatcctctttgctcaaattaaaattaatgagaatgtatgttttctaaatcttgcatagtgcacgtggtgattgctacccctgggagaatcctggatcttattaagaaaggagtagcaaaggttgatcatgtccagatgatagtattggatgaggtaatgtctcttcatttggcattatactgttctgtacttttctgtgctttgcttataactgccagtgaatgaagcaaaagctgcttgtgtttatgatctaataaacacataaacaatcagtttaaattaatttgcttataaaatgtgttttacccgtcagagggagtagattataggcattcattggaattcagcattttgtctttttcttagagatagcagacattaggttttaattttttagtagaggagtgaataacctcaatgccaaatttattctaagtctctttctgctctgtgattaatttttaaaagcatataatatatattgtctcttctcattttgtgcatactactttktactgtttggtttttaatctctgttacatgtattatctcaccatgttataaatgccttttaaaaacttattaaaatctgtagtcctgggatctagccatgttttgtacatgtacagatggtccctgacttaagatggttcactttacagtttttcagtggaagtgataagctttcattagaaactgtactttgaatttttaagattgatatttttcctggttagtaatatgctatatgatactcccatgatgctgggcatcagcagcaaactgcagctcccagtcagccacatgatgattgagggcagacagccgatactctacagtatacggcgttgtcaggtgattttgcccaactgtaagctaaggtaagtggagcatgtttaaaggaggctaggctgagcgatgatgttcagtaggtttgggtaatattttcaacttaggatgaatttatcagaacataatcccattgtaagtcaaggaggatctatagtgtatcagcgttgttaatgttttgacatgaggttattttcacatttggtttgtgttttattattattattatttttttttttttttttgagacagactcactctgtcacccagactggagtgcagtggcgtgatctcggctcactacaacctctgcctccccgcttcaagtgattctcatgcctcagccttctgagtagctgagattacaattatgtaccacccacgctcagctaattcttgtatttttagtagaggcgcggttttgcaatgttggccaggctagtctcgaactcctgacctcaggtgatcctactgcctcagcctcccaaattgctgggattacaggcatgagccaccacgcccggcctggtttgtgttttaggtaacatgatttaattcaaatcagacttttatctttaagtaatgagagagaacatttattaatcactgggtaccagcactaagtgctttacatggtttgttttttttttttttttccatttaatttttacaagaaacctataaggtaggtatcctgtcaagtarttactatagtatgtagacatccaacttctaatttgcttataaaatacgttttatacttcagatgcaatagataggcattcataggaattcagctttttgtcttatagatgccagagtttaggtttaatttttaagaagaggagtggctggataacttgaaagtcaagttttttcttttttgttttgttttgttttgtttttgagacagagtctcgttgccccgcttggagtgcagtggtgcgatctcagctcaccgcaacctccacctcccaagttcaagcgattctcctgcctcagcctcccgagtagctgggattacaggcatgtgccaccatgccgggctaattttgtacttttagcagagacagggtttctccatgttggtcaggctggtctcaaactcccgacctcaagtgatctgcccacctaagcctcccagagtgctgggattacaggcgtgagccaccacacctggccttagccaagttttttctaaatcccggtaaagtagttactacattatgtaaacatccaaattttaatagttttacaattttagagttgtggaaactgaagtacagagtagttctgtaacattcccacacagctgagaaatgaaggaggcaagatttcaacctggcagtttagctccagaacctgtacttttttttgagacagagtcttgctctgttgcccaggctggagtgcagtggtgcgatctcagctcaactgcaacctccatctcccaggttcaagcagttcttctgcctcagcctcctgagtagttggaattacaggcgcttgccactgtgcacagctaatttttgtatttttagtagagacagggtttcaccatatcaaccagtcatgtcttgaactcctgacctcaggtgatccgcccgcctggtcctcccaaagtgctgggattacaggcgtgagccactgcacccggcctcagaacccttactttttttttttttttttttttgagacggagtagtctcgccctgtcgcctaggctggagtgcagtggtgtgatcttggctcactgcagcgtccgcctcccaagttcaagcgattctcctgccccagcctcccgagtacctgggattataggtgcgtaccaccacgtccagctaatttttgtatttttagtagagatggggtttcaccatgttggtcaggctggtctcaaactcttgacctcgtgattctcccgcctcggcctcccaragtgctgggattacaggcgtgagccaccgcgcccggccagaacccgtacttttaaacactacaccatactacctctttaatgagaatcatcacattaaaattctgttgtggagctgggcatggaggtatgtgcctgtagtcctagctactcagtaggctcaggcaagaggatcacttgagcccaggaagttcaggctgcagtgagatacgattatgccactgcactccagctgggtgacagagtgaaatgctgtctctaaaaataaataaattaattaaattctgttacagaaagcgggggaggttgtctgtgtagtgtagaattttttttttcccctagaagatggggattatagattttgcccccttctgcatatttgactctctgcagtgttggagagaatttattgttttccaccaggaacatttcatggatgcttttgttggatgatgccttattctttgaccatgtattaaccaagaccttagacattattttattgtttttaaaattgtcttttctttctactgcaggcagataagttgctgtcacaggattttgtgcagataatggaggatattattctcacgctacctaaaaacaggcagattttactatattccgctactttccctcttagtgtacagaagttcatggtgagtataaatctgtacttggaatcagtgccatcctgtgacctttgagtatgcttttatttgtaattacatcttcatatctgtgaatatactttatgmtaattatttcaagcctttggctctttcttcagttgatcaattaaagatttgttttacgtaaattaactgacttyttaagaaggttgtratagtaacttaattaaattcctcatctttcacttagtttttggtgtcatgatgacatagccattggtgctagctgaattgattccggtattattctatatacaaaacagagcttgagtatcctaaactgaaatccaaaatactgcagaatttgaaaccttttgagccacgaacatgatgctaaaaggaaatgttctttggattttgaattttcaaattaaggatgctcagtcactaagtgtaatgcacatattccaaaattagaaaaaatttaaaacctgaaacacttctgttcctaagcattttgggtaaggaatactcaacctgtagtaacttagctgcatttttgagatcttatatcttaatttatttctatcgggtcgggcatggtggctcatgcctgtaatcccagcactttggggggccgaggcgggcagatcacaaggtcaggagttcgagaccagcctgggcaacatggtgaaaccccgtctctactaaaaatacaaaaattagtctgttatggcagtgcatgcctgcattcccagctactcgggaggccgaggcaggagaatcacttgaacccgggaggtggaggttgcagggagcagagatcgtgccactacactccagcctgggtgacagagcaagattttgtctcagggtggcaggggggaaattctgtaatgacagatcatatattttgttttgaagagagttgcgtcccttacagcaagagtttatcggacagaaacgtatagggtatattttgaatttgagatgaactctgctttcatttaagacgacgactcatctttttcccgctccccccccagaattcccatttgcagaaaccctatgagattaacctgatggaggaactaactctgaagggagtaacccagtactacgcatatgtaactgagcgccaaaaagtacactgcctcaacacacttttctccagggtaagaagtaggcttctgctgttgaatattatctctcgagtcccagtaaaacagatgatttcatcaattttcccaccgtcttcactgtataaaagttcgtagtgtttctggcttggcacggtggctcatgcctcccagcactttggaggctgaggcaggcagatcacgaggtcaggagtttgagaccagcctggccaacatggtgaaaccccatctctactacaaaatacaaaaaaattgggcatggtggcgtgtgcccataatcccagctacttgggaggccgaggcaggagaattgcttgaacccaggaggcggaggctgcagtgagctgagattgcrccattgcactccagctctgggcgacagagcaagactccgtcttgggaagaaaaaaaaaaagattaaaaaataattcatagtgtttcctaaaaggcaggtttagttgttgacytaaagttgatactaaatgattaaccaagtcacagatacacttttgaatagtttctgaaatactttgaccttaactagggttaatcctcattattcacatattctgtatttgtgaatttgcttagtcactagaatttatttgtaactccggaattaatactcaaggtagttcagcagtcatttgtggacgtgtacagtgtggcaaagagtttaagtcacctgacatgcacattcccagctgaggtcgaagaaagcaatctctgtcctcttgtttagctctcatactgtgaacaagggtccttttcacagtctgccatgtttttcaagtttttgttgctgatttcacagttttaattggcccctacacatggtgctgaagtgctgcccmatgctggtggcattggttgtgagtatattaaagaaggtattcttggctgggcacagtagctcatacctgtaatcccagcactttgggaagccgaagtgggcagatcacctgaggtcaagagttcaagaccagcctgaccaacaggctgaaaccctgtctctactaaaaatacaaaagttagccaggcattgtggtgggtgcctgtaatcccagctactcaagaggctgaggctggagaattgtttgaacccaggaggcagctgttgcagtgagctgagattgcaccattgcactccagcctggacaacaagagtgaaactccatttcacaaaaaaaaaataaaataaaatatttttaaatggaaacacataaaacataactactttgaatcagataatcaattgtattactcttgttgacagttatgtggcccttaagaaatatactctaatacggtaaatcttagatattattatcttccatctattatttacaatttttacaatttaccatctctctcatatcatgagattctaagttttagaccatgttaatgtttcttttttgctggttcgtgttttcaagatttggcaaaccaaatgaaggttttttttatttttctcatacttatttttttctgtgctcagcttcagataaaccagtcgatcattttctgtaactcctctcagcgagttgaattgctagccaagaagatttctcaactgggttattcttgcttctatattcatgctaaaatgaggcaggtgagtataaaactagaacttgcacaaatttaataagaaatctctttctttattttgttttaatgttcttttaaatgtcctgagtttaagaataaactgttscttagtagccaaaggacctttcattttgacctccctcaggttcaattttctagcaataaaatagggataatagtacatattcataacttacaaggttgttaggaaaattaagataaatgtttaaatgagtactttggaagctgtcaggcatgatacaaatgtaaaattttattcttcccttcctttccatgtttaattctctgtttaatacagtaaatagccacatgtggcaatttaaatcagttaaaattaaaataaaaagtcagtttctcaatcacagccacatttcaagtgctcagttaggcacctgttgctactggatagtgtattggaattggaagtacagacacaaatatttcctttattatagaagttttactggacagcactgctctggatttttaaatatggcccctcagctggctgatttttctttttttctttactgtttgcctttagaaaaagatacaatatctaaatttcagaatttgatttagcaaaaaataatttaaaactgtaacaaaaatgacttttttgttaactacattatgaaatttcgtaagtaaacagtttctgtagacgaagatatcaagaacttaactcatttggttttgaaagcagcttaatatcatggatcacttataaacagattttgggtagaactgatcgtctgggagaaataattatgggaaatttggggctgtatatgagtgttaatcaaatggaatacattgctttctcctaggaacatcgaaatcgtgtatttcatgatttccgaaatggcttatgccgcaatcttgtttgcactggtaagtatttttgtatttcctttacccagtgtttttctcccaagttgttttttgctttctctgttcatattacatagtgcaacctgtgacatagtccgacacaccctaccactacttctaggatttctgaagttgaaaatgaactcttgtcagctcctgatactgggttccatatctgaaactttagaagacttactctggcactcatacctcatctctgtctttttttkggggggggggagggggatggaatctttgtcacccaggctggagtgcagtggtgcgatcttggctctctgaaacctccacctcctgggttcaagtgattctcctgcctcagcctcccaagtagctgggattgtgggcgcctgctaccgcttagcccggctaatttttgtatttttggtagagacagggatttcaccatgttggccaggctggtctcgaactcctgrcctcaggtgatcttcctgctttggtctcccaaagtgctgggattacaggcttgagtgcacccagcctcttttagacacattttttaaaacttgcttacaattactggaaaaaagtaacttgggagcagaaagttatttatgataatgtgattatgaaaggtaatgccagtaatgtgcaaatgcatttgaataactgaattaaattaataaacttaggttatgctagaaatatgtgttagtattgtactgagagacatttctaaattgaaaaaatgaaaattatctttttttttttaagatctgtttacccgaggtattgatatacaagctgtgaatgtggtaataaactttgatttcccaaagctggcagagacctatctccatcgtattggaagatcaggtgaggaaaaaagaggtgatattcttggtagaagttcttttttgaggcgtgtaatgactaaattttgttcttttgtgaaatagagtacagtagctatgagaacagtgaattaacagtaattcagttgtttggtatttaagactaatttctaattcttctgtagcatttattaagaaaagttaaaataactgcttaatttgagatgaaattaacacatgagaacttcactcattaggtggtatgttctgtgactgttgtttaatgtgtattttatggcagttttgactgccattttgtcatttgagaaaggtgaaatgaagtactattttgggctgcgaaacctgaagttgtagggaaacctgtgtttgaagaccattaagaagttgttttgcatactaagaatggcactgaacatcattatcaatcctgtgtggttttgccactgcttgacttgcacaattcacattgattttcatattttattcattaaaatttttaaacrcatgttttttaggtcgctttggtcatcttggcttagccatcaacttgatcacatatgatgatcgcttcaacctgaaaagtattgaggagcagctgggaacagaaattaaacctattccgagcaacattgataagagcctgtatgtggcagaataccacagcgagcctgtagaagatgagaaaccttaacaagcatgtacgtccctgacagaacagctaagmggaacctttaaatgagggaaatcaaaatcttctttcctgggggaaatttgatgtcacaccatatataatagcaataaagggtaaaatacccactagcataaatgacagtaaataatatctcttgtgggaggttgtagtctcattcgagaatctgtaaatgttgttcttgaatgcagcttcccgggtaatgtggtagattagcagtacttaaattcagagtcctaaaataatgaaagcaaaaaagaatgtttttcagcaatttgtttttctttttgagacaaggtctcactgtcatccaggctggagtgcagtggtgcaatcatagctcactgcagcctggttctcctgggctcctgagtagctggaactgtaggcacatgccaccacgcctgcctaatgttttaaatttttggtagaaacaaggtcttgctttgttgcctaggctggtccagaactcctgaactccagcagtcctcctgccttggcttcccaaagtgttaggattataggcgcaagccactgtgccactgtgcctggccttttttgacagttttgtaggggggatttttgttgtttttgttttttgagagtcttgctctgttgcccaggctggagtacagyggcacaatcacggcccactgcaacctctgcctcccaggttcaagcgattctggtgcacctcagcctcccaagtagctggaattacaggcatgctccaccatgcccagctaatttttgtattttttagtagagttggagtttcaccatgttggccaggttggtcttgaactcctgacctcaagtgatctacccgcctcagcctcctaaagggaggctgggattacaggtgtgagccaccacactgccagcagttttgaatatgaaagtatttacatttctgaaaatgtaaaatgtttttagcatttactcttaatttctagtaagtacattaatcactctgataaaactatccataataccttattagcaaatgtttaatcagattatgaggatggccatctttttaaaatacccactctgggccgggtgcggtggctcacacctgtaatcccagtactttgggaggccgaggtgggcggatcacgaggtcaagagatcgagaccatcctggccaacrtggtgaaaccctgtctctactaaaaatacaaaaattagccgggcatggtgacacgcacctgtagtcccagctactcgggaggctgaggcaggcgaatcacttgaacctgggaggtggaggttacagtgagctgagaccgcaccactgcactccagcctgggtgacaaagctagactccatctcaaaaaaaaaaaaaaaaaaaagccacttgggctggctcagtggctcacacctgtaatcccagcactttgggaggccgaggtgggtggattacctgaggtcaggacttcaagaccagcctggccaacctggtgagaccccgtgtccactaaagatacagaaaattagccaggcatggtggcgggcgcctgtaatcccagctagtcaggaggctgaggcaggagaatctcttgaaccyrggaggcagaggttgcagtgagccgaggtcatgccattgcactcgagcctgggcgataagagtgaaactctgcctcatatataaataacccactctgatttcctaggtaataagagtgaaactccgtcaaatacataaataaaatacccactctgatttcctggacaacctgtcttcccatcttttttttatttttattaagatgggatctcactatgttgccccggctggtttcaaactcctgggttcaaatgatcctcccactttggcttcccagagtgctgggattataggtgtgagccaccacgccctgcctctatcatcttttggtgactattgggctctagttagaaatgcatgaaacaaggctcagctttaagcaaggtaggttgtttcagtatttcctaaagaaaatctgatttgacaaaggatagtttccaagttataggtgaacatcttacctatttaagtaacctaatgttacttaaattttttttctctttcttttttaaatagagacgaggatttaccatgttggccaggctggtctcaaactcctgacctcaggtgatccgcccacctcagcctcccagagtgctgagattactggcaggagccacctcacccaaccaattgttacttaaataatttttaaattactctgtactctttttttccttaagttaaacatcaaacacaaactcttggacaagcatgaaactagccaatgtttgctagtactttggcagagtattcagtttgtgtaaggttaatttttttcccccggatttgttacgagtgagggctgcctgctatcagaacattcacattcattcaggcccccartctatctcagggttgcctaccagaaattatttaatcctataaccagtagattctatagtaggcacagggttagtagaaactactagaaaagagcatttgggatgaggattgtgaaaacctatgtatcctagtttgtgttgctttcagaatgttaattttgtattctcttcttctgtaggctttgacaaattacaaaaggctcgtttggatctgtgacacatcgttttggggggaatgctcttctctttgtgggtttttcatcttttattttggaactatgaagacttaaaagagctcagacattttctttttttaactggtgaagagaaaaaggctgaaaagaaggaatataccttttttgttccacttgtttgcactgtgtgctgactgaacattagttgcactaactgctggtttttaaaaratgttttctggggaaaggggacmaggaaggaaaagaaagaagagaaggggagaaaccctwaaaagagaagaatcttaatgaacacacaagcttgtcaatgatttcmaaattctccmacagctgactctcgtgcatttcaacttctccctgattcctcatccgttttttaagcctgaagagcttattacttatttgtgcgaagtgccttatgctatgagaccattcagaatatcatcttttagacacagcccgaggaatcaacmatagtaactctttctttccgtttttttttctttttcttttaaaaaatgtcttyttattttggtttcaggttgaagtctcttccctttctacccagtactcgagcccagggctagaagttgaaactcactagtaatgttaaacaccattttttttttcttttkggggaggagttgatatgcaactgcagttcatccgcactgtaaatacatgtatttaaaaaaacaatcccaagtaaaaatttcttctgggctgagtagataaaaaacatcatcgctcccaaaggaaagagcagtctatcattgcaggagccatatgacaagcctttgtgctctatagcagacactaaagactgggttacatatgcctccagtagtagtatggcacttgatgtgtagacatgtcagagccttggccctctttcctctgtggcaaagcgtgtcccatagaaaattgggtgtgtatacttgtataaacttkgtaaataagttttttttctgggttcatatatatatatatatatatacatatatatatatttttttttggatgaaggttgctgggattaaggggattagagtgattatgggagcagctaaagatgagaggggctcagttttacgcaacactaaattctagaaagtactttggcctcgtgctgtagagagcagatttctatggtaccctgtgttagtaaaggggcccagaaatctgggatgtactgtttgctgccacactgtctcatctagtacctttggagtaggtttaccagagagagcaaggaagcttcaaaacattgataattcaasatttattttgagaagctctgattttgcttcttccccctttctaaaagtttgaggaatatttcaagctctgcaacagggggcaaagattaatctaccttgcagtgtaggaattctattgagtggcagtgtcattgagcagtatatatataaagcacagatttgcatttcagaatattagccagtaccagctttggtaatgttagcagttctggagcttaattttctgtggatcatttcctgtagtgtgtaaatgtgttgccctctgcccgctttgatacataaacttttgcaggaatgggcaacctgagagctgttaactttcatgctacagaaagctgcttgccattctcttgcattgtgacaagaattgttacctgtcattttgcactgtaaattgctggcagatgctttacagtcaatagtgttgctttaaattgtgcccctcccaacatgcttgatgtttggcctgatctccaggcaaaaggagtgagatgaatcaaaaccagtgaacttttttttttaatgtttttaattcccttttaacccagtgtactaggtcaatcaggaggcatctggaaagggggggaaaaaagcaaaaaacaaaattaaaaaaaattgatttccatattttatttttcaaaaccctaaaatattacaaaataagtcccgcatatactttaatgttttaactcttttggacaaaggaatcaattacttgaagttgcttttttgactctgcctacttctgagcaaactatttgcgactcacccacaattccttggagatcaaaatcctrcagatgcctcctgatgggacatagccctaactccttaacaactgtagcaagaactgcacggtacaaacccaaaaaagaacaagctcawctatttggaacccaagcctcatattttctgtccagtcaatgttggttactaaatagaaaacctaattaaggaagtaacttttttccagggaggggtgggagagggaatttaaaaggtgtcaacttttgaccaaaaaaattgtgcccttgtaccgatgcagctctctttctcccccacctcttgcgagataagagggatcattcatgtagaagaaaagagtataaatgcaattctgtatctcgctagagaacgtgtgggtgactaaacaaaaagtgcagtctccttcaccaactttagactgcgtggtgccacatgcctgtgggtccctcttaaagcacagacttaaaatggaaagtattactgaagtatagcctctaatgaggagtggcacttaaactatctgggacaccactactggacacggtcttgtagaggcagctgtccagttttggtgcttgactcttgaataggaatwgttaaatggaaagatgctctgaggactaggtcaaagcctggtctttttttttttttttttttttttttctttcttttttgggccctcataataagcattgttactattggaagttgttttcacattctttccaatattaaatatgtatttttttaagtaatgataatattttccagtggctcatttggatgagaactaccctctatttttaatattaaaactacatccaactcatcatttagcctttggttgtacagttgtgtaatgggctatggactgttacacaccttaccacctctaggcctatgttttttctttccccatatattctgatggggataaatactgttttgcctctcccataggaatggaatacatttattctaaaatgatctttcacagaagtaagagagagggaaacctaaatatacctctaaattgtttgaagttggtcccagcagcataaaatgggttggccccaaagggttggagggtgggcttggttatcagtatttgttttcagaatgagatgggagcatctttcctttgccacgtgctttgtgcttgataacatcatgcttggttcaaacgacaactcagcacaaagccttgagtataaattgttggaatcaaaacatctcattctgatgacgtggtttaattttttaatttttttttttaataggggtgggagggagggtacttkgccccaraagggagggtgtctgcactaaggatttagaaacacttkggaagctcataacctcatcagaaactgcctttagccacactcctgaccttctagatgagtaacaaaaaaatgaaataagttcttggaaattaagccatttattttaatttgctatttttttcaatgttctargtatctttaaatttgttattgtggaatcattttcctgccagatacctttatcaaaattattggcctcatgagagctgaagtaagtcagctttttggtgaactttagtggacttctgtgagattgtagttgtactttgtatctctaaatctaaagatagttttttaaaactcccaaagaaaatctgctctcctttctgatctaaaamctcatctttggggtaaagagttaagtgtccaaaggttgtcacagttcatgaggtcagagggagctagcctggcacctggactctgcccatccacagctgacagattccaacagaagtgtatttaaattctccagtagacaatgctgggtaagggagggggtagggctgggttattaagatacaggctgctgtattttacattggttgtgkgggaaggggagcctggagaaaacaaagtcactattcccttttttgaaacaggaaaaaaaattattttttgttcagtaaaaatggtagagaattccaatgtccctagccacaagggaccagttccactgagaagtgaacagtgggaactcaaaatttcagaaacattgggggaagggaaaattggctttctyttaattggcaratgttccagtggggsgggggggctctgtttttgttgggatgtgttatgttgtatgtacgcatatatggaccggagtctgctgagtttataaggttccaaaaatatggtaaaatcttggtttttgttaatttatctcaataaaagcccactggaactccaaatgtgtgtgtggtatgtccttagtagcagctgtgtgcataggaatctgagcattttgctcaggtaattcatactgtgaaacagacatttctcaacccatcattcctgtgaagcccagttgaattcagagccccttcatctgttgtagatactgttccaccatgctgtcagatttcacagcctaaatggagaaccaagataatcggttgggaagaggggagatgtggtccataatatgtccaaatacatcagtaattaccacctcctacaattgttctcaaatgtaaagctgaacatacccccaaaaccaaggcatactacatcttaacagtatgaatggaattcatatgctgagaactacaaaccactgatgaaataaaagattgggaaataaaagttgggaaaagcagacacttaaagttgagcacatcactctcactacctctctacccaaagaaatgcttaagtataactaagaaaatagagtcagtcccctgtatctgggttttacgtctgcacatttagtcaactgcagaccaaaagtgttaggcctgcaatggttgggtctgtactgagtatgtacagatttttcttgttctctgaactacagtataacaactatctacgtagcacttattgcactagatacgagtaatctggaaatgacaaagtgtgcaagatgatgtccagagattatacgcaaacactacatcattttatataagggacttgagcatctgagggtttgggtatttgcaagggagggtggaatcctggaaccaacccccatggataccaaggggcaaacaactgcaatacctatatgctggagctacaaaataaactgacagaaaaatcagacctagataaatggagatgccatggttcatggactggaagaataaatcttgagtttcaccaatttggtctagagggtcaatgcatttccagtcaatcccaataggcttttttgtaaatacccacaagctgattctataaaataacgtggaatgctgggtgtgttggcattcacctatagtcccagctattcaggaggataaaatgggaacatcagtggagcccaggggttccaggccagcctgggcaacatagacctctctaaagtagtaaaatttatatgggaaggcaaattatgctgtaacaattctgtaatrggaagaaattggaggagtcactacctgatttggactcaatataaagatgcagtaacgtattagcaaaaggatagacatgtattgatggaacagaatagccgaaaaatagacccacacaaatatagttgatttttgacagtgcaaaggccattcaatgaagaaaatagagtcttcaataagtgatattgaatatgttgcaaaaaatctttcacccattccttgtgccttctataaaaactcaaaatggatcatacggccaggcacagtggctcaggcctgtaatcccaatactttgggaggctaaggcaggcagataacttgaggccaagagttcaagaccaacctggccaacatcacaaaacaccacctctactgaatatataaaaattagctgggcgtggtggtgcatgcctgtagtcccagctacttaggaggctaaggcacaagaattgcttgaacccgggagagggcggttgcaatgagccaagattgcgccactgcactccagcctgggtgacagagcaagaccctatctcaaaaaacaaaagaaatggatcatagacctaaaagtagaacatgaaactataatttctggaagaaaacgagagaatccgtgacctgtttgggtttggcagaaagctgaacatgcgatgttatggagaagattgataagcagctgttaaaatcttcttatcaattaagtgagctgtggaggatatagaataagtagtaacttagaataataggaattagaatttagttcaagtaaattcagaagttaaggagaaagctgggcccagtggcacacgtagtcccagctactcagaaggttaagtctgggggatcgcttgagtacctgcagttcaaatccagtttgggcaacatagatcctgtgtgtgtgtgtgtgtgtgtgtgtgtgtgtgtgtgtgtgtctcaaaaaaaaatgttaaggagacttcaaagatttacagattgtacattggaaaagtacattggccagtcacagtggctcacacctgtaatcccaacattttgggaagccgaggtgggggtattacttgaggtcaggagtttgagaccagcctggccaacgtggtgacaccctgtctctacaaaaatgcaaaaattggccagatgcagtggctcatgcctgtaatcccagcactttggaaggccaaggcaggcagatcacgaggtcaggagttcgagaccagccagggcaacatagtgaaaccccgtctctactaaaaatacaaaaattagccgggcatggtggtgcatgcctgtaatcccagctactcgggaggctgaggcaggagaatcacttgaacctgggaggcggaggttgtggtgagccaagatcgtgccactgcactccagcctgggcannnnnnnnnnnnnnnnnnnnnnnnnnnnnnnnnnnnnnnnnnnnnnnnnnnnnnnnnnnnnnnnnnnnnnnnnnnnnnnnnnnnnnnnnnnnnnnnnnnnnnnnnnnnnnnnnnnnnnnnnnnnnnnnnnnnnnnnnnnnnnnnnnnnnnnnnnnnnnnnnnnnnnnnnnnnnnnnnnnnnnnnnnnnnnnnnnnnnnnnnnnnnnnnnnnnnnnnnnnnnnnnnnnnnnnncactccagcctgggcaacagaacgagactccgtctctaaaaaaaaaaaaaaaaagtacaaaaaaataagccaggcatggtggtgggcacctgtaatcccagctacttgggaggctgaggcagagaattgcttgaacccgggaggcggaggttgcagtgagccgagatcgtgccagtgcattccagcctggacgacagagcgagactccgtctcgagaaaaaaaaaaaaaaaaaagccgggcatggtggcatgcaccctgtaatttcagctgttcaggaggctgaggcaggagaatcacttgaacccaggagtcgaggttgtattgagccgagaccgtgccactgcactccagcctgggcagagtgagactgtctcaacaaaaaaagtcaagtcagataacctgtctccaaattcagttctttcactgcactaccctgtctataaaggaatgtggggggacatgtcttcaatcagaggagcaaagagaacggatatgaaaatcacttaacagtactgtacagtctggtctaaggtcagacttccttgtagactctgtgggaaagtattgattcttagattccccggttgtctttccattatctcattaatctaattacagaatagagagtgtagcaggtgcctacatcttcagggctgttctctaagctcactgtctccacagattggcccgtatgaaccacactaacattccctttggtccctggcttccatttgggtttgctcaccagggattccccccaggaaatcagtgggaaggaagacagtaaggtcctctaattccctaattagagtgtgtctgcctctaattccctccctgcaagattgtctctagctgcttcgtccttcagcgtgaggtctcttactgagtctgaatctacatgactcttgcctcattttctggtaactgttgcctccctttgttaagttctgctacataagtcctcttcaaattatgctattacaagtgcgccatctgtttctttttgggatccagactgatagagtaattggtaccagaagtggccctgggaaacagactcttaaaattagatctgggattgggttagtcatacttgaagagctcaataacctcctcatgggaggtggtggaggggaggccgggaatgggacatgagtgatccatggcatacagtggtgtcacaattcaaattttgactggtggtaccatgggatggagtgaggtaaagggcaaggcatggggaaagggagctgtgacaattatagtgacaataggccctcgagtgcatgcagaagaataagagaaataaaaattagggacatgccagctgggtgcggtggctcacacctgtaatcccaacattttgggaggctgaggcaggtggatcacctgaggtcaggagttcgagaccagcctggccaacatggtgaaacccccatctctactaaaaatacaaaaattagctgggcatggtggtgggcgcctgtaatccctcgctactctggaggctgaggcaggagaatcacttgaacccaggaggtggaggttgcagtgagctgaaatcgcaccattgcactctagtctgggtgacaagagcaagactgtcttaaa

SEQ ID NO: 95770 - DNA, 34454 bp, Homo sapiens
  misc_feature (1)...(34454): n = A,T,C or G
tgcctcagcctcccaaagtgctgggattacaggcatgagccaccatgcccagccactagtagtttttaaaccatgctgttcaaagtccttggagtgtaaagaagactttgcagagaggctgaacggctgtggttctgctcctcctcccttgtcccccaacttcaaggaaggaggaggaggtagggtgaagagcaggttgggaaaaagtgggagttcccaacaagtttcacaccagattaattccacgttcatctctttcattttaggctttcattcaagatttagtttgaggctgggcatggtggctcacacttggaatctagcactttgagaggccaaggtgggaggatcgcttgaggccaggaattcaagaccagcctgggcaacatagcaagaccctgtctctacaatgttttaaaacttagctacccccacacctgttgtagtcctagctattcaggaaactgaggcaggagggtcacttgatcccaggagtttgaggctgcagtaagctatgatagcaccactgcattccagcttggcccacagagtgagaccctgtctctagtggggggaaaaaatctttagtttaaaaaaaagatttcatacgtaaaactatgaaaaccacttgacttcaccaatctacttctacaaccatctatcaaactgggaatcactagatcacatcctcatgtctagtccagatcccaatattctatagacacaatcatgttcattgcactctacataatagtgagatggtgtataatacagtgcttaagagcccccactctggagccagaataccttgccttgaatgccacttctaccacttattagttgtatgaccttgagcaagtcaacctctccacacctgaagtttttcaactgtaacatggaagaaataatagttcttcaaaagactattgtgaaaattaaataatatatatatagtatgaatatatatatagtataaataatatatagtataaacaacatcaacaagaaacaataacttagaacactatctaacactgtttttattgcagggaccccatagtatgcctccctccctctctcctctaacagaacatagtacactgctgaagtacagcttgttttgtttaaagcaaattgctgaatttcatttccattccagagacaggaaataaagtcagtttgtctcacggaaaaggatgtgtctcaaaaatttgacttctttatttttaggcgtgtgtgggaaattattactgacaggaaaattagactgaatgcagtaaagtagcataaaattcctcatcattccacaggtttggttatgctccaaaccaaaacgcattccttaagtataaaggaattgttacacacctctaagaggatgacaaaacctatagttgctgctggcaactatgttccagttctattcctaaactggaagttgtaatgaactcagaactgctcccactgaagcaatgtaacaaaaaaaaatggagctggcagtttaccgatggtcaccctcagccccacagaactcttgggtatgctgtcttctcaaccacaacttactgtgggcattgaggcattgaaggatgtggggtgatgaacaggttggaaagaggtgggagccccagcaagtttcacagcaaggagagagacctgctatagcagaatggaggtaaaggctttctggacaacaaggagccaggcacagtaatctgtgtacagttaagtcctgtacagcgtcatctgcttcccgcagagcctcaggtatctccaactcaatgaactacaagaaatctcctatttaaaaagtacctttgtaaatttgatatttggatcttagaatgatttccactaaaataatgttgtaaacaatggttaagtccctaggttagctccaactgatgtggtccatgatatagctgaaatatttgcacaccaatcattttaaaggacataaaaaacaggtggggggctaggggagggataacattagaactacctactgtaggtgacgggttgatgggtgcagcaaaccaccatagcacatgtatacctatgtaacaaaactgcacgttctgcacatgtaccccagaacttaaagtacaattttaaaaaaagacatagaaaacaatatttttgctaaaactaaaacaaaaatagaattcagtgaggctagtttatcttatatgctggtgcctgaagaaaagcatgcttaattagagaaaaagaatgagtagatagacttttcccattagagggaatttctgggcattttccttgaaggctgcggatgatgatacaattgagatttttattatcgttttcctttaaatttagagtttgtttcctgatgatagaaataatacttgttcatggcagaaaatgtacataagccaaaagaatggggtaaaaatcaccatcatcacactacccagaaagagtaagagtgtaaactacacaagctgctttcaatgcctagagtgatatgtaaattaatacttttctttttttacaaagacaagattatactatatatacattgttgtaatattattttcactaataacattttgtgaatgtttttcatgttaatatgtattcatctacatcattattttattgtgtggcattttattttatggttataccatgctttattcaatcttttattgtagacgtgtgggtttttcctaccttttgactattataaatgtttagctacaataaacattcttgaactacatttttgattacttacataaaaactttcttaagaaagtcataaaaataaaggcacggtggctcatgcctataatcctagcacttcgggaagccgaggtgggcagatcacttgaggtcaggagttcgagacaagcctggccaacatggtgaaaccctgtctctactaaaaatacaaaaattagccaggcgtggtggcgtgcacctgtaattccagctactcaggaggctgaggcaggaaaatcgcttgaacccaggagacagaggttgcagtgagccaagatcaccccactgcactccagactgggtgacagagcaggactccatctcaaaaaaaaagagtcactgaatgtttccgaactgagaatataatgatcaagtggtttttcagaagatttaacctggtggtattatgcaatatggattggaggcaggggaaataattaggaatctattacaattatccaactttgaggtaactcatgacttatcaggtagaattacattggcttctaataataaaaaaaactgactaatcagtgactaaaacaaatttacttttcccttttttttttttttttttttgagatggagtcttgctttgtcaccaggctggagtgcagtggtgtgatctcagctcattgcaacctccacctcccgagttcaagtgattctcctgcctcagcctcccgagtagctgggactacaagcatgcaccaccacacccagctaatttttgtatttttagtagagacggggtttcaccatgttggccaggatgatctcgatctcttgacctcgtgatctgcctgcctcggcctcccaaagtgctgggattacaggcatgagccactgcgcccaaccatttttcttatgtatcaagaagtcttgctgggtatggtgatgcatgtttgtactcccagctactcaggaggcttgggtaggaggatcacttgagtccaggagttctgggctatagcaatctatgctgatcaagtgtccacactaatttcaacatcaacagggtgaccctccaggagcgggggaccaccaagttgcctaaggagtgaactagcccaggtctgaaacagagcaggtcaaaactcctgtgctgattttagtagtaggatcactcctgtcaataaccactacaccctggcctgagcaacatagtgagaccctgtctcttaaaaaaattccttaattaaacaagaattctaaatatgggaagtcctggactaatatggtggctttaggatgccatcagggaccctaattatttgtttctgttcagatagtcttcatgtggctcttgtcctgctcaccatttgtgttaaaacaatggttggtttggaggcccctatccacatatttcctttttcaggcaggaagaagaggaagggcaaaaggcaaaacatatgccagctgagctggtcccttttaaaagaacttttggagacatcccacccagcaattctgcttacatcactttggccaggctgtgtcaaatggccgcttctagccacaaaggattctagcaaatgctgttttttggctgagcacattaatgctcaaaccaaagaagtttttgtttgtaagaaaggtagggaaaatgatctctgggtaggcaactagggtatttacacaattggaatgagaaaattggagtgtaacttatataaagataggaattactgaaggagaagcaggttcatggaggaagatgcttggtttggatgtatcaatttgtggatactgttgggaaatccaggtaaaaatgtaacaaaaaggagttggaaagaaatgaacaaatattttggttcagtaacacctttgtaatgtgttgcaatattgttgattgagaggttggccataaggctaagcactaaaatattgttaagttttgccaacaaaaaggcttgtcccaattttcaaaaagaaatagttaatagtaaaaagatcatttggtctatgcccataattctgttgctaatctgaagtgccaagctcatcttcaatataagctgttataatttaaaatttctgctgagtctagcagcgtactttctttacctagcagtaactatcaaatatttagtcataactggccgggcgcagtggctcacgcctgtaatcccagcactttgggaggccaaggcaggtggatcatgaggtcaggagatcaagaccatcctggctaacacagtgaaaccacatctctactaaaaatacaaaaaatattagccgggcatggtggcaggcgcctgtagtcccagctactcgggaggctcaggcaagagaatggcgtgaacccgggaggcagagcttgcagtgagccgagatcgcgccactgcactccagcccgggcaacagagcgagactctgtctcgaaaaaaatatatgtatatacacatatatatacatatatacatatatatacacacacatatatatagtcataactaagactgtgtgttattatggaaagagcgtgagatttgggtccagagagccttggctttgccatttatgatgaacagaatgactttgagcaagatacctgtcagagccccagttttcttatttgggaaacagggataaggtattacttgccttacaggattgtaattagtatcaaatagataatgtttgccaaatgttttacatacaataaaatgttatacaaaacaaagctattgttcttattataacaataggtagagaagtggtaactggatactctggaggacagttgagtttctgtaaaagacttgaagtaaatttaacacttaattcattaaactgtcaactgaagttctgctaagtcagacacattactaataaaaacatgcattcctgagcgtgtgtgcgtgtgcgtgtgtgtctgttgagagcttgatgaatgtaccagcatattcaccaaccacagaaagctgtttgcgtgatgtgaaaccctgaggatcatagcttcagaaaccggaaagacttcactgtatttcactagggtgggatatcaccatcagtggtcctacacttgccaaagatccagtctgtaagaagatttagagagtattgaaatgcaatttttggcccaccacagatatcttctaatcccaaagtaaagactgaaagcttcacctgtttttcactatcaaatgcctcaagctataaataggtccaaagctcatctctctccacttagcagagaagaatcaaatttccgggggcaaagcaaaataataaaatgaatgtcaggatattttatagtgtcagtcagtcaccccacagtctcctctctcttcttttctactgtgctatcctagaatcaaggatttcagcaacaatgcctctgttcaaactcccaggtaggtgtacaaagtgtttggagagctcagttgttgttgttttttttttttttgacaagcaactgttcctttagctaccatatcagctttgatcattcatttagggttcgtgatagctttaacatacatttcaggaaaacacaaaatattttcaagggttttttgtttgtttttagttttgggatgtgggtaagtttctaaaactgttatcatgtatattgcatctttgatgatcccagtagaaaactctgtgaaatatttaatatctattctgctagtctaaacaaaacctgtgctgccatagctctgagacggcttctacataatgactctagctatggtattggctgaaaatcatgaacatgacaaaaataacccatgtgtgtattctgatggttcacgagaatagctttctgttgtccaggtttgtacgcagagtaatttttaaaataataatgttataatttttaaatgataaaagcaatacatgtttcatgtgaaatagaaattgtgctgaaaaaataaaagtaataaacattcgttttgaaagttgggaaattcagtaaaagtaataattttattttttacttatttatttattttttgagacagggtgtcactctgttgcccaggctggagtgcagtggcacgatcacgattcactgcagccccaatcttctgggatctggtgatcctcccacctcagcctcccgagtagctgggactacaggcacttgccaccacgcccagctagtttttgtattttctgtagagacagggtttcgctatgttgcccaggctcatcttaaactcctgagctcaagcaatctgcctgcctcagcctcccaaagtgctgggattacaagtgttagccactgcacccagccaaaagtaataattttaaaaatctgcacatccattatccaaagatattcactcttaacattttagtgtttttttttcttttcaatctattttctgtgtaaaattaaagagtttttttttaaaaggcactgttattatattgcacatgtaattttatatcctgcttttggcaggataatgttttggcttaactttacaacttatccttttaccatggtatcccaaacctttcctaaaaaccattttaaaagactgcatattctattttcttaattaatcccttaggttctttatggtttgggggtttttttttgtttgttcgtttttgtttttgtttttgtttttttagagacagagtctcgctctgtcacccaggctggagtgcagtggtgcgatcttggctcactgcaagctccacctcccgggttcatgccattctgcctcagtctcccgagtagttgggactacaggcgcctgccaccacgcccggctaatttttatatttttagtagagacggtgtttcacatataacacagtgaatatctgtattagccaggatggtctcgatctcctgacctcatgatctgccagcctcggcctcccaaagtaccaggattataggcgtgagccactgcacccggcctctttatggtttttttaagtataagtatgttctgataacaatattgacacctaaagctttttccatgtttaaggatgatttccgtaggatagcttctcagaaatggttgtttggtaggtgttactaaattgtttaccaaatgagctgttttaagtttactactaccaacatcatatgagcattcccatctttcttcatcagatatttttaaaaatcatattttatagagagtgccttttaaaaagtatacttataaatgttaagagacatattagaaaagaaaagaaaatgaagagctgtataatgaccatattcccaagctttctgatggcagaaaactgtagacaagctggaaggctgagctgaaataacagcaatctacatgtgtctaccccaaagcagtgattaatagccaccatgattacagaaagttgttcacatattttatcttgttttattttacttcatacagctgaagagaaacgtgagtattgcattacttttgctgccatttgtcagagtatcaatttaaaaaaatgatactattccttaattcagaaacatggctatttttcagcagtgtttattaaataatagccttgaaagtcaacaaagattcataatgaccatagatatcccatagcatagcaaataagctcatggcttttctggattctagtgtgtgtataaacatatatatatatataattatatataattttttaaaagaaaacctcatgcagtgcttttacttacttayttatttatttatttatttatttatttatttatttatttattttgagatggatggtcacccaggakggagtgcagaggtgtgagctctgctcatcgcaacctttgcctcccggattcaactaattatcttgcctcagcctcccgagtagctgagatgacaggtgcacaccaccacacctggttaatttttagtagagacagggtttcaccatgttggccaggctggtctcgaactcctgacctcaagtgatctgcccgcttcagcctcacaaagtgctgggattacaggtgtgggccaccacacccagcctgtttaatattttgaaataaatgacatagattagccaaaggggcctattgaatcttgccttagtaaagcaactccagcgcaaaaaaaaaaaaaaattgttgttcatttttgtgaccagataaaataaaaacctattttatttatttgtttgtttatttatttattttttgagatggagtcttgctgtgttgcccaggctggagtgcagtggtgcgatagctcactgcaacctctgcctcctgggttcaagtgattctcctgcctcagcctcctgagtagctgagtttacaggtgcccaccacccatctgactaatttttgtatttttagtagagacgaggtttcaccattggccaggttggtctcgaactcctgacctcaagtgatccacccacctcagcctcccaaagtgctatgattacaggcgtgagccaccgtgcccagccttaaaaacctatttkagataaaactataactttggttgtatattcccctcaatctcaaattagacttgtccttttgctgactgatagtaggtctgcctctgaattcctttgggagatgaaatgtggcagacgaaggcctacaaccttgtctttcctacacattaataaagcactgctgagaaacaagcatgtttttctggacctgttaagaagaaagcatgatattcatcttctcaagagtcttgcacttcctgtgttaataatagtaatctccaacttctggacagtactgcatagttttaaagtattttttgttaaatcttcataacaattctctgaagttgacgttattattattaacattcccctttatgatgatgaacactgtggctcccagttattatgtggtttgcccaaggccatccagctgttaatacacacattttctttttttaattttaatttttatttttatttttgagacggagtcttgctctgtcgcccaggctggagtgcagtagcataatctcggctcattgcaagctccacctcccgagttcaagcaattctcctgcctcagcctctggagtagctgggattacaggcacgtgccaccacacccagctaatttggtatttttagtagagacgtggtttcaccatgttggccaggctggtctcaaacttctgacctcaggtgatccgcccacctcagcctcccaaagttctgggattagaggcatgagaaatygcacccagcctatctacttatcttttgaaatataagtttcactctttcctttctataatcaccaccattccctgaaatttgttttgtttgtttgtttgtactctgtcgcccatgctggagtgcaatggtgcaaacgtggcttactgcagcctcaaccttctgggctcaaacgatcctcccacctcagtctcctgagtagctgggactacatgcgtatgccaccatgcttggctaatttttgaaaaaaaaaaaaattttgtggaggtgaggttctcactatgttgcccaaggctccaaagtcttgaactcctggcctcaagcaatcctcccacctcagcctctcaaagtgctgggattacaggtgtgagtcaccatgccaggcccactccccgaggtatttttgaaaggcagaactcttgaattaagagtcaaatttcagctgtggttacatgaagtcaaaacaagtggttgcttcagtggaaggaaatatcaaccatataatttctggtcatcatgtaagctgcttcttaagagtagagtttctaattttcaactgtctacagtggcttagagagatacaatcttagtaaaaacaatactgttttaaaataggaaacaaatagaaatgtgcagtcccagacaatgaatgcttgttctggaagagccagataccaagcaagtaggatttggtttctgggcatccatttccatactgtccttcctgaggcctccagcattattgctgcagacccagcatgactgaccagtttcatcatcatcctcattctcatctttataaccaactgtcctgtttccatttgcccttcatggtacatgcagcctcttccaacttctgcttgccactctcccttgagatgcatgtgcttgctcgtgatgcttaggaagtagtgacattatttctggggatcagttggcagtagggtgtggaggcattatcaggccatcgaatgcatttacttggtgttccatttgttccttcatggatcatgatgtttgccaaagaactacttatagcatccaaagatgcttttcggtttcagttgtttgagtttaacaaggcaaatagatgcatgaagtttggccaacatagtgggcttctctgttaactttgctgtaacaaaccaggttttaaaaactggctgacctgactgttattgttggggaagttatgaatcaattcctgtcatctccaatgtacatttcatcatrtactaagtcatatcatgtattatctcattcatagtccaaagctaaccccacacaccaaatgtctgtttgaccaatgctacacattacatcattcaatttaatctggtgctttatttgtcttaaggcatttccacatacattatctcacttagtgtcacaacagccttgccagcgaggttgggtaggtattagtattcccactttacagattaagaaatggaaatagaggaagatgtaggaggtgttaagtgcagagcagggagcttgaacacatgacatctacttaatttagaatagaaaatatggacttttgcaggtctgtatagacattaatagctgggggcatctttctctctacatacagtttgctctgtcatcctgtggggaatgtttctgtcttctactgttgctccaaatagctagctatttgccattgtcattattgctaccagctcttttctggaaataccaggaaaartattagaggtaataattattcagacagaaaacactgaggatctggagaacacagtggaacttaacagaaaggcagatacttgatggccatcaccatcctatatgatgacactggttttcttttcttttttgagatagagttttgctctgtcacccaggctggagggcagtggtgcagtctcaactcactgcaacctctgcctcccgggttcaaatgattctcttgcctcagcctcctgagtagctgggattacaggcatgcactaccatgcacaactaattttcatatttttagtagagacagggtttcgccatgttggccaggctggtctcgaactcctgccatcaagggatccactctcctcaccctcccaaagcgctgggatcacagggatgagccagtgtgcccagagacactggttttcttatatcctgagggtcttggggttattcattgccaaactaagaagcatcatttccccccattttaagaatgggaaaattagggtatgtacaagtaaaattggccttccaaggttcattcattattgaggcctatgtccacaagaaatgggacttccagcacttggtagtaaatgttagtggtcccctccctgcatacagcagcatatcaccaagttgtctggatttgaaaaaacaaggtttgatgtgtgagagaaacacagtatctgtcttaagtagaagaaaggccctacagtacacatttatttctcagaactacttagatcaccggaatcactggttctccttagcaagaaaaactccaaggaccaataaccctatccacatatttaacaccatcagaaaaactccaccaacctaatgggaagaactgtgctgcatggttcaaactatgaaatcaaacttagccttgccagaaacaggtgatcttactgaggtgctagtcctacaacagcccggtctcatctttaggaccatctttaggactgttctgaaatgtgctatgagaatctgacccatgtttctgagagcatattttcaaggtacccacacagaaacccactaaaaggagagcaggcactgagctctgtgttggaccctggttggaaagcaggagagccatgcacgcagcacagtccttgtcccatgccttacacatagcagaaactctcagctgacttttgaaaaggggcttgaacactaatatgtgaaaacctcttttagaaattgatgatgcaatgcgcaactttgctgaaaaagtgtttgcctctgaagtcaaagatgaaggaggtcgtcaggagatttccccctttgatgtggatgagatctgtcygatttctcatcatgagatgcaagcacacatattccatctggagactctgtccacctccacagaagccaggaggtaagtggtgtaaggggagtgcttagtatattggcacctaaggaggggtatctgccagggaagatatggttcaatttatccaaatgatggttcaactcagaggaagaactctgccagagttagcaattcctaagactgggcacagtggctcacaaatgtaatcccagcactctgggaggccgaggtgggtggatcacttgaggacaggaatttgagaccagcctggtcaacacggtgaaaccctgtctctactaaaaatacaaaaattagccaggcactgtggtgcatgcctgtagtcccagctacctgggaggttgaggcaggagaatcgcttgaacctgggaggtggaggttgcagtaagccaagatcaccccactgcactccagcctgcgtgacagagcgagagtctgtctcaaaaaaaaaaattccttttccccccaacactgtatatgctagagtgagtagagtgaggggccaatgatgaaaaaagaagaaagcagtgggcctcctatctcgtccatatctcccttgattgaagcctccctacccatctaagcaagaggacttcgagataccatagaattatttcagaccaaagtgggcaaatggctgctgtgaacatattcaatttacacacaatggtaatataaactgggactcaagagccttcatcttcagactctgtccctagccaaccttagtgttatgctccctgacatgaatcctgccctccagttagtctgaccacctcctggccttaggaatactgctctccaattctgccctcatgacctgcccatcccatgtctatgatgcatacttgctgcctcccccgagcagtctttgaaaatccctctccaccaagtctattttcctttatttgaaccactctaggattcactaccagccacactttagtccccaaacctcaaacctatactaactactttgctggaaccccctccttaggtcctccccccatcccaccagcttcatggggaaaagactattctgctgtctttctcttgattttacatctttaaggaaagaacagcaatccatctcctttggtgtcccccataggacttaacacaggacttgggtcaaagcaataaacttgggtcaaactcaacaaatacttgttgatttgagaaaataatattaaataccttataagttccaggtactgtgctaggcattttatatacattaaatctcatagaaatcctataaggtagtcatttttgcaccatttgttttagatgggtagatgggagctcctttatccatgtttaaggaacatgaataaaatgatacaggtagtaactgacatagcctgtgttttctgtagttcctagactgcctattctgctgggagtggactgcctgggaagaagggtgtcatggtgaaggtcttctagtaggattgctaaggccattccaaggtagaccagggagaggggcacaaggtcatgtgtcttcagtgatttctcctcccactatgcttggatcctgtttctgatacccaaccacattttaatttttactttttgtcctcagaataaaattgtatagagaaacatctatctatcacaatgaaaygcctgatgaagacaaaattaactcttacttttaaatttcgaacccagaaaaaagyrtttccaaggacggaagactgttaatttgtccattccactaagtgaaacatcttccaccaaactgtcccacattgatgaatacatttcctcatctccaacctaccagaccrtgcctgattttcagagagtgcagattactggtgactatgcctctggggtgagttggtccttgccactcagacttagcaaccaggaagccattcagcttgacagttctagctccttgccttcttctctttcctgttgagggaggtattagctcacctgtcctttgttacacttcattattgcatttcaatactaatatggtggtatgtcttatgtttctgttgtttttatcatcccacataatttatcctctatctcatttgcttgcacatggagaatatggagtagaatgcagtgtgtatgttacagaatacaatggacagattttggcaaaaaggaccaaagagagcagtagagtggtcaagtctcactgatgttgtcataaatcagaaaagggagcctctggggaggcacggagtctctggggaaaagaaggacccaagcagacctaggatagtgagaagggttgcagatagcataaaccaaccaaagaaaacagatccagagaaagagagagggaagagaaaaaagaaggmaccagagaaaagaaggaagatgagagagaggttagaaaatcctaacgaggctattgtttttttgacgacctgaactctccaatttcattacagatggttacacagtagatcattacttggaacagactctaggatgccacagggatagtaaagtcatgtcacaaacaacttgacctgcttgtctcatccagaacagttggtcaattaataaatctctgccacatggacttgcagaatcagcatcatattggtgaaactgctgtgcagccgtccgtcgatgctccaaatatagttttaatgaccagtgctgggtccccttctcatgtaactgacccacttagggtcagtcctaagatacttaaaagtgacaaggcaattaaatgcacctcattcttgtttattcattttctgtataacatgggtgctctctaaatggcagggggtttagacactaaataactaaaaggaaatgcctaatagagatgagtacaggggaaacacagtttggagaactccagaattcaaaataacataaacatttggagataaacttcatacctgcatgcttgatagaaatgaaaacaagaataaaaacaaagaagttaggaggacgaacaaaatgtacacaagtcaaggagtacttctcctcctgtgaaagctggagggcacctgaaaccttgacctggagactgggaaaaacgaagtatgtttctctaccagttggctgaatgtggctgggctgctgagcaacactctacgctctacctggttgtagtctgtacccaaattagtcttcaccctagtaatttaaacagagaggcaaagaggaaatcagggctcagttctcaagattattaattcctggtaaacactcgattcagtttaatcagtcttattgagcatctattctgtgctaggcattgtgtgctgagaacatgaaggtgaataagacccagctctcattcttgaggacctgatagackagtggcctattaggtggcaatgagctacgcatgccattggaagcagggaagcagacccccagacctagcatctgtgccagacgcttttggccaaggacagcaggtctttaaaatagttaaactaattcaggatcaatatctggaccttaaactactggggacaagcatatggtagtcccacaggaaaagtctttgggttctgataatgaacattcagtgatttcaagttataactacttgggcatgcctggcccaaccaggagttgggaatgggggcaggggaaatttccagcagstctaataaagctttcctctagaatctctcaagttttacccagaaataaaattctctttaaaatcatctaaacgactaacttctcacagaatgatgttgtgatccatygtagctgaagaaagccgtgcatgggtttgagagatttgtgaccccttattcatcccaaaatatttccctcactgaccgagtggtttgaattctcacaatttgagtcacatggtctttcagttgaggtattgtcttgtacttaaaatgttcacacgtacttagaaggaagaaagtatataccatgttggaatggattcttttaatcctatttgctagataatccctgctatgtaacaaaaaccagaaacaaacaaatacaggactacaagggaaagactagtaggacaggtaagtttggtagaaataaagaagctagaaaagcttcaggacctgctctgggagggagatccaggtcccaagtcaattaagaagcagccaggtgagtggtgagtctcagaatgggctgcgatacacaggagagctgggaggtgccaaggataagctttactcacttctcagtttttcgtgggattgactctgatatgctgacttttttttttttggcaggttacagttgaagattttgaaattgtttgcaaaggtctgtatcgggcactatgcatacgtgagaaatacatgcagaagtcgtttcakaggttccctaaaaccccttccaaatacttgcggaacattgatggtgaggcttgggtagcaaatgagagcttctatccaggtaacaattctcttacataatgtatgaaacatattttatttaaactactaaatattaaatttaaaatatgcctctagattataagtaatccagtctaaaaatatcatagtcataatcatctttggccccatttcctcacgtgtccaatcacttgattcagtctgcacaacatctctctgaactttttctcttcaccattccctaaaccctcattcaggcttatccttctccttgcccagattattgcaagagcttcgtaactactctgcaaaatttcagtctccctctcttttggttcatctttactttggtgctaatttttaaaacacagatctgagcacatccttctcctgacaagaacctttagctgctccttgctacctacaaagcaaagtccagtctttagcctggcatttgaggcccacaccctctggccccctaactacattttgtttgttttctgagacaggctctcattctgttgcccaggctggagtgcagcggcaccctctcggctcactgcaacatctgcctcctgggttcaagcgattctcctgcctcagcctcccgggtagctgggattgctggtgtgtgtcaccatgcctgtctaatttttgtatttttttgtagagatggggttttcccgtgttggccaggctggtcttgaactcctggcctcaagcgatctgcctgcctcaacttcccaaagttctggggttacaggcatgaggcaccacacccggcctgtttatttttgaacttgcacactcaacctatttctgaacttactttctctgctccatttttatactgttggttctggttggaaatatttctcgttccctacatagttcaacaccttcctgctcctggattgctgctctgcttccctgtgctcaggctgtccttcccctcacttattcaccacatgcccaagtctccagagccaacccaatctttcaagaggcagcccaaatactatcatttcttgccttctggatagatgtaaactacatgttctgactttccatagcactttatttacttatctcagtttttaccttctgccttgtagaaagttaagtacgtatttttcaacaatcagattttaataattttacagatttctattatataactggaacataattgacttaattcctatttttaggcaattaaatttctgactttttaaaacttgtttctaaaaaaggtacaataagcatctttatatacacatcttcctgtaattgtcttacaattttaggattacactcctagaactaaaatttctggggaggcaaatatttaagatttttgaggccaggcgcggtggctcacgcctataatcccagcactttgggaggccaaggcgggcggatcacgaggtcaggagatcgagaccatcttggctaacacggtgaaaccccgtctctactaaaaatacaaaaaattagccaggcgtggtggcgggcgcctgtagtcccagctactccggaggctgaggcaggagaatggcgtgaacctgggaggcggagcttgcagtgagctgagatcgcgccactgcactccagcctgggcgacagagggagactccgtctcaaaaaaaaaaaaaaagatttttgaagttccaaattgtaatattattaaagatctccagttctacaactccctgtctgtaattccttttaatattaaaatcatattaaacatgtctccagtttggtaacacataacagtggttttcccatcctctataatatagacatttagtttgtcttrtctttatttctcctaagttacgcttcaataataattatatcattaatagtgagttattaatccttaagtataaggatttcaaaattaatatttgatagtagtaacaaatattgtagtaacacgctgtttcacttctcttatgttccttatctcccaattttgaataggaaatgtgcagactgttttttttccctatgctatttttctcactttggctgctgtgggcatcacttgtaaacaggaggctttctgatgccttcctcgggcacagcagtgaagaggcataaatgaccatacttgttgaaagtcaaaaggatgaattcttaaaggctctgacggtgcgaaatgtgttcatggcttccttaggctgaaatcgctagcagtggaaagaagggaacacatccacttaatctcttctcagttcctttagcagaaattgtatgtgctttaaaaggtgggaaaaataattctcataagaattatcactcttacaataataatttattttatatctcttttttacattaaaaccactttaggtggagcacagaggattcttaggggagtgaaactattctgtatgatactataagggtggatacatgtcattatacatttgccaaaacccataggctttgagtgaaccctaatgtgcactatggactttgggtgattacaaggtgttaatgtatattcatctattataacaaatggaccctctgatgcaggatgtctagagtggagactggctgtgcctgtgtgggtaacgggctgtggggaaattgcattttctttttctttttctcttttttttttttttttgagatggagtctcactctgtcacccaggctggagtgcagtggcacaaactcactcactgcaacctccatctcctaggttcaagagactctcctacctcagcctcctgagtagctgggactacaggcgcacaccaccacactcaactaattttcgtatttttagtggagatgaggtttcaccatgttagtcaggctgattttgaacttctgacctcaaatgacccacccaccttggcctcccaaaatgctgggattacaggcgtgagtcactgtgcccagcctggaaacggcattttctactcaattattttactgggaacccaagactgatctttaaaagcttatttcaaaaaacactctaaattacgcctaataaaaaggattggcttaaataaggtaaagatctaaactctatttttttaactgtagtttgacttttattcttatgttattatctaagagctaataatatgctctaaacagaaagcctttgatgacaaacttcagtaaataatgaagattgtttgtaagtagtatatcgattactttatgtaaatagttcttccaaagaacttgaaaaatcattcttacactagacaacatattattttatttttcttttttttgagacagggtctccctctgtcgcctaggctggagtgcagtggtgctatctcagctcactgcaacgtatgcctcccggattcaaatgattctctcgcctcagcctcctgagtagctgaggtaacaggcacacgccgccacagcctggctaatttgtgtatttgtagtagagacggggtttcaccatattggtcaggctggtctcaaactcctgacctcaggtgatctgcctgccttggcctcccaaagtgctgggattacaggcacgagccactgcrcctggccaatatattatttttatagctattttatactattatgtcacctttaaaaaataatgcaaaaataaaggttagcttaattccagataattacaacttaagtaccggattccaagctaatgagatgttgtagtatttcacattttggttattwttatgtggtcgttcatcctatgtgctaatatattactctgtgtttgattgaaaaagtcttyactcctcctgtgaagaagggagaggaccccttccgaacagacaaccttcctgaaaacctgggctatcacctcaaaatgaaggacggtgtagtttacgtctatcctaatgaagcagcagtcagcaaagatgagcctaagccacttccttacccaaatctggacaccttcttagacgatatgaattttttacttgctttaattgctcaaggacctgtgtaagtgtttagtgagacctaaacaacaacaactagtactacaagacctaaacaacaactagtactacttctactgatagtgagactaagtatttactaaatgmttactatgttcaaacactgtattaagcccttcatgcacattgttccttttattgcttacacttttcactgtgaggtggttattttcataattccagttttatgagctgagactttgatgacttaagtaacttgcctaaagtgacacagctggctgagccaggattcacactcgaatctgctgaccccaaactttgaataacactctctccattgagttttaagatacctttcmaagttctccctcattcttatgtccaacattattgaaaagattaagcctttggagcccactacttytcagtgggattaactgcagagtaaactaaaaggtttgttccaanaattatttcctatgaatgataaaggtcctgatagttttgaaattgtgactgtttttcttgaatgcctgaaactttttggaattatgtgattttatttttcacagtaagacctatacccaccggcgcctgaagttcctctcctcsaagttccaggtccatcagatgcttaacgagatggacgagttaaaggagctgawaaacaacccccaccgagatttttataactgcaggaaggtaaacattttagttgctcaggggtaattcstgggcaaaaacaattcaattatttattgagaagcacaagaaaagagtgtgtttctgatkaanctaagatttctacaggttcagtggattttagtaaaaacagataatagattatgtccaatgggttagggttaagtgccatttctatcgttttccccatagaaaggtttgccacatttttggcacaaaaaattatagttatcctcaacaacgaaaatagcaacaacaacaaaacatcaaaaatgaccattctagaatttgaaagatcttccttctagtcctttttctttgaattcctgactgtaagaccttggaggaagggatgacatattttcatttcagtgtcttcatttgtcaaattgggaactacacctgcacaatccagttcacgtgaggattgtgaatatcaaatgagctagcctagagattgtgaaatccaataaactagacacacttccaagatgtattctgaccattaaaatgattacaaggaagtgggaataggaaatatatgagcagagattcaggcccaaatcctggctcagctgcctatacaactttggactaattacttaatctgctgaaatttcagtgtataaaatttagttataagaatatctacctcataaaagccatcactgtgtcatggcttcataatttcaatcctttctccttaggggctgaaagttatggtagttacttcacttccagctgtgttttaggagtgaagaatggtccagaagaatgtgtggatcagacgtaggaaataaattggatgtacagatatacagaagaagcaagcattcttattgcctctagcctaacctttcacatccttgcatgggcacgccacagttgtaatggattttttattgctggaccacctccaccaactgtcagctcacatcctcattattcactttgtcccaacgcagtgggatttgcagcaccatatcctctaaacagagtagcataactaaggctgattgatgtttttttctttctttgaatatacatacaggtggacacccatatccatgcagccgcttgcatgaaccagaaacatctgctgcgttttattaagaaatcttaccaaattgatgctgacagagtggtctatagcaccaaagagaagaatctgaccctaaaggaactttttgctaaattaaaaatgcatccttatgacctgactgttgattctctggatgttcatgctgtaggttgaaacggcaatgtcagtttcactctaatactcagaaccccacatgtctttctcctacaagycctcccttctcagaggtctcttaaccatcttggcttaccacgctgcctgaaagcaccacagacaattttgaagtttgctcattgtcacctgtcccaaattccattcttggagcccaatgccctccmccactaccagaccccagttctgcttgactatttcctagctctctctgtccagacagctctggtaataatacatctctgctcttttttcctgattcagggacgccagaccttccagcgttttgataagttcaatgacaaatataatcctgtaggagcaagtgagctaygggacctctacttgaagacagacaattacattaatggggaatattttgccactatcatcaaggtgaggcggaaccaatcacatctatggtatctggcatggttcttgaggaaagggaagaaggaaggaaggaaggaaggaaggaaggaaggaaggaaggaaggaaggaaggagggagagagggaaagaaggaaggaagggagggagggagggagcgatccctggggccaaacactacacaaatgaatataaggatttcctctgacacatccactctaatgatttttgaagacctctattgctaaggtagagaaattaagggtgtggttttgagattgattaaggacctagccttttcagattctgaaaggaagagttagaaagggaatctcctctccctagaaccccagaggaacttgtgggaatccctggcttggacttctctcttggctttgcaggaggtaggtgcggacctggtggaggccaagtaccagcatgctgagccccrcctgtccatctatggccgcagtcctgatgagtggagcaaactctcctcctggttcgtctgcaatcgcatccactgccccaacatgacatggatgatccaggttcccaggatctagtatgtacctgcccatcagaaactctagagcctgcccttgtctcatctgcttcaagtcccctgtatgaacaaggaacgtgttgcccatctagaaataaatcagctttgttaaaacagcattcactatcgggtcctgcatgcttggttttgtccactctgggtacagcactcttaaccacagacaggagttaagaagatcatttcggatcagtcctctagctttatgaagatcataaataactcactgagaatgattaaaactaagatagaataagaactatgtacagtttggtatacattttctttcacctggtcttctctgtgtcaagtccattccttcccatgctcatctctactgggatgtggctttcttgtatcagaacctttactactgtctgtcaattgtcccacctacaagtgctcaagttctccacaatcaatgagtatttatcaatggtattgctgaggacatcatctccctttcataccacctgctatcattcatcgccttcagggatggcttctctttcagtttgttcagtatcattgatcttttatctaacttgggtgtttatatgttttctggctacctgtctttgtgttctgtgtgacctactgcaatgcaagagtttcatcctgtctctttaaccaaaamaagtaattttttgactgggataatacttcctaataggcagagaggcagtaggttggttaggagtatagattctggacccagagtggtgatacttgaatcctggcaatacttaaatcaaggtaacacaaccatttagctgtgttaccttggrttaagttatatcaccccattgtgccttagtttcatcatctctaaaacaaggttaaaaacaatacctaacttattgagttgttwtgaggattacattagctaatatttctggtcacttagaagagtgcttggaatatattaaatgctatatcagagtttgttaaattgcagatcagaggtattcttggtaatcatttcctgttcactgtcttgtagttacacacatatattgaagcttttatgacgtaattgcatattcctctatgaggacttagctgtgaaggtttagttttcttatgacaaaggtttgtaaaaaagatggggacatagggtccaccaaaaaatttttatttcctatgtgctgcccaaactgaatccctctctataggggaccaaaaagaatgtatgaggagcatggacctaggatagatataccacgtcttttcctgtgcatgacattcgattctctggttccctcatactggggctatcagtcctaaaaatctttttttctcctaaattctcttcattcttgcctctagtgatgtgttccgttccaagaatttccttccacattttggaaaaatgctggagaatattttcatgccagtgtttgaggccaccatcaacccccaggctgacccagaactcagtgtcttcctcaagcatgtaagcatgacccttcaggccttcatactgctgctcatgaaccagccttcctacctggtcatgactaattcttggtgcttatcthtttatgtttggtctgtgcctttggacctgaaagtttgtgtgaggactgggaccctgaagttggactgaacccattgcatggctcacttttcctaacagatcactggctttgacagtgtggatgatgagtccaaacacagtggccacatgttctcctccaagagtcccaagccccaggagtggacattggaaaagaatccatcttacacttactatgcctactacatgtatgcaaacatcatggtgctcaacagcctgagaaagtaagtaggagacagctggagctaggagggtctatttgacacagctctttccacatatattggcaattaaggtggtcaggggcctcatgcattactgtgatggttccaattggcccaaatcagaaatttctttctcttaacttttttcttcagtttatttattttggggcagaaatcggtatttcgatgctttcaataactttcacagttcctttttttttgggaagtttaggaatttatactaatcattgtgcaattaatgataaaacttcatatattttgcccttcttgatatatttgggtaaggaataagtagaggaatattatactggagttttctggaaacatttctcccttaaaatttgaatagaatagaataaatgatgagatgttgatattggtaaatttcctattgagactgaacgtatttccatccaggcaatcaacactttatttgcttccttacccccatatcctctgctgcctctttttggaaactttgtatttagcaagaattaagattatgatttgggactgttttgctgaatcctttggatggcttacttccttccagagtgttcacttttctactgaattttcttgtgaatcactccatacccagaacctgcgattccaatagcagttctatttccccagggaacgaggcatgaatacgtttctgttccgacctcactgtggagaagctggagccctcacccatctcatgacagcattcatgatagcagatgatatctctcatggcctaaatttaaaaaaggtgagttggaagctctcttcttaacttttacattggagctagaggaatcttttttcccttaaccaaccatactgtcacaagtcattatcgacactgcaatcataatcaagtagagcataaaagattttttagtttagtgcagttcattctacagaaagaagtaaagggacttgctcaagattaccttgctagttgctgtcagataaaagttaacgcagatctcctgacttctagcttagaatcctgacaagggataattcagagatggcctggctttccttaagctagtttttgccagatttcttgttatagcatgcttcaagatgtttttttgtgagagtcagaactttcttgtagagagagagagaaaaaataatgtttcaaggcaaagtcttttgcctgagacagaccatctaacgtaggccattatagatcaaataaacaatctggtttgactcaatgtttctgaaaattaatgtatcctaagtacatttattctaaatagcatttacattgaaaaactcctaaattctccttactaagagacttgaagaacaagtgataattttgttgaaagctgaagcttaaggcagaccatgagattgtagtgtttctagtttgtattcctttttcaacatctttaaatatttttttacttttctttttcagagtcccgtgctacagtacttgtttttcttagcccaaattcccatygccatgtcaccactaagtaacaatagcctatttctagagtatgccaaaaatccttttttggatttycttcagaaagggctaatgatctcactgtctacagaygacccaatgcaattccactttaccaaggtatagtatggacttgggcaatacaagcatattttgctggactgttgtttcccgtccagaatttgaaagtcaaataaaggtatttcattattttttcaggcaggatgcatattatttattaattcactcctcttttwtcctcatttaatataactgcaggagcccctaatggaagaatatgctattgctgcacaagtcttcaagctgagcacctgtgatatgtgcgaagtggcaaggaacagtgtcttgcagtgtggaatttctcatgaggtagacctgtcttcaaatggcttcccttctgagtatagggtctgctaacttgaataccgaaaaagtagttgggaaacacatgtagaaaaattgttccacgaatcatatgcagttactatggacagggactagaagggattattctatctctttgcctgtgccttttgggccagggaagtaaaatacacttgatttctcagcagactgtgaacactgaggcactagatgggtgcttttaatggtctattattattattcttttgtcagtggctaacataaggaaggaatttttgtaaagaatgcaattattgtctataccagggtgaaaagagacaacaatcattctgccatccttttctcttataggagaaagtaaagtttctgggcgacaattaccttgaggaaggccctgctggaaatgatatccggaggacaaatgtagcccaaatccgcatggcctatcgctatgaaacctggtgttatgaactcaatttaattgctgagggtcttaaatcaacagaataaaaaaaagtaaaccaaataataatatgagtgagaatttcattgtagagtttgaataataatagttacctgttattgagtccctactataaaccaaggaaagtattagatgttccactgaaattatttcatttaatccttctcacaacctttataaagtagatattattatctccattttgggggaaattagtacactaaagctaataaggttaataacctgcacaaggatatacctggtgaagggtagcagtgggaacgtgggtttctctgactgcagtctctatgactttcaggcaaaatatctattaaagctgggcaaaaatacaagcaaatgactttttgggagataggcttctggtttatagcatgaaatttgcttaaggcacttagaaccactaaaaagttctttgacaaggtataagtgaatagtggcttttttagacaaaaccagagggcgtacctcaatatagaaaatcagtatttatgagttattatattgagggagaatttatcttacaaaaggattcttagctttaaggatgtaattgacaataagattatagtgagctaaactggtacattttaaatgattttgcttaccaaagtaaaatgtacatataacttttaagaagcatgcctattacttaaggtcaggtgaaattccaaatgggcagatgatacttccacacatacaactgtgttggcatctagtggctgggctgacatttcattcaacttattcaataaacaattattgatcaaatagctaaattatcaggtactattctaaacaccaaaggtatacagaataagatttcattcctatcctctagttgtcctcagcatgaagttatagtgtggctacaagtaaaaaatagaattttgtgaaatgtcttcaaaagtaatgaacttttttcttttttttgagacagggtcttgctctgtcacccaggctggagtgcagtgcagtggtgtaatcacagttcaccgcggcctcggcctcccaggctcaggtgatcctcttacctcagacttccgagtagccaggactacaggcacatgccaccacacccagctacttttttgaaccttttgtagagacgcggtttcaccatgtcaccccagctggtctcaaactcctatgctcaagcgatccatgtgccttggcctcccaaagtactgggattacaggcgtgagccactgtgcccagcctgaactttcaaatggaaaaaaaattgaaagcaaatttctgcacgtttctatattctacacatgcagccataagcataggtgtaaccctgatggcatgtttgtactagctctggtgtaagaatctcttcctgatttctgaagttgaagttttgtttgttgagtatttgtgaaccctttaaagaaccagattttattttaccttggcctcctcatcatcaaaatagtacaaattgctacattaaacactgtattctcagacttcaaagggcattaactaccattatgtatatctccatcttacccatgagagggcagtagaatacawacatgtgaattcatttattaatctataaatttggtttcatacgtgatacttggaattcaacctgccttattttgccaaataatcttcctgaatgcaggggtcaaaaaatacatttctgggctgggtgcagtggctcatgtctgtaatcccagcactttgggaggctgaggcaggaggactgcttgagctcgggagttggagaccagcctgggcaacatagcgagaccctgtctctacaaaaaaataaaaataaaaatattagccgggggtggtggtgcatgcttataatactagctgcttgggaggccgaggtgggacgattctttgagcctaggaagttgagacttcaagtgagctatgattgggccaccgcactccagtgtgagtgacacaaagagaccctgtctcaataaataaatagatagacacattatataagaatttttttttttttggtgggggaagcccataatgatcagtgtgcaaaatttactacaaacaatatccacatttatttcctcattgggacatgattttttttaagtatgtcattacttttttttcccccatcatagaatgtaatttctgttttactgtctacaggtgatagtttcacaacggtttgggatatgctacctttattgtttgggttaagtttgcttgtgacagtcatccgtgatacgtaactaaacacctctctttctggtagtcttctattttggtacctctgtgtgaacaaatgtaggaagagtttggtcaccagacccaagaggctctggctgggtggggtggggtggggtggggcggggcgaggcggggtggggtggttagcgagtgcctgggaaacaggctcaactgatccttgtcccgcagcctcggtgaaactgggttacagcttgcagtaggcacaacaccacgcacatacctaagcaagagcgtgttgcaggcggagcgcttaggcatgtgtgtctcaacagggcgtgggggctgacctcacgcactgggagtatcaaggcacccccgttctgagattccaagcctgaggtgccgcgagagttatttgcttctcttgacgtttcaagttggcaccgtagtgcaattgtttgctcactgaggtcagcctaggaaacagtgcttggattccctgattaagccaggctttatcttgttgagtagttgtgaagagtaaaccttcacatgaagcatagggccgtctccgtggggccgatgcgacggcaggcgaaggcgatggagctctggctcgagggcttggccggacgacggtgacactggtcgcccgcctgctggaactgcagtgaccgaggtcctggcaaggttctggccatacagcggacttgaggcgtggtggttcccctcaccgccggccggggcggtgtcggaggcgggcatagcgtgaggggtgggaataggagccaataagaactgagccttgccagggagggcggggctagggggtggggctgcagccgggacggggccttcggcagggcctgcgggggcgggacggagcggacccgagtgatacccgggagactagcttggccacaggagacaacgttgaggtacagacaggtaagagtcggggtgattcggcgcggggtttyaagccgcaggggcttcggactctcggggctgtcggcatcacccttctgggcgtcgggtgcggggctgtggcgccgcggcgtagtcctcggacggtgcgagccgagctggcggaggtggtgtctccgcgccccgctgtctcggcacctcctccgtccggaggagcaaccggttgttgggcccagctttgggacgtcctctcgtggccgcacgggttgtggcggagcctggctgaagacctcctcgctacctcaggggcttggggacccctaggctgggcgccgctctctgctggggaagagggagggagcgcccggcagcctggggaaacgcgggctttctccaaaattagccagtgagcttgaacttcgacatgctgggacgatgcacttccaaacaatattttgctttttttggtgttttgattcttaacagcatctaatacgcacaataccgaaagttgtcaagtagaattttaatttaaaagtctgacagtggaacacctaagagcttttgagtaactagagctgtatagcagctgatgattagattatgagtcaaaaggctcaagtctagggccagaacccgcggaaccagatgtgatacctcggccaaattaacttcctgggcctctctttccgtaactgtgaaactggcaagttcatgcctatgggtattctcagggtcaaatcagatgagtgacagtattctacaaatgtcagatatttgaacgtgcgtgtggagcgtgtatattctgtgaagcaactactacttgcctggtacatagtaggcactttacaaacgtttaccctaaagctagtgattcttctgcagtgttttagataaagtgatagatccttgcttactgtgtaaataagttgtttaaacttttcccacaaagtgacccccattgtttgagtgtgtcctatttttaaatgattgatgaaattttctagaatagcacagtggtgttatctatacactgttgctgaatcatttaccgcgaagtctgtagcaatcaaataatctacttctttgtcttagctaaatagttgtagtttaagatacctgctaaagtaagctgggaatattgttccaaatcaagactttaatttgtttttgtgaattgacgggctgcttataggaagatttaaatcttccaaaatattgttaatatatagccatattttttcatacagcctttattatagacgtttttgttctttactatggatatgtgtgcgagggattttagcggggagatgggaaataaaaaagaaaatggcagttttgtaacctgtaggcttttgctggggatacttgtaggcctgttctgagtttgccaggcagaaaccaggaaatgtagtaattatgtgtcttggtctttcattagttggggtgtgtgtgtgtgtgtgtgtgtgtgtgtgtgtgtgttgaatgtggcagtacgttttttaaatgcagcaataaaggaagaatatttatttttcttaatgacaataagcagttttctaaagctggaaattatattacttttaaatggtctgtagtgagtcttaagttataggcaagaattttagaccactggataccaagatcaaattaaatgaagtagtagagggaaagttactagtgaatgtaatttttgtgtgtgttgctttagaagttttacttaaacatgtttcagcaattcagtggaggatgggtcttttgaagctactttaaaacatgagttttaaacgtactccatgtataaatttttctgtgatttacaatttcttgatcttggaggtctgaaaccttacattcacattgttttttgagggcctactacacaataggcacaagattatatttatgtaagagcagtatgtaattcctgtcatctaggagattccattctaccaagtgggctaaaataagtactgaaaaaacaaaagctgtttttaaagcggatggtaacaataacaacatcagctatcattcattggtacctattctgtgccaggcagtattctaaattctttacatgtattagcttacttaatcctcacaacagcaccatgagggatgttattatgattatctcattaagaggcatagagaggttgagtaacttgcccatgattagacaacctagatagcaaaagtaggattcaaatcagtcattctccaaggacctgattgtaacctttgcgctatactgagtttcaaattctgtgagtgagatacaaatgacatctaataggtattttaaaaagaggtctataaaaaactatttcaaaaagaaggaaagaaagaggaaaaaataaactggtattgcaataccagttttattgcaattaaaacgatgtaattatagtttatctgtgggaaccctttttttgttattgttgccagtgaatgacatggggttgattctaagctctcagtccctcagtaacaacagttatggcattatcttaacaatatgaggtgcttatttttcattaaaaagcacctcataacttctttcattaagaagttaaaaatatctgttctcagactgtaaattaagtattagattcaagaagagaaaatgcttccctgtctttaagaagcttataacccaacatgtaaataagtctctacaatttcagcatgataagagctgtaaagaagtatagatttaggtacgtttgaagagttgcaagaaaaagaaagaagtatagatagaatttaaccactgatgaggaaaaatcattctgcgtgtggtagggaggacgattagagagaagatattaaatttggctttgaaggatgaataggagtttgctgaaattgggtcaggaaacaggagatatgaatgaaaac

SEQ ID NO: 95771 - DNA, 39125 bp, Homo sapiens
aagccattctaccaattattgtatcaactgttaagttactctctgattgtactgctatctccaagtttttcttaattcatagcatttactagtaatcaaggaaatgcaacttaaaaccacaataaaatatattttcacatcttaaaatcagcaaataaattataaaagtctgacgatatcatgtatcagatagaatgaggaacaaaaagaatccttcactgttgcagggagcataaattggtactaacattttaaagaacaatttatcaccatctagtaatgttgaaaatatgcatattcaacaacctagccattccacagctgggcatgtactctggagaaactcttgaatgggtgtacaagtaaacaagcacgagaatgtttttgtattgtttgtattagaaaaaatggagagaatataaatatcaatgggaaagagctaaatgaattctaatatatctatatgagtttttcacataataagaataaaataaagttgcttaaattagaaaatagatctcacaaaaacaatgagcaaaaaagcaagctgaacaatgcatatgcctcaataaattgttgtaataatataatgtcttgattcatacataggactttgaattttcctctgttaattagaactaattctggaggcaaatactcctgctcccaatccccatgctgggaggtgatgggtggaagcatgaaggaagaaaaataatcccggctgttacataagctctcatttatttaattacttggattaacatcccacaacctactcctcttccaacggtgattaagagcatgtagtgcatagatggcctagatttaaaaccctccttcttgtgttttcagcattttacttaattattctgggtatcaactttctcactcaaaaaatgcagctaacaagatttacttttcacaagattgtgataacaagcaacttaatctacgtaaaacttagtgcctggtaaataataagtactacataaatggtaggggttatggagcctctcacagtttctactgataagaaaacctcccatctctgctccaggcttctctcatccattctggggcacggtttctcctctggtttgtcaagatgctcccatgcaaattccatgtttcagaaacatcgttgatatctagtccacgggttggtaaagacttcttagatatgataccaaaagcacaaacaaaataaaaacaataaaatgtactttatcaaaattaaaacttttgtacttcagaggaaaccatcaagaaagttaaaagacaatgcctcgaaaaacagaaaatatttgcaaatcatttatctgataagagaattgtatctagaatatataaagaattctcacagctcaataggaagacgaaatgggcaaaggatctaaatacacatttctccaaagaagatatacaaatggccaacaggtatattaaaagatggtcagtatcattagccagatggtaaataataggaaaatgtaaacaaaaccacaatgagataccacctcacatccactagaaggggtataaccgaaaagaagagttggagaggatatgaagaaattggatccctcctacattgctggtgagaataaaaaatgttaaatgtgctttataaacagtttggcagttactcaaaatgccaaagatagaattaccatatgacccagcaatcccgctaaacatatacccaagataaatgaaaacatatgtccatacaaaaacttgcatatgaatttagatagaatttagatagaagcattattcatgacagccagaaagtagaaacaacccaaatgtctatcaactgatgactagatgaataaaatatgatattcatacaataaaatactattgaacaataaaaacagaaggaaccactgatacatactgtactatgtgtgaaccttggaaatgttacactaagtgagataatccagtctttaaaaaattgtatgatttcatttatatacaatttcagaataggcaaatctatagaaatggaaaataaattggtagttgccaagggctgggagtgaggggagcttgaagcaaaatagaaagagactgctgacagatacaggagatttttcgggggagggggtcgtgatgaaaatgttctaatgttgattgtggtgataattgtacaacctgtgaatatactccaaaccattgaattttacatttcaaattgatgtagtttatagtatatgaattacattacaaaactgctttttaaaaatctgatgcacagaacacttccctttctcagggctgtcatggatttagttcttttgtataactttcttaccactttaatgagatttttgaaagggttagcaaatgtgcttgctcagtccactcttgattcagaagctttggagggattatttttaaaaagaactgcccccaaaaatatagaggacacacagaagttatggaactatatatgtcacacaggaaatgcagatgggttcatacaaaaaaaaaattgagtcataggcgagggaagagaaaaccagtttggttgttatttctctaaggtataaggcaacttaatgagagaacttgttggtttgttatttctctaaggtgtaaggcaacttaatgagagaacttgttggtttgttatttctctaaggtgtaaggcaacttaatgagagaacttgtcctcacaactctgtgcttctcaaaaagtaccatgtggttttaaggagttttctgttgaaatatgtaacagaaagttaaaaatgaaggaggagataccagggctgatatgtatattgttcttatgataatatacacaattaagggagcttggactcatccaagaatggttcaggggggtgactatggggcccctaaccatgtagaggggtgaagggggccaacaccctcttattctcctatagtaaccggagtattttcaaatccaaatacttctcagcatttttatgcctatcttaaaactttaattgatgataagatttcacatctcagaccctagactcttgcagttagtgacattactcctctttcacatgctgcctgaattcctctcttatccactaacaagtggtcatctaacctttgtttgatatttacagtgatagggagttcactactatacaaaacaactcactctatatttgtacagcacggttggctagaaagttctttctcacattgagacaaactcagtttttttgtatcattaacatatgtaatcctagagagacttgtttctacccaaaataggcttgtatgaccttttctgtataggaaccttcttgaaggcaattgtcatggatttttcaatatctcctctaggctaagcatcagaagtttcttcagtggccccttatgtgacatggctttaagaagttcattgccatcttggttattcttaaattctctggtagctaaggcaagcttatttccacatgcgtgaaagatggatgggtggtaaggcctatggtcctgaactagtaaatgaattaacatatgtgatagtatttttacaacttaaaacactttgtaaacacaagatactattaaaacatatctccttcatagaaggcaacttggcaaagcatattagaaacttgcaactcaaaatatggtctaatggtacacctggcatcacctggaagcttgcaagaaacaatttcaggcccacctcatatccattaaatcccacctgcattttgacaagatctccaagtgtttcatttgcacattaaagtctgaggagctctgtaaacttaaaaatatgcaaacactttcactaagcaatccttgtttttaggtatttatcctgagaaaatgattaggttaagtacacagcatttttataacagcaaaatcttacaaagaaagttccactaatagaaaattggccaaggtgctttacggttcttctatggatacaccatttgccagccaaggctaactctataaagcaagctggttcttctcagctggtgctggtacctagaagatgcctgctcctcagctgatgcatgccaccatgaacacagatgtatgtttagttgacacaaaaggccattaatatccccacatcagttatccctggaggataactaagccatctgcctccatcatcttttaagggttcagtcagtttaaaactttgcttctatacctaggtattttcttttctctgtatgttggtcaggtacaattatttttaacagggcttccatcaatatcataactacctagagaagacattgcaaagataaaattggagaattgttaacaggctgttaacaaaatgtgtacccaactgccaatgaagtggcttgatttttttctttttttaaaatttttcttttgtatccttttattttatttacttattttttagagacacggtctcgctctgttacccaggctggcgtacaatggcacaatcatagcccactgcagtctcgacctccagggcctcaagcaatcctcccacctcagccttccaagtagctgagactacaagtgcatgctgccatgcctgactgattttttgttttttgcagagatgaagtctcactatgttgcccagtctgaccttgaactcctagcaataccctaccctggcctcccaaactgctgggattacaggcatgagccactgtgcctggccttttttcattttaactgagaaatgtgttcagctcttttgttccttagtcattgatcatcacttttgttatatctgttagtcttgtcatagagttgctgcacttattacacagagaaggccttttatcacgaccaatttattttaggaaatttcagggaaaacgtttttctagaacaccttatttgacattataaaacaactcttcactcttgcactccagacctccctttccagttttctttttctccatagtggtcatcaccacttgttttattttattgatgggctgtctggctccctcaactgcaaagtaaactccacaaaggcagagagttttgtctcttttattcattgctgtacctgcatcacttagaaagtttctggcacctaggaagtgttcagtaaatatttattgaataagtttatgtaaaacgtctcagactccttagagaaactggtcttttggggttggagaataaagttctttacctcatcagttagactctatctaaggtacacgagggcttgctagtctcctaagttagtctgctaataaatgttaaccctaataactgaaattattagcagaggtaattatccagttctatatcaaggcaaaaagacagcagtggatagaaagatcttagaagtcccactaggttcatccaagccaccatacacataggcagaaaaatcaaaataagatatgagcctggacagggtgagcaatctgggaaaagatgaacacagtatgctaggacccagaaatcatcaagtctatgaaaactaagccagaacacaaatgtgaattccataagatcaggaacataatctgtcttgttcatccaggcatggtaatctgccagaaatagtgcttaactgcaagaactgaatatttgttagataattaaaccatcaactaaatgagattcatgcaaccatgaaaaatgctgctataggtacacaatattgatatactagaaagttaaaaaatcaagttggaaattagactattccatttctgtttgtgtgtatgtatctacaaataggtggaaggatataccaaaatgtcaacagcagttacctctgggtggtgaggagtaatcttaaccttgttatttatccctatatgttcatttgtgaatgaatatttattacatcattataaaaaggatttttaaactatctgtatgtttaagagtatatgttgctactatgtaagagtatatgctgttactgtaaagacattgcattactactgttgacctcagagcacgmgcctcttgcctaattctaggactcctaactaagtctttggagtttcagctggaagaatgctggaggaatacggaactcctcccatttctcacagccacctccaactcttaaaaaygcttccaactgcctcccagcacacaamcaagggagaaaactattctgtcaaagagacggtgccaaaaggcaaaaacaaaggtaaggatgatcgctggggaaagaagctgaaaaggaaaagctcagaactctagctggaaatttggctcacatccctagtatgttactgcatagtctggctttgttcaatgggtcgcttttaaatattaaagctagatgtaagcaaggtttgcaacaaagtccataagaaactcagcttttctcaaaggcaagaagagagcaggatttttgactggctctttattcaatagtgctgcttattaaattaccactgctacaatgtttaaagccaattacctgagcacatcataaggattctcttaccggttgtcccagttaagtaatgttgattgatcaactccttgacaggagctgatggcaaagaaggtagctgtgattggagctggggtcagtggcctaatttctctgaagtgctgtgtggatgagggacttgagcccacttgctttgagagaactgaagrtattggaggagtgtggaggttcaaagtaagtgagattttcttgggtcttgaacaggttgtgttgttatttcarggtgaatcacagttactgatgggtcayattgagaaatttattaaacaactctgatcagattttatttctayttattgatgtggccataatggaactgaagtcataggctggcatctctcccccagtcaatactaacccaacccaggtagctgacccaggcatgtaaaagatctcttcttttggattcagcaattgtcttacagcccatacttctgtcattctttaatacgctaatrttagagaacattttacaaaaatagaagtaacagggattcttctcaagatatcacttctgtttcaattattaaaccaaatgcttctttagagaccatgctcttatcattactatttttctctgacaaatgaagcatgtttgtttactgagctttatcaatgacattctagtataactgctgtgaaactctttgttaaatatgttttattaaatttattctattaatcaaaccaaaatattgataatgctatttgtctgtattagtccattctcatgctgctatgaagaaatactgagactgggtgatttataaaggaaagaggtttaattgactcccagttccacaatgctggggaggactcagraaatttacaatcatggcagtgggaaagagaggtgctgagcaaagggggaaaagccccttataaaaccatcagatctcattagaacgcactcactatcatgagaacagcatgagggtagctgcccccttgattcaattacctacccccaccaggtccttcccaagacatgtggggattgtgggaactacaattcaatatgagatttggatggggacacaaagccaaaccatgtcactgtccttaaaaatttgtataaaacttagaaagttgcatagatagctataaggagttacaattattccttcccacaacctctcaataggtagtagcttaccaccttctagctgtgagatcttgagcaagttatttacatcctgtgtttcaatttactcagttataaatggatataataacaggaaagtgtgattatctcatagtgctattttgaagattaagggagataattcatataaagaacttagataagttccggactcatagagttcaataaatgttagctactaataataactatatattttatagatgagcaaactgaaagtgagggaggttaagtgagatggccagggccacacaactggaggaactggccttcaaaccacggcctacgtgacttctaaacagataagccctgacttacaaccatgccctaacttgcattcttgctcaaaaagattaaacaaaagtttaagttcagaacccaaaagcaatgactttagaattatgtaatcaggtatccctgagatattaaaacacataagaatattccaaatgggaacaaaaggtttgaatacatgaaaatcaaactcatatcagcagagaccatataaagggctctcactgcaggctgactagttaggaggatggcaaggtgatccaggacctgcgcatgctttgtcagttcaaattgaatctcatgccaacagcgatcttttttaacatgtaacattaggtgtctcaggtacacatgaccataaaccacacctggagggtttcttttattttctttttaatatttttctgagacagggtcctactctgtcacccaggctaccatgcccagccatggagagtttcttaaagatactgattcctttggttaaasctgccaccaaaaaaaaaaaaaaaaaaaaaaaaaaatactgatttgtgggcactccatcccaaatctatggaatcaaaatcttctgggggtttttaataaacatctcaaatgaatcctatgataagacaaatttggtaattgttacacaaacacctaatttaaaaatctgatcattctactatctaaacacactcagagttaatgagggagaagggagaaattgattcttctgtaagacgggtagctttgcaaaaaggaaaacagcttaaatcacattcatttcttattaaaagctgatgattaatatcattttagtttttcctgggatggtgatataatatggtggtcattcctgtcttaaccaaagatatttttgtccactctaggttcacatgtagatttcagctggaattttttttttttttttttttttttgctcccaggtagattcttaacctaaacaagaaatgtagaaattacagttggtccttggtatatgcaggagattggctccacaacctccctcccccagtataccaaaatccttgcatactcacatcccacagatttattgtcagcaaaagagatgagagttagtttgaacagtctgccaacaatatgatttgatgaattctaggaaggtattttctgcagtaaaatatttctccaactatccttttgccagtatctaaaatttcagattagagataacttcctattcactagaaaaactggattaaaacctgattaattaggctttattgaatattaagggttaagtatataactgtggaacttgtaacagtatcacatttcaaatttctcttaaaactatatccaatagaggaatgtaaactattgtctccactcaacgaagtcaaagagtccaaagagtctccctgcagagtgaaacataaaataagcaaaatttcataggctgcctgcactasggctatgtgagggttttggttaccaggtgactgggagtttccaagaaggatgctgggagccccatgctcttccctgggaaactttgccttttcactactctaccatccagaagcaattttttaaatgggttatttattaatttttgtatttacacaactcctactgrgattacttaacatatttggtggtgacaagttaacaataaataagtaaatttaagaatccttgtcctatacccaacccagacaatagagttcttccagactctccagcaccccctagtggcacatatggaccatgggacgggtaggtaattagcatatatttttcgttctgtttccagcaacgggaagcacttggcaagcatcaccttcttttcttcgcaatactgctaggaagtatgtattatgattatctttatttacatattaagaagaaacagttttcagataaagaatttgctcaggggaacataggtggcgggagaaaaaaaacgagggtttacaatttcrgagctstcacacttaataaccttgctgaagtattgatagaggaaaacatgatcttctttcagycgctaaccttctctgtttcctttattgttcctaataccttgtattcacgtgggagttaccatgtacattttytttcctgtgggttttcttttaatatttggatttggatctcctccttttccagatgtatatgtttagttattttaattttcatgtaatactctctagacatatctcaatcttggttttcttcctctaagttcaatctgaaatatcactttctctcttaaatttggctcccccaagatccaacattccaaacatattgccaatgagtgtataccttttagcttgaaagcagcagaaaaaaagtggtaaatacctgagccagggaacttaattagggggttctatcagtgatcaaggccagtgatcaagggagacaccagcctaatgaaagatgacagaagatagcaatactctaatagagatgtggttcacaaagttcattgtgcagaagcagctagggagagcttctaaaatacagaaatctgagcccgtcttttttcttttctttttttttttttttttttgagatggagtctcgytctgttgcccaggctggagggcagtagcgcaatctcagctcactgcaacctccatcccccgggttcaagcgatttagctgggattacagccttgtgccaccacacatctggacccatcttctaatgcaactggtccactgactggcatttgggaaytgcaattttgcctctaattgtaggacaaggaagtaagaagagttttaatcatattcaattcaagtaatggagcagatagatgtaaggtccatccgaaagagtgaaatgatagaatcacagaatattcttaaagaaaggcaattttattctttctaactgcttatggtaactacccatgaaagcaaaaatattgattggtaagggtcaatataatgatgtttcacgaagaaaaagtttaatttgtaagtttttgtaattcacatttataataaataaatctgtttctgctttataaatttcctcacttgagtagattaaatattacccttataatcttctttaaacttactgtttacaacctttttattgtcatgaagtcaaacataaacttcaattcagctcgtgatcaaaagatcataaattctaaataagtgctatctgaattaacttggtttgctagagttttctgacattctgaaaattctatattagaagaattctttattatatgataatttatgttaaacaaattatagcaaattctacacataaggaaattcagactatatttatgcttaattatccaggcagtagtagtacttaagtaaatatgtgagttaaatttatctgttttgaaaactgtgcctctgtcctcctcttgattgacaataaaccctctgtctccactttcacatctccaaagttcaagtgcattttaatacaatataacaataagcaccataaagatataaactatgtttgtactgttagcatcttatccctaaatccaagctcaggccctggtcagttcaagcatttgatacatacttgtctattaaatcaacattaatcatctcttcataactaggaaaactaggccaattttacccagatttgtctaaatacacagatgcctacttcagcaaactaaatgtagaaggaagcacatatgaagacaagggggtcttttttagctgctatttaccaattaacccaacaataaaagtttatcacttggctgggcgcggtggctcacgcctgtaatcccagcactttgggaggctgaggcaggtggatcacctgaggtcgggagttcgagaccagcctgaccaaaatggagaaaccccacctctactaaaaatacaaaattagctgggcatggtggcgcatacctgtaatcccagctactcaggaggctgaggcaggagaatcacttgaacccaagacggggaggttgcagtgagccgagatcatgacattgcactccagcctgggcaacaagagcaaaattctgtctcaaaaaaaaaaaagggattatcacttgatcttcagaaaaatagtgaggtcattattgtttgctgacagactacacaagtaaaatctcccaaaggccagttttgccctggccctaagattactgtagggcctcagacatcaaatcagttcttctcatcactcaaaattcccttaaaattgacctgayagagaagccaaccacatttttaagccaaattgttgggtcttttaaaaactagcattttggctgtagtataacagtcttagtttaactgattcaaaactatggctggcttagtaaatttaacgctagtggccaataataacagaaaagagataaatattcttaagtatgtattttgagccagggattctgctaagtactttattcactctcattaaagccttgaaacaattgttgcatgtttaagttattaatgagccccattttacagaggaaaatgaggaaactgacctatgtaacttgctcatggtcacaagccattaaaggtggcagaattaggatatcaatccagtcggtgtgactccagaaccctcctatttactctatactactcataaaattatttggtcttggggctgggcgcagtggctcatacctgtaatcccagcactttagggkgttgaggtgggtggattgcttgagctcaggagttttagacctgcctgggcaacatggtaagacctcatctctacaaaaaaaaaaaaaaaaaaaatacaaaaaattagccggtgtagtggcacgcgcctgtagtcccagctacttggraggttgaggtgggaagatcacctgagcccaggaggttgatgctgccgtgagccataatcatgtcactgcattccagcttgggccacagagtgagaccctgtctcaaaaataataataataatctggtcttgagaaaaaatagtatttttttcttcataaaatattttccattttgagaacttgattaagaaactcattgtcttgccaatgacattacattcaatcatgctgaaacatccagaaatagtttacacatcagtttgacatcagtattatgcaatttgaagccactgtttgaaaataaaaacactgtaccgtgatttgtttatccagagttcagattattatatccttgtatatgagacagaaacccccttgtattctagtgcaaactctctttggatcttaatatgtatagttaacaataataccatactacattctaactacctagaaagctagcataccttaacctgattaacttttaccaagttacttgaaattatagcaaagttaccatttaaatcttgattctggccaggtgcagtggatgaaccaagcatggtggtgcctgtaatcccagcactttgggaggctgaggcgggtggatcacgaggtcaggagattgagaccattctggttaacacagtgaaaccatctctactaaaaaatacacacaaaaaaaattagccgggcgtggtggcaggcacctgtagtcccagctactcaggaggctgaggcaggagaatgccgtggacctgggaggcggagcttgcagtgagccaagatcacgccactgcacttcagcctgggtgacagagcgagactctgtctcaaaaaaaaaaaaaaaaaaaaaagatttgattctatcagtctactcacctttatagcttgacaatgattgatttgtgtaaaaggattcaaatcaaaatttgcaaactcccttcctccaaaggtactcattttataatactgaaattctctattatgttctctgcccagtgtcccagggtttattggtttctaaagaggtagtgggtatatacagcctccccaaggggaatttaggaagtaagctggttgtcacaaagactggcattaaataggtagagacctaggatgctaatatcttgcaatgtgccaaaataattgtccctgtccccaacctcaccattgccaatattacccctacccctcacagtgagcgtcacaggcaggcaacaaactggtgtcgtcacagaatgattgatggaacacatagactgcattcattacctaaacattgtcgtcacactgcagcaaccaaagacaatcgcattacccaggggttagatgtaggaagagtaaaaaacaaaaaatttttgaatgygtaattatcactaattattttatttgatccttcaggagaatgtggaagatggccgagcaagtatctatcaatctgtcgttaccaacaccagcaaagaaatgtcctgtttcagtgactttccaatgcctgaagattttccaaactycctgcataattctaaacttctggaatatttcaggatttttgctaaaaaatttgatctgctaaaatatattcagttccaggtattgtatttttggggaaatgggtttctctgcattagttcagctcatatttagatagaaaagttactctgataatgaaagcaattatgaatgaagtatcccattctaagtatttgttgaaatataacagcctcatataaaacccaaaaagtagtgtcattacccttggtattatagattatatacattaattgaagaggaaaatcatctgttaaaattaaaggtttgaataataatatattgatgtcaaaactttttttttttttttctccctgagacagagtctcactctgttgctcaggctggagtgcagtggcatgatctcagctcactgcaacctctgccttccaggctcaagtgattctcctgcctcggcctccagagtagctgggattacaggcacacatcaccatgcctggttcatttttgtatttttggtagggacgaggtttcaccatttgggccaggctggtctcgaactcctgacctcaagtgatccacccgcctcggccccccaaagtgctgggattacaggtgtgaaccaccacacccagcctcaaaaattcatttaaactaatatctgttatcattgaatacacctagcttcatttgccttgaaagggcgtataccaaaattaaattgctgttttgttttcttagcttcttcatagaaatgggatttcttagatgtgtattaaataaattcattggtctctgttcatactagaaggctgtgggaagtatttgcttatcatttttttctgaatgcaatctcttacaacctaaagatggccagatcattttgaaaaacacttggaattaccttttcctgtgcttcctcaaaatcaacaaaaagcaatattttaattaagcatgctgaatttttatcaatggtctatactttgagaaatagctactatgcttagaaaataaaatataaatcacatttcttggccaggtatggtgattcatgtttgtaatcccagcactttgggaggctgaggcaggaagatcacttgaacccaagagtctgagaccaacctgggcaatacagtgaaaatctgtctctacaaaaaatttttaaaagattatccaggcatgttgatacccacctgtggtcccagctattctagactgagaagggaggatygcttgagcctgggaggtcaaagctgcaataagtggtgattgtgccactgcactccagcctgggcaacagtgtgagaccctgtctcaaagtaaataactaacatttctggataaataactgttagtgaggcttatttttaatacatgtcattttcttagtaattctaatactaggcttatataatatcaacttacaatagtaaattttggtgaaaatttgtatttataaattccattaaaatgtccagttctacctaatgtagtttttcaccaattcctggtagatctaacttgtgaataacagattatgtataccagaaggttttgtaactttgtgcacttaactatcaatctacttaacaaatatmtygcctttttatgatawataacttctattccattcttttaaagatcatgttagagtcgcaaggaagtcatttctcttggttattgtgttactgctacttttgtttcttggagagtgaagaggggttgggaagaaaggtttctgtttattggtctctgagttggtgtaagtcataggtgttagagctcaactcgagaagcaggcaaactgtaacaagccctgttgcttatgattgtcaatgtaatctacatcagtgcttctcaaactttaatgtggacatgaatcacctggatatcttgttaaaaatgtaggttctaatttaataggtatggggtaagttctgaaattctgcatttctgacaagcytccaagtgatactgaagatcctgatcctcaaatcacattttgaatagcaaggatctacagcacttagttaatatactactttgaactaccatctgaaatcttttctttcatctgaaaactgcccagatatttaaagcccttttacaagatttctactaatattccatatacatttttaaattgagacagcttaaaaattaccaacccagcagttggaaaaatatctgaaaatttgagatatataaaagactaaaatacttgcaaatgagaagcatgccattcctctagcattataaactttgcttccacttgacatcgtttcttaatccagcagatatgaaacatttatgtacaattttaaaaattaacagacctccagtgagctacatttaaaaaaatcaatgaaccaataaatcattttattcaaataagatcatgaactgtcttgctcacatgatgtactctgttttaaaaatagcaaatgttaaaaactatcattcagtggaatgctgaccatgtgtcaggcactctgcaaagtgttttgcgtgaaatatcttctctaatacaaagtccacaaagaggcggctacataaaacgttcctgacatatgccaattgcatgatcacttgaattattggtttgtttccttgttcagattatcaaataacaaacagagagaagttctttaaaagaaaagatatatatttggtgatagagcattgtaatgagaatgtacatgccatggtaaactatttgtgtattcagggagttaaaggaagacaaaggtttttaaatggggaaaaaatacaattacataattgttttgaaataattatataaagagcaataacaagggtgatgccagtctgagattggacagttactgagcagatgttcttgtagaagtcatttttgtgtaagattatgatggtctttgtgtaaggtggtggtttttgtagtttttgttatcaggcacacatcatgagaacccgctctttctggcctttcccaattctatttgtcgggtttcttaacattagtgactccatctagattctgacagttttcatgagaacttgcttttcttttctctctcaagtccttattcagtattcarcacccttaacagattagtcccactgctgagtcaggcctcttgcatgaagcagcaatgagaaagacacacttggccaatgttatcctggagtaattctcaatgatgccttctctgtgtttcttcaagacaactgtccttagtgtgagaaaatgtccagatttctcatcctctggccaatggaaggttgtcactcagagcaacggcaaggagcagagtgctgtctttgacgcagttatggtttgcagtggccaccacattctacctcatatcccactgaagtcatttccmggtgagacccgctgggattcccagctttttggagtaggtttccaggtactttatatgtagtttggattgacaagcaggattcattgctgcaactgggcagaacttggctcaataagattgagacagagctagaaagatgaaagacaccaaacatcatctttgtttctattggcctctgagtcttcatcacacatagatctcagagccaacttccttggaagtcactaagtccttggcataattttagagaattcacatcaaactggttctctgttggagaggcccttttagccatgtgcctgcgttggcctttttctaccctgccaaacaccgagcctttttcacagggccatactcacacacaaggggagagctcctagaaagaaatgctttgcaagttagtgatggggagagaagtgcaggaatagaaccctgcatccagctgttctggtccacccaagtctttcctcagagaacacacttctttcccaaggcccttaggaaaatatgtaatatagtggttcatagtccaggcctcatattagaatcacctggggagcttctaaagccctgatggcctggagacctacccccaaagattcaaacactatggagtagggttagagcaatgaaagtttgctcaggtgattttaatatacagtcaggattaaggcctgctcatctaaagcaattgttctcaaatagagtcacctggagggcttttgaaagcacaaattgctaggccccaccctccatatttctgattcaataggtgctatggcttgaatgtcctgtccaaaactcatattgagattaatccccaatggggcagtatgaagaggtggggcctttaagaggtgattgagtagtaagagctctgccctcaagaatggattaagccatttgtggataaataggttaatggattattgggttacacaggagtggaactggtggctttataagaagaggaagagagacctgagctagcatgttagcatgcttggctccctcaccatacaatgccctatgctgccttgggactcttcagagtccaaaccagcaagaaggctttcagcagacgcagcccttcaaccttgacttctcagcctccacaattgtgtgccagaagaaataacttccttcccctataaaatattcggtttcagatattttgttaaaaacaatagaagacaaattaagacagyagctctggcatgaggctgagaatttgcatttctaacaccaggcaatgctgatattgctggccatgtgaccacactttgagaaccaataatctaaagattctttcaagcaaccccaccrtcaatggcaaatactttataaagtcatgtgtttccgtgaagtgtaaaagtagtaactaggaaaggacacagaagaagcttgtctgtgattaaccaccagcaagtcactgatttacacaatatggaaaccaactcctatgtgcctggtttttagttttagtttttgtttactttttgaaaataagattgctaaattgtattctaactattacacaattataataatagcacttcataatgtgcttaagaaatatttaagagtatctgataagtgatttttttttttttttgagatggagtctcactgtcacccagactggagtgcagtggcacgatctcagctcactgcaacctccacaacctccatcttccaggttcaagcaattctcctgcctcagcctcccaagtagctgggattacaagtgcacgaccacccctggctaatttttgtatttttagtagagagagcttcatcatgttggccaggctggtttcaaattcctgacctcagttgatccgccygccttggcctcccaaagtgctgggattacaggtgtgagccaccacaccttgcctaatatgtgatattaaagggtcaaatgtcattatatagtccaaaatagtatataataggcaggcagaagacagtatctggtcctgctgtgttcatcaccatttatttgtctctgatagagacaaactgcagccgtaagctgcagcctctgaaataaaaaatcaacccctttggtcctgtttttttgtttgttttttgttttgttttggtgttgtgacagtctcactctgtcacccagactggagtgcagtgactcaatcaggggtcactgcattctttacttcccaagctcaagcaatcttcccacctcagtcacccgagtagctgggaccacaggcatgcacaaccatgcccagctaatttttgtattttttgtagatacagggtttcactatgctgctcaggctggtctcaaactcctgggctcaatcaacctgcctaggcctcccaaagsgctgggattacaggccccacctggtctggtacctaaactttcttatgtgctttactcctatagagaagaggcaaaacaaattattaactccagaaaggaaaagctggcaatgcagttttattgaaattagcttgacatagttgctctggagctcacagacttctctcttcttccccctgaaggtatggagaggttcaaaggccaatatttccatagccgccaatacaagcatccagatggatytgagggaaaacgcatcctggtgattggaatgggaaactyrggctcagatattgctgttgagctgagtaagaatgctgctcaggtgtgatgctctctgcttaccatgtacctggaggggaggaagtggggatgccatactggagaaccycagccatataatcgcggctccaatcctcattaactagttggttggtagcgcattgtggcatcatagaaaatctggaagtcaagaaaccactttacctcctagctctgtcamtaaccagccatgaatcctagagtgattcatttcacttctctgggagatggctccctcatttttaaaatgggaacttttgaccagatgattttccatataagaggcctttcatcaacatggctcactgcagccttgacctcctgggctccaatcttcctgtcatctcagcctcctgagtagctgggactacaggcacatgccacaccacactcagctaattttcatatatttgtagagatgagggtcttgccatgttgcccagggtagtctmaaactcctgaactcaagcaatctgcccgcctcagcctcccaaagtgctgggattacaggcatgcacaaccacacccagccaagaggccttgtttctacctggatgtttaatgagaggttaatctgttcatattctggagggtggcttttagaaatttagtgtgtatttgaattatatttgaaatatagataaccttcagttacccaaatattatgaaaagaaagattaaatagatagtaggtctctcaactaaaatcatagatatttaggtgcttcctgaggccttctaaccactgtcttctttgcacctgctcaggaatgacaccagctgagctgccaaagagtcaaacattcattacaygatgatgctgctgayagtggtggtcaggaatagcaaaaactaaactccttctgcaaggacagaccyaggcaaagaagggaaaatcactaaacatcctttcccaaagtattccctctcaagaaggcctgaaccagatgcccaatcactcttaccctagctctttcagcctgatgtctctggccacccagggcttaccatggccctgtgcacaaccaacaaatcatttccatcctaagtcttacactttcaggactctagatacccagtggcaaaagttacaagcaaacatgacacccgcccagcaggttaatgaaggggttatactgggacctgtcagagtcatctatcagtcagttagttagtgccagcccgggaacagagcaggtcactaacaccggaaagagacttactagacccaataagtcttcactttgtgaaaataaacctcttgtcacttatcacctcagtgtgaagaacaagtgaggaggcaggaactgtgacagcctggagaagagcagagctggaaaatgagagtaccagctctaggctctttcatgctasgaatacccgcaaagccttaggaacagtgtgtaatggggcagtatgtgaggagctaatatagcagtcagccaagtgaagatccatcctagactacttcacgttgtcagaccagtgatttggatttagatctcttcattccaaagatatcaaatcttagatggcaagaaccagttccttgtatgggtcttgccctacaggaagacttatggtgtgagattcaatattaagaaactaccttggctctatwtgcatgccttacagcttcttaaacaatcttttgcacagagtgcaaaagactttgtttccatctccctctatcagtgtaaatgccactagatgccccctttttaggaggtacttcactttgaggtcaatcatctttaaaacagagcctcagtaaattctggggctatgcatgtgatacatcacctacataatagattcctcctaaatataatgttataatcatacatttccaggattatactcattcatctgcactaatctcttcaatatttattagagtaacaacataaatctataactatgataaaacctcttacacagagtaatatastctcaagccttctgtgaaaagactaaccagagactttacaggagctatacatgctaggaacggaactaggcgcatctgcaaaacttgaaattacaacctgaactcaccaaaattctgagtgtgcactgctctgttaaaagaaattcaccttcataaggwtacagcaccctctaccacaatccaaaagcaccactcaagatcatatgggatggtgctgcatcattgtattagtccattctcaacgctgctatgtagacatacccgagactgggtaattyataaagaaaagaggtttaattgacttacagtttggcatggctggggaagcctcaggaaactaacaatcatgacggaatgcacctctttacgaggctgcaggagaaagaatgagagcgactggggaaccccttataaaaccatcagatctcgtgagaacttactccctattaggagaacagcatggcagaaacctcccccatgaytgaattatctccacctggtcctgcccttgacacgtggggattattataatttaaggtgagatgtgggtagggacacacagccaaaccatattagtcatttacatacttctgaccaaaaaccaaatctctggcctttgacctaaaacatgcgtctcagagaaagcagcctgagcctaaatcctcatgtttctctcactgttgcagctagtgtcattaaggcaggttagaccaccctgctgtagggagggtcacaacagaaaaagagtgaatcaaacgggcagagcataccatttgaaacatggtttgctcctgagaaagaagaggggacagtaagtaatggaaagagacactaatgaaaatatttttgtatctaatatctaatcaaagtattgccaagtcagcctataagggcaacggcaggagaaattcagaacataggtatataccacacacagaccagcaatataggaatgcttggtataggtgctacttcacaagctaggaatgtaaggcccatccccacaaaatttgtctccaaattctggtttactccagacataaggcactgtatgaaactcctctcttccagcctaactttataacttaacagctagcagtacttatcacttgccaggcaatatttcaagtactttatatataccacctcatttaatctacacaagaatgccatgaggtaggtactgttaatacccccattttacagagagagaaactgaggcacagagagattgaaataattcaaccatggcaacacagattgaaatagttcacccacagtagtgtgattgggattcaaacccaagcagtctgtatccaaacctctcaagtaaattggttaccttgcaagtgaatcttatgtgtttatcaagtatagccttaaacaaaaacttattgcatggtatgtaaaaatttaagaagcagttcaagtatgcatttggccaatgggggagtaacagcaaacacagcaaaatatacatttgaaaagagattaaatgtacattttggaaacaagggaaatcttaataaacaaggtaaagaatacacctgaaagaggattcagatgtgcacttgaagagaaagagaatcacagtataagttcagagtttttaacttttaaaatacattacaagcactgtgtctcatgcctgtaatcccagcactttgggaggctgcggcaggaggattgcttaagcccagaaatttgagaccgacctgggcaacataatgagaccgtctctacaaaaaaattgtttgaattagctggatgtggtggtacatgtctgatactgaggtgggaggatcacttgagcctgggaggtcgagactgcaatgagctatgactgcacaactgcagtccagcctgagtgacagagcaagaccctgtctcacacacacacacacacacacacacacacacacacaaaataaagtcttttaagtatggaaggaagattatttcccctgttattctccatccagggatattcagatgcatatacacttatacttgtgtagtcactaggctataatcgcacatttccaaggattataatcattctacctgcactatagaagaaacttaggtgagtggaaaacatgagaggagggagggaggaactttctcttaaggagcagcaaaccacaactgtaaacatgggaaagacttgtggattttatcatcagagttagcccaaagactttctcgtgtctccatgaagttctcaagattttgttgcagtcttcctgcatcagtgtaaatgccactgggtacccctatttaggaggtactttacattgaggtcaatcatctttaaaacagaacctctgtaaattctggggctacacatgtgatacatgaccttcatagtagattcctcctaaacgggacaatgccctaatttaaactgcatttctttttgcttgccaggtttttatcagcaccaggcatggcacctgggtcatgagccgtatctctgaagatggctatccttgggactcagtgttccacacccggtttcgttctatgctccgcaatgtactgccaygaacagctgtaaaatggatgatagaacaacagatgaatcggtggttcaaccatgaaaattatggccttgagcctcaaaacaagtagagttattttgcttttttaatggtatactcgttggtgagcaaagttgtctgaaggtgtctcccttaacaaagattcaaattgctaacacggtagttaaaactacaatctaacaatatgagtatcttataggtcctggagtttagcttctaaatttgttctgtatgcctttaaaaaatacttaagaagatgaagcagaagtgttayaagctgctccagaaagcaaaactaggggagaactttctaatacccagagttatctaacattggagaaaactgtttcaagagattacgacctgcctttcagaggggtgtggtgggaaacatgtaattctccatctaataatttatgctttgctaaccctatagcatgaaggttcttcccatgggaaacctttgaaaacacattcctttttctttgctaaaagacaaatctctgttgacgtcaaagttatatgtcagtgatttaagcacaagcaaatgttatgaatggttcttttgctttagttgttacaggcttcttcccttaaaaaaacagaagagctttagaatcttttaacaaatgcctgccgtgcaactaccatattctaagatctgacataagtgccacgtatcgtctattaaaaaaagaaaaagaaaatgttctcaaatctacaaaaaaaataagcggactttgcatcaacatccatgctattactaacagagactccatggatatttgggattaacaaatatcaccaaacctaattttatacattaattttcacattgatcccttcatagatttcaaaactagtggaaatttagcaaattttttcttatgatcaaataggggttaaataaaacagcaaaataataaaagctagatagcatgaaaaaggttaaaaacagaaatggtataataaccaccataatacttggggattgaccataggcacaggcattttgtctaagcccttggggatgcttccttccttaaaatctctttcactcacgttgcctacatgttttcccttatttattgacaagagatatttgtgacatgagaattaagtcagaaaataaggatttgcacagacaaccagttaagttagagttttacagatawttgaaaagcccttttattttcagagccgtaccccaaaaatatcaagagggttcaagattcctcagcaaatgatccttcagaatgtttttcttctgtatgtctcagatacattatgaaggaacctgtactaaatgatgatgtcccaagtcgtctactctgtggagccatcaaggtgaaatctacagtgaaagagctcacagaaacttctgccatctttgrggatggaacagtggaggagaacattgatgtcatcatttttgcaacaggatatagtttctcttttcccttccttgaagattcactcgttaaagtagagaataatatggtctcactgtataaatacatattccccgctcacctggacaagtcaaccctcgcrtgcattggtctcatccagcccctaggttccattttcccaactgctgaacttcaagctcgttgggtgacaasagttttcaaaggtaagtgtgtaggcaggtgagtggctaagcgtttcagatctggtgaartttatcaataatgataagaaggttgcctgagataaaaaggttgccaagaaaaagtttgacaaccttggctgctctcacaagactaacattctaaaaagttactggagaattcaaagaataacaaatacaggaatttagtaataataaatacctgcaatcatccttttaaaatattagacagtcaagagaatttcaactggcataaagctaagtgcatgttaacttttctttgaatcgtgagagataagtttaagaaaaagatctgtctcctggttttacctctgtgttgtttaaaaattcctcagcatatctgcaaatcaatttaactcttaatacttgagcagctcaacctcacaaatccctacaagttataaaattattaaaaggtttctttctgggtgtctgtgtagcacttcatactcctcagaacggtgttacctccctgcctccagggttcaattctgttcagcaaaagcttactgaataccttgccctgtgctgggaactggtgggacagagagaaatttaaacagatcatttcaacataacatgacaaatgctttgattgaataatatatggagtgttcagggaaggagagaaagggcacttatcatggtagaataagggaagggcacatgataaaggaaaacgtcctggataactgcatttctcaggggcagaaaaggggattgcctgaacaaaagcatagagtcaatgatgcatatggaagggcacatgctatttgacattgctagagcatgacrtatgaggcagagagagatgagccattactcttggagaagaaggagacaggacacaggaattttktaagacatgctatggagcttagattataaattatagatcagttcttcccaaatatggctacatatgaaaatcatctgatggatccttagggaccctgattaagtaagactggccaagggacctggaatctgcattttagaaagctcttcagcccggggcaccaatgaagggttataagcaaggaacaggcattagcagatttacacttcagatagattgtttcagcagtagtgtggaatatagatttgaaagtggggaaagactacagcctcagggatgaaagagaaagctactgaaatagcctatgctaaaatatgatgcatcctgggccagggcagagatacaaagtggaaaggaagccataaatgtgagaaatcattaagggaaaaatcagcatgacattatrattggttcaatgtgggaaagtcagagaaatagagaggaatctaggaggacttacagatctctggcattggaaaccaggtggacagtagtgctgtgaatacagagggggtgtgcagaaaatgatgcaagtctggacaggagggcttcagtgaggagctcaggtctggactacttgaacatgagatgtctgatgactctaggcaaggggacttgaccatatttcaacacatccaaagctcaggggacacttgtgggcaggcgatggagtcatgagcacacagtaataacttctgcatcaatctttccctatctctactgccctactctcatctctcaccaggtttatttcaacagcctctttactggtctccccagctttgggcttgcctccctggagtccattttcctaaattcagcagccagacagatctttccaaaaaataaatctgatcttctcacttcattcagaatactcttccactgatttgatttggggcctcctgtcaccttcaggatagagcccaaaccactagtcatggctgccaggctcccagacacacttcccttttccagcctcttctcttggccctctccacttgtagtccatgccgtagactgtgcaccctggacagtgtcacatagagtgctatgggggtggcaccccctgaagttcaacagcacggaagccctgactggtatgacatggttcaatgtccagagtttaattttaagaatcaacaactagacaaagtaatgatattgactcaaacttactattcaaaccaaccttttattccttaggcttgtgtagcctgccctcagagagaactatgatgatggacattatcaaaaggaakgaaaaaagaattgacctgtaagaattttttttaattctttacatgaagcagtgtttctcaaagtacagtgatctaactacttacaagaaccacctagctgcctgataaaatgcaaatttctgggctatagcccagatgattgaatcagaaactccgtgtgtgaggctaaaaagttgcatttttatcttcttcctaagcgattcttayacatactaggttaagaaccaaatacttaaagataagaattgtaccaaatcagagcacttctccttggcttaatttcatttcagttktatatgatgcctatgtcagattccataacttctcaagccacctacactctgtggttagagagggaatrggatgagacagtggtggtgatagtagcttgaatagctgtgaaaagttagagaatccccatcagaataaattaggaaggggttggtgtgaaggttcaaggatttgtactttgtgatgaggtaaaatgaggttcaacagtgatcgagtacccttggaaagttgatttggggcttacatcaggtgtaaagagttttctcatgttcaaattyaaatttacctaagattgattgagtatctactatacgccatccakactgccaggtactttagtaatttaacaagcaaatattaagcatctcctttgagcaagacaccaagctatgctttcatatgcattatctcatgaattcctgcagccgccctggctagcatgtacttgcctggagatttgccaccgcttaaaaaatgccaaacaatggttaccaatcttrtcacatttctagagcatccatgaattcatggctctttatttgagggcgtattctcaatctgagatatgagcctcctggtatgataaactcaaactttccaccagagattcattgaaaactcattcacatattcactcattccttcattcctttagcagttttgaatgcctaatattctagaaaacttagaacattctgtgaacattccctttttactttcttcactaaggtttggagaaagccagagccagacgttgcagaccamttatgttgactacttggacgagctcgccttagagataggtgcgaagccagatttctgctctctcttgttcaaagatcctaaactggctgtgagactctatttcggaccctgcaactcctatyagtatcgcctggttgggcctgggcaatgggaaggagccagaaatgccatcttcacccagaarcaaagaatactgaagccactcaagactcgggccctgaaggattcatctaatttctcagtttcttttctgttgaaaatcctgggccttcttgctgttgttgtggcctttttttgccaacttcaatggtcctagtcagcataatgctttgggctttattatcttgtcagtcactacctcctaaagaaaaaaaaaaaggctagaagaaaaaacattacattcatgttctaattatagattttagagttaggtagtacaggtaagggggaaattgtaaagaattagcagaattaggcatatgtacaaaaccaaaattttgtcatgaaattttgcctttccacgcttccctcagttcaccaaagttaccaaaatgtaaaataaaataagactggctcaggtaagtagtgctgccaaccctgatataggggagttgtatggaaaaatagtagaattacacagcatgaaaagcagcccatggtttaaattattggacaatttaaattgtgggtaaatatttaaaactcctgaacaatgtttctgatggtcttctatccaccctacttggtaacaaagttctcagatgttaggtcatgtttcatttgctcagtcggggatcactcaaaactactagacaaaaaagtgagaggatagatttagaaaacatcagtgatgctcagataaacttttaggacctcatattaagagctaagcaaatggccacatttcctatattttgacagagatactgctggaaaaattaaaattaaaatgccataatagctacctaacaaatatatatgtttaatgtttatcataggccagacattgtgctatgtgcatatcatatgtattatttcatttaattctcacaacaattctgtgaaatggttacagctattatagtcatttcacagatgatgaaactaagattcagagcagctgatcttgtgaggcagctggaattggaactcagatttgttgaactctagaactaaagatcataatgttgtcttgtaatatatttatttacaaaacacttcattatttataaagaatttactaacagtttatcttatttatacccatacatctgctactttgggaggccctttacatagaaaacagcattctttttgcyaaatatgaccaaattacttttatttataatttttgatttatatttcagctagatctaaaaagcatctgaaggaatttacaatgaaagatacctatgcaataacatttaggataatctttgacattttggaaaaataagaattgaggaaaaaaagtgtatctttcaagtagatgcaaagcattataatgaytgacacttgtatctaactccagtcttacagataactaaggcaaaaagctaaataaacaatatgtaacctctaacatttggtaaaaggaagtatactggtctgttagcagagacaaactttttttagaattgaagtctgaaacaaacaaaagcaattcaatgtcaatagacattaagcaacataatagacaaacatctcctaagggaacatttgttacagctgctccttccctgaactgtgctttggaagataagctctgtcctgagtccaaaccaagcccttccaagagagaacaaaggtcagagatgttgaagattccagcaaatttctcctcttatttctaccaagcctttgtgaacattgctcttcattttggcctgtacttctccctcagggacgtagaacaatggaatgtcagtcagtctctgtagttaaaactttttctttaaaattcaattaagktacttctccctcagggacgtagaacaatggaatgtcagtcagtctctgtagttaaaactttttctttaaaattcaattaagttacaccagaatttacaggcaagattttttttttcattgctcccataagcaaatttgttttaaaataattgtaaatgaggtatatacttagttcttggttaaaaaatatattgctttgttaagtattaaagattatttgtaagtcattgtattaataatactaataaaatttatcaagcctttatagcaagggtcagtgaattaccactgcctgtgggccaaatctagctcactatctgtttttgtaaataaaattttataatagtacacagccacactcattcatttattttctgtggttgctttcaagctacaattgtagagttgggtagtcgcaacagaatctctgtggcccacaaggctaaaatatttacattctcacccattacagaaaaagtttgataattcctgctttataatatgtaaggcattgtcccattttgcataacttgccttatttcatcattatcactacccatttagtagctatggttgttatcttacttctacagtggaagagattgaaaagcatttgtcaggttaatgctaaatcagtgcggaaatatagctccactaggaaaatattattaaatttatatccctaaaatttttagaaatctctcaaaatctttccaaatgttctggtatctttgaaaaatgtaaatagtttatttatagagaaccctacctctgaggttgactcaaaggttaaagaaggctcatcagtctatccttctgcctccatatatcctgaacatcaaactatcccaggaaaaccatctagagtagtttgtttcaaaatattagccacagaccacctacatcacaataactcagggagcttatagaagtgaagattcctgaatataaacatagtaataattcaacctactgaatggaaatctctgctgaaatccacagttttcataagctccccagatgattcctgtgtacattaaatctagaaaccattagtttgagatctctcaaaaataaaaataaaaattgctttcagagagtagcccatgaaatttcccattcttcaaggacaaattccttctgttcagccttggtcctccaactgcagtttacaatttttgttcttctcctgtaaagaatgtcaatggttatcaccttcaatagtttcaatatgtcccccaaagttatgtgtttgaaacttgcaatagtattgggagatggggcctaatgaggtgattaggtgaagtctctgccctcatgaaaagattaatcccattatctcaggagtgtgttggttataaaagcaagtttggctccctcttttcctcacacactctttttcccttctgccttcacctttgccgtgggtgracacagcaagaaggccctcatcagatgctggccccttggtcttgaatttcctagcctctacaactaagccaaataaatttctgtttattataaataacccagtctcagatattctgttacagaaacacaaaatggactaagacaccacccttttccaaaatctctccttgtgatggctccctttactaacctttcttttagctattccctttatgatagtttcttaattttttctatcaaaagctaaatatggcacacttgttctttacagaaaaataaagatattttaaacaaaatactagggccatggtatgtaataaaatttgaaacaataatttcaaataataaagattgaaaatgcttaacccagaaagaatccagcatccacattataatgaggattaaaagggaagcctcttttgtaccatcagtctttcatccgggaagctgctgctcctgacctgcaactttggctgtttccaaggaggcagaatgtgttaacaggactcactttcttgcccattatgccctgtgactaaatggattaatgaagctaagtacaaggcttctaagactagattctacttaatccaggtcacatgtcaaaatgagactaaatatgcaaggattttattaaggaaaatacccgtataaaggaaaataaggagagagtatgctaaggtttgagtgtgtcccccaaaagtccatgagttggaaacttaattcctccatgcagcagtgttgggaggtagaacctagtgagaggtgtttgggtcagggaggttccagcatcacgaaggaattcagacagccatctctttcctcttccacatgcccacttcctctttcacttctctgccatgtcatagtgcagatcaagacattcaccagaggccaattaaatgacagttccttaatcttaaacttcccagccttcagaactataagaaatacatttcttttctttgtaaaagaaaataaatttattttgctttatatattctgctatagtaactgaaagaagactaaaataaaggagtgaaaagctggaagagtcatcagattgcaacacaagtctgacactgagtgaaaaagagaggggagaaaggttgggtagaaacatcttagactgctgtgcagtctaaggaagattcatcaggaccattgagaagtcttcaagccaccaaaggtgtcccaagtctctctaacatacttacccactggctgaaaacagctcataggaaagcgagacttagcacaagcaccgaaatgtatctcaagtacagcagctgaagagcttggtcaattatactgcctgtactaactatattagagatccatgaggcacattctcatggctgccacaggtttatcacctcctttgtcattcaaaactctctaattgattgtaacctatcttcccagccttacctcccactgctatgcccaccatgcttgctttccggccaaaccatgtgacttactattctacagagatggcggcacttggtcttgctttgtgctgttgcaggatttttccatagttcaactaaagtcggggttctttgtcccacagccatgaaagttcaggctcacagacaatttgaatggtgagtaagacagggctttattgagtaaaaaggaagaattaaaaggaaacagggattctccgcaaggccggagtcccttgctagagtgcttcctgccctggagttcaaactccagtttccacacgggaagaggaggggccaggctcctccccactacaaatggtgcaaatttttgaggctccaccccagtgcgcaggtgggttggagtttttccagggaccttctcccacttggctgtctcattcccccctctaaagaagtacatctaactgcccttaaaataaggataaggacaaagacaaatcttaacagcttcctgctgacaggtggcactgttttggggaaacggcagtcagagcttcctcagaggcctatttaagggttcctggcaaaaggggccattgtcagaggctctggttgcatgaccatttggagttcgatggcctgaaggcaaggacaaacaaaccgggttattagaaaacatatatcaaagcaaaacaaagggagggacaaagacagctcaaaaattctaaggtctttttccagtttgcacagggagagggaggccaaaagcctgactggttaaaaaaaaattgtttaaagtaaaaaacttcacctttttgccggaatgttgggcttctgggtttccttcccctgagcccaatcctaagccaaccagtttaaggtttgggaaattaactctttccagtttggaggatgcatctgatgtgagtgtctcatagtatgaagatgcaactacctatttgtgaagagagaactgagggggaaaaaggaaaaaagaaggcattttttaaaggagtcccaggggttcaggatgcattcgaaagaggtacagactgaagatgaatcgctacccatctagaaagaggagagcagacatctctggttcccttcttttcctagcagatacatgggatacatgagggaaagagggaagagtgtcctcttttcatcttccatccttgcatccccaagttccagtgaccttggcaggtgctgccatgggttttaaagtggcttgcacccatgaagcagggggggtcggcaggggagtcatccacttttacccacgtatgccgtttcccctgctgtcagtagtcttggagttccctagatcgcatttatgctatggatattaatatagcctttatccatgaaacaggaagcttgggcttggcttaatcagcaggaatgagccacactcacctgtgctgtgccttttaacctctgttgctatctgcctctggattcctcagatccagttttcttcctagggctttgacccaacacttggaactgagtctgggacaagaatgtatcttggggggttgcatggactccttatcataagccaaatgctaaagtgaggctgtggaattaagtcctccaacaagggagaggaaaggatgtcttgtgacacacccagataactggtagctgtagttacgcttgccgggatttcggtgcatgatgctcagctttggttagctcccttggtctcactgtccccaaaagaaaacctccaagtctggggcatcctatttattcccatcacctggcaggatttgcaggataattgctcggaactagactattgatccagatttctatgttacccatcccttttgttctttctgagctgcagccagggattgctggttggttcacaggagcaagcagggttagtctaaaatataggcaaaaactcaaaaacaactattgagtttagaatttagtgacaaatatatgataagttttggaacgtaatttctgtctctccagtcctcatttttgttaagaaacaaataatcataggaattagttgtttaaatagactttagtcttatacttggcctgattatttgcataaagtccagcaagaataattatttttacataggccttttagattggctttgatggaagtctgttccacaaggagtctcagataagaccttttaaaactgagcccatccatgggtttgtatccttaaacacctgtgagttgggtgatcctctcctcttaagttcccaagataaacttggagctcctagacctgttagaaagtgatattctttactgaccacaggtcaggaaccctgtacagggactatgtagacaagggtatgaggccagtttcctcactgggcttttattggctctgtcagttgagattaactccttaagaggaagcatacccttccagtcaaagccttggtaaaataaccactttctccaattgtgttctgttgcaaaagaaaaatggattcttattgcatggatgcaaacaactatattgccataagttaagaatactcacagataggttctaaattctggaggaactgggcagagagagagaaacaaacatgctccaaattttgataataggagtacaccttgcttaattattaaaggccataaatagctcaaaatgagtttccttgactgaaaaacaaaacaagggtcatcaatattccaagcaaaagtcaaaaaggttgcttcagctttttcagttcagtccatttagttaactcttgttttgcttgatatttgtgaatatttcagctctttatgagtcctgtacattttcttttattccaatgttacaatctctaaagttatcagaaatctgtttttgagagcacctgttaaagttctatagcttgttataaacaatcttttgaaaaggattaaaacaagacaacaattgtctgtgaattacaaaatgtccagggtagttacagttagaaacaaaatcgacaaagaagtttggttatctccatggtttacaataacatcacaaccttattatgattgatagcatacacttagacattagaattttagaaatcccatacaatattggaacatatattagcattatttaccaagatataacctaaagaagactgaacatcattttggcaataccatgtacctaaacatgtcaaataatcctgtttacttctcttttctggacattctaggggccctctggactatccaaagagttaggtgtcaggaaagaccatttggaaactgaagtttgattttgggaagcctattaaataagtttaaagcacttgatattatgaaatagaattccaggttaccataaattatttattttgccaaaatggtactgagaaattttaaagaagcaaaaacttttataaccctttgaatttagtcaatatgttcacatagacaacctcttctgcaagattaacttccacaatgcttctatcacttgtttgaacgttcaacttttcctacctaactcaaaacaatcctttaatccaaggcaaaagtttacatttccatgccttcttataaccttttactaaaaaacacattttaccgttcttaggcatcttgcgtgtaaatctatttttagattacgtgatataatggtaactcctggcaatttttaactttaatgtaaaacctgctaaattgctttaattgtgtggtaagtgctgcaaaggtttgccttcttaatctagggtgtgtttagttccatatattcccaggccctaccaattgtgaagcaggcaagacagacaggtctcaaaacccaaaaaacagtttgtaacctcaaaaaacttagcaaaccttgcatctgacctgcattttaccgtagtctttacggctgtttttatttcttaaagattaaagtcaaatgaactgaaaggtaccagaaattttatctttcctttaaaaaatattagattcaagtgtttgtccttctttggaccagattcattagagccgtttttacagacatcacacacagtacacaagcagacaagcacaagaaaacccagtcactgggtgggtacctttaagagacaaggctaggaaaacatgcagacatcaaaccagagagggctcatcccctaaggcaggattgctaagcaaagccttgccaagcggtggttaccagccatgccctcaggatgtaaaacaaaatggaggcttgatttcacaataaaagctttgcagaaaacataaacggtgataggtgtggggcctgacctagtaaaaaacgtcttctaaaagaaaaaaaaaattaaaggttaactgctgatggagtggggcagagaaagaaaaaaagttttaaaatgcctgggaaagaccctcttattcttatacaactggttcctccaccaggagaaaagcttaattactgtccaatggagtaaagccccttagcaggggaaggtgaaggctttggtggtgcatggtggaaaacaacagccagctggctgtacaggacacttggaccgtgcgttccagccccagaagggaggggagagcagcggggaggtgctgcttgctggtcagtcccaaaaaaggaaggaaaaggcctgggagcaatagatgattggggaatggtttcccctaccctcagaaatttgaggatgaaaaggcttagaatgaacgttgagaggttttgag

SEQ ID NO: 95772 - DNA, 48990 bp, Homo sapiens
actattatcagagtgaacaggtaacctagagaatgggagaaaatttctgcaatctatccatctgacaaagctctaacatccagaatctacgagaaacttaaacaaatttacaagaaaaaaaacaaccccatcaaaaagtgggcaaaggatatgaacagacacttctcaaaagaagacatttatgcagctaacaaacatgaaaacaatctccacatcactgatcattagagaaatacaaatcaaaaccacaaagagataccatctcacactagtcagaatggtaattattaaaaagtcaagaaacaatagatactggtgagtctgtggagaaataggaatgcttttacattgttggtgggaatgtaagttagttcaaccattgtggaagacagtatggtgattcctcaaggatctaggaccagaaataacatttgacctagaattccaatactggatatatacccaaaggaatataaattattctactgtaaagacacatgcacacatttattgcagcaccatttacaatagcaaagacatggaaccaaaccaaatgcccatcaatgatagactggataatgaaaatgtggcatatatacagcatgggatactataaaaggaatgagatcatatcctttgcagggacatggatgatgctgaaagctatcatcctcagcaagctaacacaggaaaagaaaaccaaataccatttgttctctctcataagtgggagttgaacaataagaacatacggacacagagagggcaacaacagacaccagggcctgttgggggtgaggagtgagggaagggaacttagacgatgagtcaatcgatgcagcaaaccaccatggcgcatgtatacctatgtaacaaacccacgcattctgcacatgtacccatttttttagaaaaaattttaaaaaatgataccatgtaataccttttgtattaattacaaaccccttaggcagactcaagatagaattctaagtgatatgatagatawgatagtttctaacgtacagttgcaggctttgtcacaaatgtttatcaagctataaagatgtttaaagaaattctaaaaaagaaaaacataaaagtggctatttcctccaatcttcagatagtggatatgtgagtcactgaatcaccactactgacactagtaaactcatttcaagcataataattggccttaagtagtcttggttctccctccaactccactttcagtgctttcattctaaaggtgggttctcaggaaaagaaaaataataacctcgaggtgtaaggaacagagggaattacttcctttaatgtgtggcattaaaaaacaaacactcacattttagaatgacaggtatctgtggggaagatctgtgtaggtaggggacctttgatgcttcgagtgtagcgggaagttgtgagttagggaattgtgtttgtcttaactttgttttttgtagagagaaaaacaatttcacggggtgggtccaattttcagactaagtaaattctgtgctctctttcagctctaaaattctgtggctctaactgtgaatcagagaagtgaaatagagtaatggaagtgagactgaagaagatggttgacaactcaagatgaatgaaagacaaatctaacacctgaaaccataaaaatactagacgataacatcagaaaaactcttctagacattgacttaagcaaagacttcatgaccaagaagccaaaagcaaatgcaacaaaaacaaagataaatagattggacttaattaaattaaaaagcttctgcacaacaaatgaaataattagcagagttaacggacaacccacagagtgggagaaaatctttgcaatctatacataaaacaaaagactaatatccagaatctacaaggaactcaaacaaatcagcaggaaaaaacgaacaatctcatcaaaaagtgggctaaagacatgaatagacaattctcaaaagaagatatacaaatggccaacaagcatatggaaaaatgttcaacatcactaatgatcagggaaatgcaaatcaaaaccacaatgcaataccaccttactcctgcaagaatgtccataattttaaaaatataaaattatagatgttggcatgaatgtggtgaaaagggaaaacttttacactgctggtgtgaatttaaagtagtacaaccactatggaaaacagtgtggagattccttaaagaattgaaagtagttctaccatttgattcagcaatcccactactgggtatctaaccagaggaaaagaagtcattacacaagaaagatacttgcacaagcatgtttacgtcaccacaatttgcaattgccaaaatatagaaccagctcaaatgcccatcaatcaatgagtggataataatttatgatacatatatatatatacacacacacacacaccatggaacactactcaaccataaaaaaaggaacaaaataatggcatttgcagcaacctggatggagttagagaccattattctaagtaaagtaacccaggaatggaaaaccaaacattgtatgttctcactcataagtgggagctaagctatgagaatgcaaaggcataagaatgatacgatggactttggggacttaggggaaagggcaggagggaggtgaggcataaaagactacacattgcgtacagtgtacactgcttgggtgatgagtgcaccaaaatctcgcaaatcaccactaaagaactttttcatgtaaccaaacaccacctgctccctaaaaacctatcgaaataaaaaatatactttttaaaaaagaagatgattgagaaatacaatgaaggagctaagaaacatccctctagtgcattgatcaataaagacttggtatgatgcattaacaaccaatccccaaacctcgataccttgaaataaaacaaagattatttcatgtatgtgtccattagtgtaggccctgctcatcacattcaccaggtattcggactaatagaagagccatcttgaaagttgctgattaccacactgaaggaaaagaaagttctatggaatcttactggcaattaagtgctctagcccagaaaggacaccttactctagctcacagttctttgaccagaacgagtcacattcctcccaaccaaccgctagagggccaagaagaacaatcctaccattcatcttccctgaaggtaggaggtccagaatatttcctaaagagcattattgtctaccaattcagcttcttagggtctaggtccactcgaataaggggactacatatccttccttatcccatggcctagagtataactgactaacaaaaatccctaaaaatagcagaaactgaagttgccaccgaaggccggtcttctcatttttaattactacaagtctcttgctgattatggaaaatgagatgatataataaaatcatcatcttattctcaaccaacagtttaaagtcctgtgattctccttatgttagcagcatgcctggtaaggcccagggacaagttaagtcccaccattagtgtaccaaatcccagtacttacatacttaccttgatgtgtatatgctgcacaccaaggtaaattacaaatcaaacatattctgatttttgaaaacatacttgaactaatagtcattttaaaggcttactctctgggtataattaagcttgaaatcatccaaatattattattttcatagctgcagcaaagcagctgaatttcacagagctaacaatgctgtctctgtgctgaatacttaataagccagaaatgaggcaaaaggtgagcccaatgagcaagcagtatactcagtgatacacaggacctccaggtcaaagggttataccatgttgaaaatcaaggaaaaagacatattctttcagaaatttctctctgcttcagtccaccaacctctcatggaatttattctctgtacctgtgggagtcatttcagtgttatgaaccagcaatcaagacaccttatctggtccaacaatgacagcatcatcatcatcatcattatcatcattacaatcatacacagtatttactatatatacacaaatctcttgacatagattatctcatctaatccccaccacaactatctgatgcagatgttattatgcctgttttatttattttttagaattttttattttatttatttcaatagcttttgggggagcaggtggtgttttgttacctggataagttctttaatggtgatttgtgggttttggtgcacccatcatctgagcagtgtacactatacccaatgtgtagtcttttatgcatcaccccccactccaacacttacccccaagtccccaaagtccattgtatcatttttatgcctttgtattctcatagcctagctccaacttatgagtgagaacatagaatgttcagttttccactcccaagttacttcacttaggataatggtctgcaactccatccaggttgctgtgaatgccattatttcatccctttttatggctgagtagtattccatggtatgtatataccacgaattatttatccactcattgattgatgggcattttggctggtttcattttttgcaattgcaaattgtgctgctataaacaagtgtgttcaagtatcttttttgtataatgactccttttcctcattttcaagacagcatcagctgcggtagtatagggagaatgcaagattgccctaaggtctcctggataagtattcgtgtttctcaggctaatagtcaaaactattacaaagttcagctggaagtttccttctccctgtggtccttcctcaatttcactggcagccctcctcaaggacccctgtgagataaagtcagaaatgacttccctgggcaccaagagtacctacagggctcttcccactgcttctacttttatatttcgttttgctctctaaattcatcccagctctaggtaaggttaaatccttctcctgtgatctggatttttaggttccctagtgggtttgcgtgtttggaggcagattttttcccccactcacactttgggcactcacagtttttcagctgtctcatggagtttgcagcggcaagccacttctttcaaaggtcctgtgaattcttttggttttcctggtatgttcatgcagtacttcttggaggaaaatttcactgtgtgagtctccacatgctgttctgtctgtctgcgtggaaactgcaagttagtcctgcctcctatccaccattttccaacaatctgtcgttaaccatttcaaagtatagaattcagtggcatttagtacattcataatgctgtgtaaccacaacctctatccagtttcaaaacactttcatcacacccaaaagaaaactccatactcattagcaatccttccccattcccttctttccccagcccctggcagccactcgatcatgcctattttaaattgaggaaactaaagctgagaaaagttatacaatttttccaacatgactctgataatagctggtgaacgcaatactcgaacccaggacttgtgattcccaagatcagactcctcccatatacctgtcttttatttcccaagtgcttgggcaatcagctgcacttaaaaagcctttacaaattgagtttactaatgtgagtaatatatgattttttaaaaataataattgtccctaaaggtgaaatggatcaaagcccttaaaagtgaatctgtggtgtagtaactgttaacataattgtcttattttattctcatccccttaaagaataaaactgatgaacaagtgaggatgctggtgtaactccctaacttagtttatagtctgtaagcagaagagtgagtctaaagtacatatcaccagacagtgtttctcctagcatttcgctgttgcattaatcaacaagttaaaatataaacaacggctaaccttgggtttcaaatttaacattccttatctcttagaccaggtttatccactgtgctggggactcccaagccagcactggctcatactgattcattttgatctctgctaataccagagtcctgcgtggcagagccattggcaccagaaattacaagtacgtaaagtaagtaaccagatataatctctgatttctttggatgaggaaagtggggtctggagttttcctgttttgttattgtgctccagggaagaaccaccttatcagaaagcagctttctctgtccaaccctggaggagctataaagctactccttggcccaaagtataggagtagtaaatgtttggatacttataatgggacaatatcattgattcaaccacttaataatctacccagcagtatacttacctgtcttccatgtacacaggtaagtatactgttgggtagattattaagtggttgaatcaaatgggaaaaacttggatttctaatgcaagaggaaaagtctctttttttttttagtgcttccatcagcagcttctaacattgtctgagatcatagtttttgaagggtgactaccaaatgttggcatttggcacaagtgggaagcaaaaggcaagcccctttagaatttgactaatctgttctgtcatgtcatctttttttctgttgttaaaagtgtttcgtgcttcattctatgtattatgtcaaaatttattgatttccatgtgattggcacatcttttttactaatcctgctccagttaaattcacaagatcataaacatcaagggtttgaaaatcatttttagatattcaggtctatgccatctgttctgcagatggagaaactgagtccttggttattagagtttcccctgcatcctagggaatctgctatggccttgtaactggcacagaggacctaaagcctgggagaatttttatttgcttgttgtggttaggaacatttgagtaaatgaggagctgctgctagaggacagaaatcccagagtatggccctccttggacccaagtttcttaccagctgtgctcctttgttcccaggggctaagtaggcaccttcacccaccccaactgccatccagctgaatctctctctgattactcctgaaatgtcacaacccacttgaggatagggtatcattgtgcagtctgtgccaaccagtattctgaagtattttcatgcactaaggtgtaggagtgtgtgtgtgtgtgtatgtgtgtgtgtgagagagagagacagagggagtagggaaggaggagaagatggggaatgcataaatagagggctggatacaaatctgacagtgccaatggcttcctagtaaawgcataggtgagtcacactggaaacagttaaacattggctaattgatacaatgctagcctcaaatatagtataatatgcattttcttgacatcaacaaataaaatctccgggtcaataaaataaactcggaaaataaaactcttgcccagaagttttcaactttctaggttcaaggagcccttggtgtgcaatttcttcaaggtgcccccagaccatagtttctcctattaagtagacaaaaacttaataactatttatgttctaacaactttgtagttttttgaacaagtaatatacaaactaaaagaaaaataatatttttatttcattcttaatcccaattacttaataataaggtttatgtgcctgctgagcactgcacaacttctcaaaccttggaatcagatcagacatgaacccttcatttctattctacctcagttttcatgcaatacttgctttttgtcatagcaattgtcaaacacccagctttgcaaagatatgatgtcagcaaatggaacacagtcttttacaatattaaaactgttaactactttcagctaatacttagcatagtgttcaactgacatcaagaatcactgtgcttcttcaaaattttaaaatagctcagagtgccgctgcagtttggtaatgacaggcgtcacctcatgttttgacctctcatgatctactgtcctactaaaccaaagcggacactcaatctgacttcagtaaattatatatttgcattttacaactttcaagaagaggaagcagtataaaattcacaaaaaagcatagtagtttctaaccctgtagttaaaaatcagtcacttttatacaaccaatagcgatttcccaactcatttagtaattttatgttgcttaagttattttacttgtttttttcactcaattttcacccattggcatctaccttcctaatttagtcctattttcttatttttatctcttatttattttatatttagtcagctttactgaggcttttctcattaaaataataataataaatttatcttaaaacttccaacaacggaatggccaaatttttattaaatatctatgctggggttcaatcaggctggtgggaaaaatattaaagatagttatggagatagacacaaatcttcttggaaggccgagaagtttgcataacttcagtaatagatatggttgaaggcaacctgatctttacctttagttaaacaaattaaagtagtaacaaaggaaggcagagtagtttacctacctagtttktttactcatgtgatcttaaaactaacctttgatgtacggcaggtgcttaagtgctttttacttgggaagtccataatatcaattaccctctaacggtgttgactcaagcttctgttaattaatcttaccgaataaatgtgagtctgactagctgatcagggccaagtcgcaactgtttacaggrctcagcagggagcctgtaaggggcttggaccctcagctggactggcagagcagaatatctgtgtgtcagtgtactttattcattcatcgcgtggtcaggggtctgcaaggaacagacttcccgcagctggtgccccctcgaggagcgctgccgcatatgcacataaggagcaataacatttttaatgtttttgcatttgcacgtgaaatcgcactccaataaacagcggtggcatgtcagtgtgcttttcaccccaacaaaatcccctataaattgttatcaatcactctgtctaaatgcaaagcagtcactaacaagaaattatttttagtttaaataaaaagtggcgtggggagacaaaactttttctgaagaagcacacttaaatgttttaaaccactttggtttcctccaggcctctcaggtaggcatgaccagctacaggatgcgatgccagatcctccgatcccaccccaggccctgcccctgccctcccatgaatggttaatatatatataaatatccattttagcagtgacattcccagasagccccagagctgtcaagctcccttctgccagggtgggggttcagactgtcctgtcacctctggggtgcctattggcatcctctccccctgtgcttactaatacagtcccttccccatacccatcaaaactggaccaactgccctcgtctctttccctagggccaaaatttaggggcctcagccccccgccatgcctctcctctttccacctggcctgttctgtccctgagccctgtgctctccatccattccatggctgagagtcggtgatgctgcctctgccttctgatgctgaactggccttgtttctacaagtacgcttctcccacagctgtggctgcagggacttaacttacagggaggggcctgtggcagctgccaccacagccacaggtgcactgtgctcaccacacatctggtgcagccttttctggcagaggctcttgtgttttctcattttccrttcctctcactgtggctaacaggtgggggtgaggggacagaagagggagggctgcctaccacggtctggggcttcaggaatatgagtttgtttatttaaatgaatckcagtctttcaaataaaaaataaaaaatcagtttgatttcatataattgtcaatacttgaaggagtggttggaagcatgaattttgatctgagagtgaagctgatattgatattgtgcgcctccacattcatgtgctctcatgttggcttttctcacgtttgacaacaactcatatgggaacatggtgatacaccaagcagatctgaactgaaaacttaaaagaaaaaaacaaaaaacctttcagggtgactttgaaaccgactttgtgtccttttttctttccctctctttcttctatcatcattcttatatttccctactcatttccttcactttctaaaacacaatcattaaacacacatttctagtttaccccatggctctgattccagatatactgtgactttgtcttcataaataaacctgaaattttcaagtcagacatccacaaaaatatcaaattaaaccctctacctgcaccacgaaaagctcaaaagactgccaggcatggtggctcatggctatggtcccagctactttgggatgcagaggcaggaggatcacttgagcccagacattcaaaactaacctgggcaacatagtgagacctcatctccttaaaaaataataataagggaggccgaggcgggtggatcacctgaggtcgggagttcgagaccagcctaaccgacatggagaaaccccatctctactaaaaatacaaaagtagccagacgtggtggtgtgcacttgtaatcccagctactcgggaggctgaggcaggagaatcgctcgaacccaggaggcggaggttgcagtgagccgagatcatgcaattacactccagcctgggcaacaacagtgaaactccatctcaaaaataataataataataaggaaaagccccagggagatttactgctcagagaagtctgactacattggtccagctgaggtatggtggtggcccaggtagaaggcttctgtatattggatgtttaacaaaaagttgtgtattttttaagactagtcaagtacagtagtgagaaagggggaaaaagtagaacaaggagttcaatctgtaactctgtaactgtaaacaatcaatcgagttagcgtactacctttggactagccaataaaaggtaattttgaggaaggaatctttgacctaggatattagcttacagcaaatttttactgagttaactttttttttttaaaatggagtcttgctctgtcacccaggctggagtgcagtggcacgatcttggctcactgcaacctccacttcccaggttcaagcaattcccctgcctcagcctcccaagtagctgggattacaggtgcacaccaccatgcccagctaacktttttgtatttttggtagagacagggtttcaccatgttggccagctggtttcgaacttctgaccttaagtgatctgcccatctcgtcctcccaaagtgctaggattataggcatgaaccaccaccccggcccgagttaatttttaaattgaaatggatatagatgataaatgaattcattttacccatcacaaaatcaacccattgccaaatagttacacaacagctattatagaccaagtgtgttgttaggagctacaagaaaataagagatgagccaaagaaaatgcctactttggggaaacatataccttatatatacagaagactaatagacatgatcagttcatcaacaatgtcttatggatgatacactgtcgttggtctagcactcaagagtaaggcaagcttactgtggggtcaggcagcttctcacacctctgtgaccacctccagcccctactctcagtgctccctaactctagagcccactttcttcccttctctgcccactgaagtctattcatccttcaaaatctggagcaaatagtaatcstctgtgttgttttcctaccaacccattgtcagaattggcacctctttctttgtgctcttattgcaatttgtacataagacatacttctgtcttagcatcttacacagaatcttgtaattatagattttcacgtctcacttccctaccagactgattgctgctctagagaaagcgtcatgccttattcttcctttgcaatcccaatacacaaacttgggcttagcaatatagaaaccacggagtgtttgatgcctgagctcatcagagaatgaatcacagatctgagttgatagaatgttatagggcatttcgtttcaccctctatataatgtgttaatctgcttataatacctccaaatatttgtcatctagatgctgcttgaataaagccaattttagagcttgaaatgctggaaggtgctataagcaaaaatgtgccttttcagttccaccgctggccataattctaatctttctctccatgttgatccttcaaatgtttaaaggcaaatgtttacattactgagtcaggtgcttagattaagagacaacttagatcctcttttgcaaagtgagcccagggcagttcagtcccctgctcaaggtctccacagctagctcacagcagatccaggtctccagctgtacttccctctgctccaggcacttggagtaggtagttccttcttactaaaccagccaggtgctttcagtcagcagtgggtacctgaaactacattctagtcaaggaaatatataacactggtcctttctacactaggagcccattccttctgtctgggacacccttctggacaccctggcaggataaacactactagcctttctccaggcccccctctactggcctcctctctagtttcaggggagataggaaaattgcctcaccctctttctcatcccagctcatggaaatggctcctcaccctcccctaacacaaagaacctgctttctttcctgctgtcctgctgtgggcactaatgtcatgctatggtcagacctgctgtctttatagagccagcatgcttctgtgcacaactgccaatatcatatgtatatatgcaatactctttcctttttcctggaattgtttttctcataaaagtggatattctttatcaaatggctactatgtcatacaaaaatgagtagcatttggccgggcacagtggctcacgcctgtaatcccagcactttgggaggctgaggcaggctgatcacgaggttaggagatcaagaccatcctggctaacatggtgaaaccccgtctctactaaaaatacaaaaaattagccaggcatggtggcgggcgcctgtagtcccagctattcaggaggctgaggcaggagaatggtgtgaacctaggaggcagagcttgcagtgagccgagatctcaccactgcactccagcctgggcaacagtgcaagactccatctcaaaaaaaaaaaaaaaaaaaaaagagtagcattctatcccatcttgcgagtgagtaaactgaggctcaaaaggggtaagtcattttcctatatcaccaagttgactcatgatagaataggattctgaaacacatgtgtctacccccaatacccatacttcacaactgcctctctaaatgtggggtcaccttactcctgttgggcccagagaggggaaaattatacaaggtttttgattttatagtgtccttcagggcctaaaacatgaattcccctagaaggaatctactggttcttccccagtaaattatatccagttgctatgggaagcaaccagccctgcaacacttttacatgttgcttgaaaaaagaggacctttttatttcattaaaaaaaattgagcattttagtctctacagttaagactaaaatattgaatattttagtctctacagttgagctgcttctctcaggttcctaatccaaaacaaaaaaagatgcatatccagctttgagaagagaattcacctgtgaaataaaaaatagcaaatttttagaaaaattatgtctttgggggcactgcacttaacaaacttagggagataaaactgtcacaaaaatatattgggggaaaagctaacatcacataatttagtgacaaatgtgtgtgctactgaccagaaatgctataggaattaaaagaacagaggctcattgatgtgaaaggcagataccaattcttggaaatgcttttaaagtttcaataacttacagctactgagcacttactatgtgccaggagctattctgagacgccttacattattaactcacttgattctcacagaacacttcaaggaagctactattgttttctttatatttgtgatgcacagaagggttaatctgtccaagattacactgtcgtaactgatagagccgcgctttatctcaggcagcctggatccagagcctggttgcttaatcaatgcactctrttgcctctcggtgttcttacacatgtgtgttattaacacatggcctggtgccagaagattctctggcccatcccagtggtgactgtgccatgtgccctggaggtgaatcagtatccaattgagaagggagggatggctttgcatgcctacctttctaccacaaaccctccctggcagccaccctctctctctcccactggtgaccatcactggtgacctgtgaaagggacacaccaacagcacagctggggccctggcattgtgccaggggcaggatcacacagggcagtgccgcrgtagcaccygtggtgccacaggtgtggtggctcctggtcccaactccaccccaccagctgctgtgtggtgttgtgtcaggtcaccacaccaatcggagcttcagttttgtatgtgataaagagattgtgtctgacaaggtgaccttttcctagtctgctgatctatgcagttctagggccacagaatggagactagaggcagcagctcagtctgaagtgcaagactttrtccagtaaaaggtccaattccagcagctctgccagaagctacagccttgacaactgtacgaacatttggcactggtgctgcatgaggggcgggaacataccaagcacagggttaaccagtgacctgaacattttccttctcacattcacacaccagagacccgctacagaagattcaaactgagcaaatcgcctaatcttccaaattctttttcctggcttgttagagcagccaagggtggggtggagcttgtgaataaaaagcctgcttcatcttcctcaygcaggagaacatggccaagcgagttgccattgtgggagctggggtcagcggcctggcctccatcaagtgctgtctggaagaaggactggagcccacctgctttgagaggagcgatgaccttggggggctgtggagattcaccgtaagtggggtttcaacaactttatctgtctattggagaatggcttggcagctgggaaattatatctgtgcttctttcacaagggttggtggccttgaggaaggttagaaatgtctgctgaacaggggrccatgaggagccactgaaattgtaaaagaaacaggacatgggtgagctagggtggaagtcagaacagacttgtacactttatctagagccaaggggaagaagtgtttccaaagatgcccaagaagtatggaagagaatggagtaactgggccaggccaggaaagcctaggagcaaaggagcaggaccagggcgtctgaagcagggccagagacggcagtgttaggagcaagagcaagaatttcagcctctgcctgcaagactgagctgcttttacctgcttcttttcccagcctggctccgtctgcattacagactcagggctctgtgtaggatgagctccataatcaaggtcctgctgacctggcaatcccagtgcaggccaagaacaaacagaagtaaagaatgtgagttttgagtcttttttttattccctgagcagaagaaaagtaatatactcaagtctcagcagggttactgcctggatcggagaaaggaatgaaggggtgaggaccgaggaaaggggactataaagcccacccttgcctggcctggggccccacgagatcacaagggcccttcttaaagccattgaaaccctgaagccaggcagggaaaatgttccctgaactccatggcttagtcagggaaacatttgcatcaaatctttccagagtttctattttccctccttttgagcaaaaacatttcccatgagctttaaatttgctgaggagaaagctgtcagaaagagtgaaaagaagcaaggtatcagatagccccgcctcagatcccctgaggggctgagagaaagacacagcatttctctgttacagaagggtagaatttggaactgaagtaaagtaattattttctagctcagtgagtaaaactccagagaggccaaggttactagtttagtcacagtcctccagcataggcggcttggctcacataaagaactgcatatcttaaagtgtacccaccaaatgtgatcatcaatgcatggagactgccaaagaggacaaggtaaaagagcatgcctcttctcaggaatcaaaccacatatgttccaacaggatggcagaaacctgacacctargccaaaaatctccccactcccatgtccatcgaagacattattatcaaacatgatgcctttcccctagggagcctcagaatccttcttaacattattccaaacaagcatacctaatcagtcagggtcaggagttggcttgaaagatgaaactgcctaactaaattagccgagttatttgactaaagtaatctcagtcaaaacaaaaactaaacctaaagatcaaaagcagtacttagcctcttgcagcaccagacataaatgctccttgtataggtcacaggcacctaatcatcaacactaaaaatcaytgatctaagaatcaagagaaatgagtctggatccagctgggcccatttccagctgtgtgatgcaggtaggtcaaacaccagtgcacaaagcacaaaaccctgtgggggacacaaaaatgaggattcaccctgccctcaggagctgtcaggtagatggaagaaggctaggattctgcaagtcagaaacagtgctgtgagcatttcattgagagcaggatgacagccacatttaggaagccagaaaaggcttcactgaagaggtagtgtgtgatggactttgaaaaatttcaacaggtagacaagattgagcagaagacaccagggagggtagggacagtaaagaaaaagtactgggcatattcagaaagtaaaaatagctttttggtgcataaggtacacgtaagaggaagaatgggagggaaaagggtggctgcatgtttgggcaaggggtttatactcagttttaaaagcaataggtaatgaggaacaaaattaaggagatttcctggttgtcgcgtttgttttgtttgcatgataggaagacccaaagatttttgtaggcaaatagaaactatctggatgaccagaaataactgagcacataaatccaaaytgagacacaatcctggcaggaaaagggaggagtggaattgtaggtaccagtggaagggttagccctggcaaggtggggagacaagagatacaccctccccagagattggaggggaagggaaggtgaacatggaagagaaattttgaggtagaggaagaagatataagagcactcacaccagaggccctcaattctatcgagaaaatatggcacctgcaagggtaaagagggtgtgggggtggcaaatggggttggagaattagaaaaatagagaaggtcagccaggcacggtggctcacgcctgtaatcccagcactttggaaggccgaggtggacagatcacctgaggtcaggagttcgagaccagcctggtcaacatggcgaaatcccatctctactaaaatacaaaaattagccaggcatggtggcatgcacctgtaatcccagctactcaggaggctgaggcaggagaatcgctggaacctgggggacaagattgtaccactgcactccagcctgggtgacacagaaaggctccatctcaaaaaaaaaaaaaaaaaaaaaaagaatattgtggagaatgcaataggacatcaaaaagattagtaagaggaatatcaagcagtagccaaggtaaaatggcacccaatttacaagtcattccagctctattacctcatttataaaatgaaaacatgggaccagtatgaaacacatacaaaagctgaattagtaacgggcttaggaaaatccaccctcaccttcatgcagcagccttctcttgacactgcagcctttttaggcacctctgtaataccttgagatttctctaaagcttgactggacattcctaaactaggcaatcttgaaggtgccttcagctctaatatgcgatgagtctcctgagtctttctagagacattcctttccctccttccccaacacacacaggacacacacacacacacacacmcacmmaaggttagagatgtctttgcactcaaggtaggtggcccatttaaaacctgtaaaatcaaaaaccctgccctggcaatggctgtgcttgctagaaagtgttcagaagggaattcttactgccttagggtggaagggaccataatgcaaaagtagaaaggcaaattgcagagatccaataaaacacatgtggtgacagtttccatttccagatggggagaggccccagagaatatagacatcataaattactgcattttggccaggcgcggtggctcatgcctgtaatcccagctcttagggtggcagaggcaggaggatagcttgagcccaggagttcaagacctgcctgggcaatataacaagaccccgttccgttctccataaaaaggaaaaaaaagacaaaaataaataaataaattaccgcatttcattggatactcacaatgtcatgactctggcctctcccagctaccacagttttaaggaaaagagagataaggcaggagttacaatgaaaaagaaagaacatcatacactggggaaggagagagggtggaaaccattaaaaagaaaaatgctacagggataaagaaccacttctgacccaagtagaggctggacatgtgtgtgaaacacttctcagactcttgagagggaggggaggcttaggaaagtaaaactgtaggttgactatcgccattaaaaagtgatacttgaaacaaaatttgaggaattatcatcaaatattactttcagagaattttagtataggaagagaccttggagaattagaaaaatagagaaggtcagccaggcacagtggctcacgcctgtaatcccagcactttggaaggccgaggtggacagatcacctgaggtcaggagttcgagaccagcctggtcaacatgacgaaaccccatctctactaaaaatatgaaaattagccaggcatggtggcgtgcgcctgtaatcccagctacccagtcttcaggtaaaagcacacagacatcatctagaggtgactaacagtactgtggggtaaaaatacactgtgcttcatccttcacctccctgtaacatttgctggggcccagtaaccctccctagaatgatattttcctcatgtgcatccagttcttttcctcggcacatgcacgctttcatttattcaacaaacattgattgaaaccctactatgtgccttacataccacattttttacattcagtgagggcaatgatgaagtgtaaaaatacttcacacttttaaatcacaagaatagttcctcaactatttcttctttaggtttggtaaatctgattcctgtaacctttcattaaaagccttatttctaaaacgtctattcgtatattcaataaacatttttaattactatcatcctagtggggtacccctgacaggcccctatcctcatggagcttgcattcttggaggttccccaaatttcctctgaggtttccacagctctcctgcgatatagacccagaaactggaccctgtcctccagtgagagtctgactctcacactaggcagaaggggcaacaaagtaaaatgggtgccagctgttttaaggaaattaaaagaaggaagaaattaacattcttggagaacaggagacgtgaatgttgtgcatatagagagaaggtctctatttaggggtgaattttattatcactttatatccgtttttaaaatgagaaagaaaagaactgacctgacaaaattttcttcccattgcctacactcctgcctgaaggatacaagcttaagaaagtaaatttccatggtagctgtgaaagaataatacaaataatgattaatattattgacagcctagaggcattgttccattagtaccattagcatgatacgattgcttcattgttccattagcatgatagctatcactccaatttctcctaggggctatgtaatattgyggttccagcatatagatatggaaactgagagaagttaagaaaattcccagatcagccagctaaaaatgtagagcttgagtatgaacctaggcagtctgacattgaggcctattctgttaagaactacattgcatgcatttctggagtctgtttcacagctcaagaatcaggcaaatcctgggctgcgtctcaaagagtcccagcaagtgtcccagtggtgatggtgacctcccaactgtgctgcaggaccaaagtggaccagaaggacagaaacacctctgctcatgctcttagtctcttccctctttccatggttcaaccctcctctccttttttctctactcactcatttttctcttcatgaaaacaaaaatcttctcctaagtcgccccatccatttttagagggcacgtgcttccacactcggagttcaaggcaactggtggaccccccaccaggtacaattcccagagtgtctgcagcacgggtgggagggtgcagtgtgggtattgaaggctggcagggcctgggaatcactggggcagattgcacagtgaggcgaacactggaggtgaggggccaggtcccaccaataccattcagaaggggcagggactcatactccctgtatatatgctaaatactccagaccttttctatttccaggagaaacaatcaatagaaggaaagagagacaagagtaagtattggtcttagattttatcctaagggctaagtttcctctgtaagctacagtttctcatatgttaacatctgtgatacattatttcacaacaggcttcagtgtttcctggaagcgcttcatctttctgccttgaaaattatcttcctacgttttgagaaacagaagggttatttttccctctatttttgttagttcattggccttaagttctcataaaataaatggttccctggcttatccagttccaatgaattgctgatatttaaatatgccattacaaaatgctttaaaatttttaatttgtgtgtgtgtatatatatatacacacacacacacacatttatatatatattaaatttatatttatatatagagagaaaaattatattttgggtatattgagttaaataaaatatactcttaaaattaatttcacttgtttctttttacttttttaatggggccactggtaaattcaaaagtgtttatgtggcatctatacatcctattgggcatcctaaagcactctcactcaaaatatggtccatgggccagcagcgtctgcataggagcttcttataaatgcacaatctcggacaggggcagtggctcacgcctgtaatctcagcaatttgggaggccgagaagggcggatcacgaggtcaggagatggagaccatcctggctaacatggtgaaaccccgtctctactaaaaatacaaaaaataaaataaaattagcagggcgtggtggccggcgcctgtagtcccaactactcgggaggccgaggcaggagaaagtcgtgaacccaggaggcggagcttgcagtgagccaagatcgggtgacttcactccttcctgggcgacagagcgagactccatctcaaaaaaaaacaaaaacaaaagaaatgcacaatctcaggctcaccctgacttacagagtcagcatccacatgtttgttagactacccaggcaattcctaacaaaattaaaaggcgctgagctacagagctgtgcttctcaaacagtgaagaacaatcaagtttttttccaattaattgtagactgttgtcaaatataataaaaaagaatccggccgggcgaggtggctcatgcttgtaatcccagcactttgggaggccaaggcaggcggatcatgaggtcaggagattgagaccatcctggctaacacggtgaaaccccgtctctactaaaaatacaaaaaaattagccaagcgtggtggcgggtgcctgtagtcccagctactcgggaggctgaggcaggagaatggcatgaacccgggaggcagagcttgcagtgagcagagattaagccactgcacgctagcctgggcgacagagcgaggctccgtctcaaaaaaagaaaaataaaaaagaaaaagaaaaaaaaaaagaatgcttagaaaaatgaaaatgacacaaacaaaaaatacaaaatgtaaatttgaaatttatagagtcagaaattataaaattaatttcagtaagtgtcattaaacaacatagatataaaggaaaacaattacaaaaaatgaacacattgttctttgaaagtgggtacataggcaattgacacagagagtcatcattacctttgtaactttttgccacacaaatattttgtatgaaattgcagttctccatgttaaacactcgtagacacattttaaatacacattttttatattactatttaaggtttttaatatgacaattaatcttgcttcctggttgtcaatttacctaatctggtttgaatggatggcaatgctctttgcaggggataatgtgtatctaaactatttctaaacattgcttaacagcagtcaaagtagagaaaggaggctcacagaggtatgttgattgaaatgaggaagagatttttaaaccagtctcagcaagttcagtgtatwttttttaactgctatccaaaatgaagctgatagtgctacatttttttaatgtatcttcagtcttttatccgtagccagttcaaataacttatactgtaagattaaatataaataatctttcaatgaaagaaaatgattccagattttatgcacttttggataacagttttcaaaataaccttaaaacatcgcacatgataatacagtcctatggcatatgactagtacacaactcaaactcatcacacaagttagacaaaaacaagactgatttatatcctgttcaacaaaatggtgtccacatgcttacatattgagcaatgtcaaattattgctataaaagtttctaaatgcttactcttgatttctgtatttatcctgtaacagactagtaacaaaccattcatatcagtattgctctgcagactatgtttgaataacactgcattagatattccagctgaataaaatatcaagatttaaatagtcatctttcgcaagcattttagctgagtctgtgtgacaggtgggccacagacaagcaggttgtaatcaactcttatcagtcaatgagataaataacattaatttaaaccacagagatatgtttataattttgttatctgtgattgctgtgtatttcagacagatacrggaatctatatatgatatcaattcacatcctttgcagaaacagagaaagccctctccatatgtgagatttatgttcatgtttctacttgttcacataaattaaataatttttatttcacaggaaaaatgaactatacatatgcaagatggtaaataatgttaaaatacaagaaccttgccactgaaattagaataatcctccatactactccccaaaagacagaggcaatgtatattaaagacattactaaaactgtttatcattcaactttgcagtagtcttatgagatattggtatttgctagttatttgagtaaaaactgagggtgggaaatttgttagtgctttgccacacacagttgtccaatctggaaacctttgactgcttcctctctcaacccctaaatctaattggttttgcaatcctatgtgttctaccttaccgccatctcacaaatctcacccttctgggttccagctrtcattgcctctgctcatgccctcattagcaatcaagtggatttgtgtattaggctcctggctagcgcccccttccttccttcccagctccctctaattcaccttttgtagaacgagagttatctttccaaaatttagaagtgatatgaatcacttctatatttagaacgttcagtagattggcataaccttcctgtaaaatccaaattccttaactttggatacaagatccttcatactctgaaccatcttctccataatcatttccagaataccccataaaaccaaattacctagcaattgtccatcattcaaataaatactacttcctgattctcatgtatttctatattctcctgtgcttggcaatgatactgtgtgcatctggaccggtgagttcttcccaggcttatttatgagcatgcaatgaatgttcatgtgtgtgcactgtttgtacaggaacatgttgaagaaggcagagccagtctctacaagtctgtggtttccaacagctgcaaggagatgtcttgttactcagactttccattcccagaagattatccaaactatgtgccaaattctcaattcctggaatatctcaaaatgtatgcaaaccactttgaccttctgaaacacattcaattcaaggtaagacacaaaacatcagttagtagtcagaaagtatttcctacctattttctcttatctctccagcctagccctgggctctgtagatgagatactaaactggcaatattaatgacacctggctgtatttattttctccctatactcactccccacttcaagtaaatctggaggtgggggaggatactttgtgtaaagattcacaagtataaaattttagtttgcaatacttatatccaagtatcttagggaacctaaaaaatatcaagccacattttcagcttgggccaaatgcctgcccacatggacactgagaaccaccaacccccttccccagtctcctgtttggttttttgtctgtttgtttgtttttgagacagggtctcactttgttgcccaggctggagtgcagtggcatgatcatggctcactgcagcctggacttcctaagctcaggtgattctcccacctcagcctcccaagtagctgggaacacaggtgcacaccaccacacccagctagctttttatattttttagcgatggggtctcaccatgttggccatgcagtctcaaacacctgggctcaagcaatcctcctgccttggcctcccaaagtgctgggattacaggcatgagccactgctcccagctcccactctcttcttgactattcttttataggaatggacacgtgcagtggcccatacacaagagaaccttgctatgtgaaagaaatcttttctagatattcttgagaatagaaaaatctttgaatattgttattctacaatgcccccttcctctcccatttcagaggctggagacaggaggaaggtagtaggacagggacaaatgaataatatatcctttttgtcctttttttttcctttttttctctgtttcctctccaagaaacatatgaaaatctatgtttcccttctcctttctccctcccctgtcagaggtaaggatgatgaggaattcacagagaattatacacagaaaacaacacaaatggagacattgaccaaaacaagtggaaaataaaatttgcattcacattcacgaccttaaaagtcctctgatatggtttggctgtgtcgccatccaaatctcatcttgaatttccacatgttgtgggagggactcagtgggaggtaattgaaccatgggggcaggtctttcccatgctgttctcctgatagtgaataagtctcatgagatctgatggttttataaggcggagcttccctgcacaagctctctctctgcttgctgccatgcacrtaagatgtgatttgctcttctttatcttccaccatgattgtgaggcttccccagccacaaggaactgtgagttctccattaaacctctttcctttgtaaattgccaggtctctggtatgtctttatcagcagcatgaaaatcaatacagtaaattggtaccagtagagtggggagctggtgaaaagatatcaaaaaatgtagaagtgactttggaactgtggaaacgtcagaggttagaacagtttggagggctcagaagaagaaaggaaaatgtaggaaactttggaacttcctagagacttgttgaatggctttgacaaaaatgctgatagtgatatgaacaataaagtccaggctgagatggtctcagatggagaggaggaacttgctgggaactggagcaaaggtgactcttgtttggttttttgttttaaaaaaaacctctgcaattattagtttattagtatcatccgggacttagatgttcagtattcctcctgaaattacataaacaaatgcaaatggaaagaatccaagtcaaaattatataacaaaacagcactccatcacaaaagcgtgtaaaattacaataacactattttaaaatactggcatcttaagaaaacgataatcttgaaaatcacaaaattgccaaattgttccctaaactgctaagcagataatcatgactaatgagtgagtttgttttgtaaagaaaaatcattcaaataaattgaataattcatactgagatgcaaaatttaagtgtcttctttcctcctatttggatttatgagggggcaaaccataatataggaaaatatacgctattttgaatgtggcatctttgttttaaaagctggcccaattaattaaaaatacttttaatggaaagtctcatttcctgagcagtccatatttagataaatgggaaaagacatctatagccagcattttcatagtcttcactgagactaatgtcaacaaaaaatttaatatggcagtcctgyattttaagctcacgcttttggggatacattctcaggtcttctttaatgtgggaactgcaaaatataactgccattacatggtaatgggagttaaagaatagagtcctcatgtaaaaattacaacatacttttctattagtccttcaaggactaatttcaaaatgttggattctagtaatcccatgctttgagtagattgattactcttcagtttgtaaatgtaagtgggctatgtgaaatttcttaactgatcaagattttggatgttcagttatggatgaaaactatctcaacttaactttacccccatatgatatgcagggtgtgtagacaaaagctttttattagctaactatatgaaaggataaacactgtaataattcatgtgattcaaaatgggcaaaagcaaagactagcttcccctccaaaagaaaaatttcagacctatgaaaaggacaacaatactaataaaaaatttgtatttacttagaagcattcagaatgtaaacaaaacagctgcaacttttttttttttgcaattacagagtggtattcagttaacagaacaacaattatttcctataagctgcatcagagacagctgaagatgaaaaaactaccatccccatatataactaatttgtgctgtgcaccaacaagaacatgctttaaatttccatgccaatttacaacccgcatactgcaccaggcaaggttagtggctattgaaaacaccaccaggagagggctatctaaagacacattcggtagtgtgttaactttataaaaaaagacactgtacagtttaaaarcaaatcctacacagacttacatttccatttttttctttaaaaggagtgacttgtgaacagtagggttaaatgctttatagacgagaaaaaaaaccgctagaaccaacttattcatcatcttcttcatcttcatcttcttcatctacctcctcatcataatcttcttcatcttcctcatcttcctcctcttccttctttttcttgcttttttcagccttgataaatcccttttttgctgcatcaggcttccctttagctcaatatgcagcaatatcctttttgtatttttcctttagctttgcagccttcttttcacaaggctgcttgtcttctgcagcagtgttattccacatctctcccagtttcttcacgacatcactaatgggcaggccaagttgttctcctttaatttttgggtgatactcagagcagaacaggaaaaaggctgaaggaggcctcttgggtgcattgggatccttgaacttcttttttgtctcccctttgggagggatttaggttttcacttctctttcataatgggccttgtcacctttgccatatcttcaaattgtcctttctctttagcagacatggtcttccacctctctgagcctttcttagaaaactctgagaagttgactgaagcatctgggtgctgcttcttatgctcttcccgacaagtttgcacaaaaaatgcatatgatgacattttgcctcttggcttcttagaatctcctttgccaatgtttagttatttttccccagtgaggcacagagttgcccagtgcccatctggctctcacttgccccagtgctgtctctatggagctcaatgtactgcctcttcttatgttctagcaatgagactggagatttatggaactttgaacttgagagatgatttagggtatctggcagaagaaatttctaagcagcaaagcaataaagaggtgacttgggtgctgttaaaggcattcagttttaaaagggaatcagcataaaagttcagaaaatctgcagcctgacaatgcaatagaaaagaaaatcttattttctggagaagaaatccaagccaactgcagaaatttgcataaataacaaggagccaaatgttaattcccaaaacaatggggaaaatgtctccagggcatgtcagaggtgttcaccacagcccttcccatcacaggcctggaggcctaggaagaaaaagtggtttcatgggccaggcccagagcccccatgctgygtgcagccaagggacttggtgccctgcatcccagctgctccagctgtggctaaaaggggccaacatagagctcaggcagtggctttagagggtgcaaaccccaagacctggcagcctccacattgtattgagcctgcaatacacagaagtcaagaattgaggtttgggaaccttcacctagatttcacaggatgtatggaaatgcctggatgtgcaggcagaagtttgctgcaggggcagggatctcatggaaaacctctgctagggcagtgcagaagggaaatgtggggtcagagtccccacacagagtctctactggggctctgcctagtggagctgtgagaagagggccaccatccttcagaccccagaatgttagatccactgtcagcttgcatgtgcctggaaaagctgcagacactcaatgccagcctgtgaaagcagccaggagggaagctgtaccctgcaaagccacaggagcagagctgcccaagaccatgggaacccacctcttgcaacagtgtgacctggaygtgagacatggagtcaaaggagttcattttggagctttaagatttgactgccctgctggatttcggacttgcatggggcctgtagcccctttgttttgaccaatttctcccatttggaatggctgtatttacccaatgcctgtacccccactgtttctaggaagtaactaaccaacttttgattttacaggctcataggtggaagggacttgccatgtctcagttgagactttggactgtggacttttgagttaatgctgaaatgagttaagaccttgggggggaactgttgggaaggcataattgcttttgaaatgtgaggacatgagatttgggatgggccaggggtagagtaatatggtttgtctgtgtccccactcaaatgtcatcttgaattctcacatgttgtgagaggggtccagtgggaggtaaccgaatcatgagggtaggtctttcccatgctgttctagtgatagtgaataagtctcacaagatctgatggttttataaggcagaatttccctgcacaagctctctttttgcctgacatcatccatgtaagatatgacttgctcctctttgctcctgccatgattgtgatgcttccccagccacatggaactgtgagttctccattagacctttttcctttgtaaattgcccagtctctagtctgtctttatcagcagtgtgaaaatggactaatacatcctcctaaacagatttccaaagagtattttattccacttccttattttgcaatggacacagtaaaaataaagcattatcataatgaatatatacaacatataaaaatcttctttttaatgcatcaaaatttctgaatttgaagcatttcctttaccacatgctgcccaagaccttttttattttgttgttgttgtttgaaacaaagtttctgtcacccaggctggagtacagtggcaggatcttatctcactgcagcctccacctcctaggctcaagaaatcctcccacttcagcctccccactattaatagctgggactataggcacatactaccatgcctggctatattttttttaatttttagtagagataaggtctcactatgccgcccagggtggtcttgaactcctgagctcaagctatcctcctgccttggcctcccaaagggtggggattataggcatgagccactgttgccaggcacaaggccattttagaacaatttttaaaaagctagatgttcaccaaagttttaaaaagtaaacacaaggccaggtgcagtggcccacacctgtaatcccagcactttggggggccaaggtgggtggatcaagaccatcctggctaacacggcgaaaccccatctctactaaaaatacaaaaaattagccagccatggtggcatgggcctgtagtctcagctactcagaaggctgaggcaggagaatctcttgaaccagggaagcggagattgcggtgagccgagattgcaccactgcactccagcctgggcaacagagcgagactccatctcaaaaaaaaaaaaaaaaaagtaaacacaaatagctattactcagctgtgatctgtagttgattttgtttggttttgcttctcattcctctgtatatattccaaatttttaatgacaagcttttttttttttgagacaaggtctcactctgttgcccaggctggagtgcaatgacactatcatggctcactgaagccttgacttcccaagcacaggtgattctcccaaatcagcctcctgagtagctgggactacaggcatgggccaccacacctgggtaattttttgtattttttttgtaaagatgggattttgccatgttgcccaggctacatatttattatttttatgattaaaaataaatctattttgaaagattttaaactaactgaaaatttacttttagaaaagacagttgcactacaaatgtagaaacacaataagcacttcaaatagtataaatcaaatagygaacccattaagagggacttaagaagcctatattctttaaaaactttaaaaaagaaagaaagatagcaagccacttggtgagtgaataatttatccttttaaatttsacttgtctgagatttattgtacatatatttcctgaaccaaagcctggtaatcatggacatgtatgtactcactaagagcaaaaaatagattctttgaaatgtggactactctcaaaaaaattcaggccataatgttagcacttttcaattgctttctagttctggaaaaacttcagcaacatattctataaaacctcataagctaatatacacaggaccaaattcaggttttcaattatatcttacccatgtatctgtcaaagaaatttttgttaaagagacagccctgtgagaaatgaggttgcataacagaaaggataatgaaaaaggcatcagaaacttaggttctaattctgattctgtcactttctgtgagaatttgagcaaatcacttaaaatttttggatgccaccacttgtcttagatatctctccaagcttagactacctcyatctagggaatcatgattagtccggtaacctgattaggtttctagggttatacttattaattatgttyattctgtgttctagaacttttaaaatatcaatggtacatcaactggcaagtgcttaatggaacattgacaactgctaatcatatctgtgattcttttttcagaccaaagtctgcagtgtaacaaaatgctcagattctgctgtctctggccaatgggaggtggtcactatgcatgaagagaagcaagagtcagccatctttgatgctgtcatggtctgcactggctttcttactaatccttatttgccactggattcctttccaggtacagcattttctstaactaactttaagttttctcgtgggagccattctgatgcttgattggtctgggaatgaattcctatggctgttccattaaatagttaaagttgggmggtaggaggaggctttttttgttttgttttgtttttttctagccagmattttctggccagtttttggctttcatttgttccaaacaatctgtgaatacataagagcaaaatggataactttataagtatttttatgctttaccaagattcartgtccctcaagtgactggtagcactcagaaagtcttctgagacatgggatgcttacacaagtcattaacttcagcagcaggtacacattgccaaagttgagtttagaggccacaaaagtcaatctgtgaaaaaagaaaaaagtaattttttctatttgttcctcttatgtgagtgatagcaattagattagaggtttacggcactggtcaatagtcaagagggagattagtcttgggagacaacttaagacatctttgggtctcagttttcttatcggccttttgcaaccatagtcatgttaatctatgccaaattttaactggattttaactcaatggaacagaaaatgaaatggtttggtttatttcatctgtaacaagcattcaaaaagttaaaactttcagaaacttttctccaaatcatctaatgattgcctagaatgatcccaagactcatcttaccacaataaatttaggagcatgctatggttctggatctgcccccagaggtcactcagatcaggttagattaggataaagcatatcctgaaaattgccagagaatagaatcattgaattggaaagaaccaagttcagtcttcttcccaatgcaggaaattatttttcagcaattctgagagaggctccatagcctcttcttgaacccrttcaacaatggaatctcatcatcacagaagacaacccaattttttgtcattcttgcctgcagagcaaggctctgagcagccatccactccaaaattccagaaaggagtacctagtcactgcaagaatccagaaagttccatggcatagggagtaaactacattcattcagcacttacagtatattgcactaggtgctaagaatatagaggtgaataaggcaacatgtaacctgtattggaggaatgaatagagttttatggagtccagtggagaaatcacagtctgcatatgacctgtagtgattccaataccctaaacatacacctctcatggtcctggatttgccccccaaagtcacacaagtttacatcagattaaaataataaagcatacctgaaagcaattgagccaatatgctcagtttgagtagaagaggtagggacccagcagctatgaattctagcatatacaaccacctagctgatagtcttgagtcgcccacttaacttttctaagcctcaaatttacccacaaattgaagagcttggattactttaaccaacagtacacatcacaaatcaagcaagaagagctctacaaggcttgcagtctttcttaaaacccatcttatctaccactgtcaatttaaaatccctggctaaatgattaaggagtctttgagctctaaaattctgtgattttagagttgaagagcagttctcccaacctctctatctcctgacttacagcagacttgcttagatggcacacactccttgcgatggttgttaactgtcaaataaaattcaaattcactgaaggtatttaaaaatatgtatcacaagctctagaagcaattccagagaaggtgcactaaaaagtcgtagtaaaaataataggtatcacagttagaataaacgtatgatttcccaagatgactacttttatcattcacatatatacattctgctatttaccttttttcttttttatattataaatttttttcttagataggacattctgctacttactaacacagccacatttacctaatataagttcttactctgtctttctgtgagataagagaaagtattagtctgttaagagacagccacagagtctcatttttgtccatttgtgaccccccaaaacaaagcctatccaaagagaatctaaaacaacatgagatccagagataactgtattttctgcttaggctttccacctctttcttcgcaacagttctctgatccatattgggttcctgtgctgagtaaatattggaacttggttgcatccttgctaaattccaaatgctctgtgttgtggttaggttttaacttggattcgtgttagatttctactaattcaaggtgagctaaagagccagcaggccttgtaatgccactccccacaagtatatacatttttcccctgagaatgtagaggtcttattactttttttaggaaaaaagaagttctttgtttagcacatattacttctgattatgtaatgttgtcttaagagtattttctgcttaagttattgctgttaaaaaagaaaaagagtattttcaaaccttctccattcatgtgatgtttcaataagattcagcatcactgcctaaggtatcctatcaagttagcccagttgattgaatcctggtgtaactgacatcactcctttttctctgagccaactctggccaacccagcaaactcagcctgagttacagtcagtcaccaagtgaacttctccaactaacatgaaactttgtgaatagggacaacattttatttatcttattccccccataccatctagcacagtaccaggcacaaagcagagatcaaaaagttttctgaaaagagatactgactcacagttcccttaagcttcttgcttatgaaaagcttatataaatcaagtattaatcaatagaacattattgtcctgttgacttttatcaacctttaaaatgataatgactccttatacttttgcttaatatatctttatgccataatatttcagctcagtagttaactatctagtaagtaaaactggaggcctatctagtgagatggagtaataaccccccttaaataattacctgccaatgtcttgtaaagtcatgtattcatattttctcaaacttgagaatactagtaaaaatgaccaaaatcatctgtcaaaagaatgttatcaactgaagaatatttatgtttcattcactgatcctgttaattctctgtgtgacttctcttttattttctataggtattaatgcctttaaaggccagtactttcatagccggcaatataagcatccagatatatttaaggacaagagagtccttgtgattggaatgggaaattctggcacagacattgctgtggaggccagccacctggcggaaaaggtacattcctgatgttactgggtgaagagctttatcttaagatgcatgcctcaagcaaatggtgtttgacaccatgataaatgttaaaggaataaaatgtctcacatgcaaacaacagattactaaggaatttaatttttactgaatgttcacaaatttttctatgaattgcagttgtcatcttccctccaaaaccaacttctctgacttctttttacttttttttttttttttgtcattttcccagccatccaacaagagctacaggacatgtttcttccctactcagtcccataggtcagaaaattctaccaactttttcctgctactatctcccatttgcccattcctctccttattaattaccaacaccctcatcaggtccatgctacctcacactgaggatattgcattgtcctcctaataatagttgtagaaatagttaatatttattaggattattctgtggccggcactgcactaaatgtgtttttactgcactactttatccagtcatcaaaacaagccactgaagtaggtactgttagtatccttgactgcacatgaggaaaccaaggcttagagaagttaaagaacctgcctraaatcttaccactagcatgtggcagagccagttctcaaacccaagtctctttgactcaaagcctacgttcctaactatcctcttctacctcctaccttcaggcttctcaagggttttgccctgcattttatttttgccttgtaccactacccaaggtcactgccacccacaacaagccatctagaccccaactaccaacaaacaaatcctcagaagagcctgctctcattatagcactctcatgctgaaaaacctctaattattctctttacctgaaaaaaataaattgcagacgtagtagctctgcatcagagagttttctataatctgaaccaaatctgccattttaattttaacttctgtttcttgcatgataatcaactgtagcattttccagttcctgtctttagttcccctttgctcacgctacccctctctcttcttcagagcccctttctcttctattacaatctacctttwccttcccagatatctcactccaacacgaagtgatctctccctattcagaatgtaagtaatattgtaatttgcacccctcagttttcacttttaaattcttaatattgcaaattacctttcatcatatatagtttcttttcaactatgctgtaaactcattgagggccattcagctaactaatatatactagttgctggctccccagtttggtgggggaagaaacaatctgttaaatcagctgttttgtatcagcaaagcaacagattgcttaactaattattttctttgtaaacaattgtacaggaaactccttattaagtactaaaactattagctttgtgaattcggtcaactggtaaattcaaacagccaatgttaaaaagaacaaataccaaaagtaattgtagtactgaattttgctgtcatttaagccaatggtttgcactgaaactctgtagacaactctgatactgccattccctgttcttactgcctacaatgatagtgagcacaccaagtagcaatcacctgttcattgttttcttacrtagactttaggtccctatggtttactaaaggctggcagataataagtattcaataatatgtcttaaggcattttaatactctagatgctctgaatcctaatctcaaaaggattaactttaaaatagaagttagaagaaccaagactatcttgtcaggggtgtattttgagagtggcagacttttcagtgcctttccattcatgacacttcttgaatctctggcagaaccagccagccgtgttcacagtgtcaaatgaagggatgtctttgattgcttccaggtgttcctcagcaccaccggagggggatgggtgatcagccgaatctttgactcgggctacccatgggacatggtgttcatgacacgctttcagaacatgttgagaaattccctcccaacyccaattgtgacttggttgatggagcgaaagataaacaactggctcaatcatgcaaattacggcttaataccagaagacaggtaaatataatgtgactgccamgggcttttaggaagaaggagcctctgcctgtccagcagcctatacaagccaggcagtaccacagcaacatggctgaatgtgtgggaacacttgatacaaatttgcttgataataacagctaactgttcttaagtactcagaaagtgaaattatgtatttcaccttgtcagcaacactttacgtattattataataatccttttattatggagaaactgaaacagcaaaattcagccatttacccaagctcactgagtagtaagtgaactctgtgaccttggcaagttacttgatcctcagctgtagcaaccaaaagagaatgatttgtctatgactttgttgataaaagaaacacacttgcccagtttcactgtgtgggaaaaactgaatcccatagttgcccctcaccatctctctaatggtagagccttcttcccgttgtcaagattgaccttggcccaaaaaatggctcagcttatacaagatcagctcacaaagtgtttgtcttgtgattccaaaggtatagccagaaaaagacaattctgcccttgttcctttaaatacatgcatgtttcccttataaaactttttcctaggaagagactagagctttcagaagttctcagccactctagaagtccctggtttcccttgtagcccttcagctctcagccccactctagaatgacagtgacagatgaatgctaaaaatcagcaagagaaacagaagctagagaaggtgctggcttcctcttcaggcttccaaactctagtaaatggcaagcatattttataatccttcctgaacattcatgaatccccttccactgaagtaacatctcccaagacttgcagcaattcttgtccaaccaaggagagagccccagaatgagagagggaggtaaagagaagggagagctggctgaattgttcactgacaagtctcctccctgttcatgtttttgtttaggactcagctgaaagagtttgtgctaaatgatgagctcccaggacgcatcatcactgggaaagtgttcatcaggccaagcryaaaagaggtaaaggaaaactctgtcatatttaacaatacttcaaaggaagagcctattgacatcattgtcyttgccactggatacacatttgctttccccttccttgatgagtctgtagtgaaagttgaagatggccaggcctcactgtacaagtatatcttccctgcacatctgcaaaagccaaccctggccattattggcctcatcaracccttgggctccatgatacctacaggagaaacacaagctcggtgggctgttcgagtcctgaaaggtaagtataagaaatagcagggcatgtgtttttggtktgccatgtgattctggatactggaaatgttgagactattattcctcctgcttctatttaaaataacagaatctttaaaagcaggatgcatyctattgtttgctgaattatactgtcataatgatttgttccattactgcataaatggtatatcrgggtcaaaaatatatatatttttttgatataccaaaaatataacagttgacataggctgtatctatgtcaactgtgatattttttcttttttatttttaagacacagggtctcactatctcgtccagactagtgtgcagtggctatttataggcatgatcatagattactgcagcctcaaactcctggtctcaagcaatcctcctacctcagyctcctgagtagtggagactacagacatgcacactgcacacagctacctgttattttgactaaaacaaaatgacagttaacakttctgtcagttgactgaatcaactggctcaattaaaatttttaaactcaagcaaatgagtgacaacattcagccaaactagttgtgagattctgctatatcaaataattagtgagatgaccagatgcttatcttttcagctgayggcattattaccaggagcatacaaccagtcagctcaggctgctaacatttttgccagaaggatcaatgagtagctggtactagacgtgaaaggagagccatagtaaagcatctttatccataagtcaacagctagacctaaacttaagttgcatttgaggtttttattttaatcctacaggtgtraataagttaccaccaccaagtgtcatgatagaggaaattaatgcaaggaaagaaaacaagcccagttggtaagttaactacttaatgcaccctttttaaattataactgaaattggtaaaaaaaaaaaaaaaaaaaaaaaaaaaaaaarggaaatgaaaaagaaaaaaaaacaatagcagagagatgaaagttacattggagaaaaaaagaagcatctgagacttacaagaaaaatactaggagagcctrtttaagaagagagaagggaaaggggaatttagaatttttaatgtccccaaagtcatcacttcagcccatggttttctagtatcacatagagtttggattccaaatcaagtactacataattaaccctaatctaccaggtacattattccrtatcttatccataatcaacaggcaagcagttgtacctatttactctgacactagaagtgtctgctcattcattcactgaacaagtctctatcagctctattgtttttattcggagtgtggcttttgctcttcatttataattggctggaaaaaaggaagaagaaaaacaaaattttgtagyatgtgaaaaaatcatatgaaatggaaaccatactggccataaataaaattttattagaacacagccatgkttattcatttacatattgtcaatggctgtttttgtgttacagtaccaaagttgtttagcagttgagatagaaactgtaatgtggctctcaaagcctgarcatttactgtctggcctttttcagaataaagtttattgagcacttctctatgggaaaggttttcacttatgctgtgctctgtggctaccactcaaggctagagacaatggaagactgatggccagcaaagtaaagagtcttggccctcccctctcactctcaatccaaccaaaacatttctgattgttttgtggtttgataaaaccactttgttttatctgttcatctgtttctgcgtttgatatacattttcacttgaaataaaggttctgtggcaaaaaaaaaaaaaaaacagcaagttttaaaatcattgcatctaaggaacttattatcactctcttgttcatatatattcccaaacttcaagggttgatctatccttgtcaaggtaccaaattccaaaacaataatagcattttagatgtctcttctttatcctcaacctgggatatgatttgatcttcattatggaactccagtgtaatagataactaattagaactgctataaaatgaaaatcttcttgtcacgcatgtcagcaaacaattttaggggccaggtgcagtggatcatgcctgtaatcccagcactttgggaggctaaggcaagaggatcatttgagctcaggactttgagaccagcctggatgacatagcaagcccccatccctacaaaaaaaataaaagttatttaggcatggtggctcatgcttgtagtcccacctattcctaagccaggaggatcgcttgagccaaggagttcaaggttgcagtgagctatgatcatgccactgcactccagcctaggtgacagagcaagaccttgtaaaaaaaaaaaaaagaaaaaagaaaaaaagaaaaggaaaagaaaaattaattaattaattaaagcctaataccagcatttcagggaattttaccctatagatttttgtggcttttcacattatataaatcattggatttgttattactgaataatggaattttataaagatttagaaattttaaaatatattttcctctagaaattgctaattatttcacaaaagaactaagatgcattatgagcactcagagcacccattaaaagccatatgtataaagtatcttttgaagggactcatcttgatttaagaaacagaaggagaccgttagataggtagggaaataaaggggaaaatgcagaaaccatcccaaattctgcagcagtatttgtttgctttgggcacttgtacttgttctaagattatcagtttttttgtcttcaccttttcccccaatcttccttttataaaggtttggcttgtgctactgcaaggctttacaatcagattatatcacatacatagatgaactcctgacctatatcaatgcaaaacccaacctgttctctatgctcctaacggatccacatctggctctgaccgtcttctttggcccrtgctcaccataccagttccgcttgactggcccaggaaaatgggaaggagccagaaatgccatcatgacccagtgggaccgaacattcaaggtcatcaaagctcgagttgtacaagagtctccatctccctttgaaagttttcttaaagtctttagctttctggctttgcttgtggctatttttctgattttcctataagtaaaagatctcctaaatggaagatgcacagagtagatttacaatgctccaattcctctcttacagcaatattgccttcacagttataaactgtattcaaatagtaaaggycaccctctcgcttccctggctggccccagggctaccactggtattcctgagcctctcccagctccacttctaatgctagagaatgataactaagayttctgtgcatttgaaggttgttggaaagttacaggttcattttagaaagaaagctgttcttgacagcactctgagccatcatacctctttcccatataaactattttcacagatctcaactaaaaccccttacttcacaaatgattgtgttgtgctgaaatggtgctcttatagtactggcttattaaaagtaaaaaataaacctaaaaattgattgttttaagtgatcttttgttctcttattaaagattgggaaaagggagaaaaagatgaggattctatgaataaagctcataaaaggatagggggttcaatgagttactttgagagtttcccaaaggactgtacctgcctgggactgttcattcctccagaacactctttataacaaagctgttactccagctggcctcccaaagacccaaatcagattccacagaaaaccaccacctccacgggctcttagaaccagcctccagcagccaaaggaaaaagcctacctgcttagatcctccttcacaaccctgctgtaagaggcaaatggagctgcctccttttaaagagtcaatgagaaccaaccaaattcaattggaattcattagataaagagcacagccaagaagcttttaatggagagaaagcagggagaggaaaaaagggaaagaaaaagaggaacaaaagcaaacatcgtgtcaaaagcagcagtttcaatgaaactagacccagcctatctcacagttacagctgatgaagatatgactcataatcaggaaaggctttgcttcacttcatctcgtggcttatatggaaaaccctgtgggtaaacctcacctcacagagaggtccacagtttggatgcagggacaagattcaaaaactgtggcgtcaggaaaagagtgatctctgtagggccagtacagatacagatcatttctccccaactttgtttggctctgccaactcttcagtattgttccatttcttacttttccttgtgacctgtttcactcttaccatagaaacacatgatgaagaattgcccccactgcatacaatctagattactcctagaaatgcttttctttccattgaaacaaagctgatattttaactttcctcatgaagctggctggggagaagtttagtgcccaaggtgaaacaaggaaggataaactcctcaggccacagtggcaaatcatgacacaagcggccacctgaacctgatcatatctactgcactgggagactgaatatacatatggtcaatgaccagaccatttacagcaatagatttataacctacaacccctgcagcaatcagctcagaacagtcaggacttgtttaatgagtgccagcttctctacttgttgcccctgcttctaactcaggagtgacgaaagaaagccaaataagcttctcaaaccagtcccatctgatgtcttgcttctagttaacctacctccaccttccctatgccaacaaccatcagtgagagtacctgaagccttccctttctttcactataaacacacacaaacacacacacacacacacaaaacctcccctgctgcctttgaatctgtgccaaacattagtggtggtgccagcaaaaaaaaacatatattatgtaaagactacagcagtaattataatgctgcacattttatactattttaaaattaataaaatgccaactgttatctcacttaatccacacaataatgatgtgattgggaagacgactgtactacatacacaatttgacaagtaagaaaactcagataaggagatgtcaattgatttgtcccaggtaacaggtaaaatgtggctgagtcagaacatgagaatccagaacatacatcacaggctttttaccatttaagcccactgtctccaatgttcaaatgactccagaagccttaatagtgatattgcaaaagccatattacaagaatgttactccatgaaagtatctgtaggtctctctccctttcccactctccctatgagtgtgtgtggacctgtctgcctgtcaattgtcaatcgttcatgctgtgcctagaatttcatatctttccctttatatatatctttaatttctgaatccatgggtttgaatctccacatgcatctttttccctgtgcattccttttttttcctgactatggctgtgctaggcctcctctatgactatattatagaacagactcaaaagtctacaagtctctaagactgtgttatagaacagactcatttctagtctagaaattattccatgcacactcctgaaaaaagtatcatttttttctgttcagaaaaaaaaattgagtgaattctcataaatctagcaaaataggaaatacgtaaaacattttgacattacattacttactctgtttcttgcacactatttaaaccagaagagcttctgaggcatttcctgtttcttgcacactatttaaatcagaagagcttctgaggcatttcatcaccaagagtaattttatgttttctgaaaatatttttaatgtctattaatagtaccccctgctagaccagtcttaagtaaagttacctatcttctcatgtaccaatgctctgggtctttcaacatgtcccatcgtgtggagatgcttggagaaccagcaagggccctgccacttactagctgtgtgaccttgagcaagtcacttacttttcctaagctacagttttcccttctataacatagaagttatcttctgagaatttattttgcctcataaggatgttatgaggattaaatggcatgatccacataaagtacttcgcataaatactgtacaaggtatgtgttcaataaatgatagctattattactatgttacccaagcaagatgtatgttttatcgcctgatttattttttctaggccatagacctagctcctcatagggcattgacaccacagtatgtcacaggcctctcaaatgcagtatgctcaaaattaaactcatttcccaacagtccttattttccccaacagtccttacttaactgctaatgtcatcatccttatcctctgtagggaaatgaacaatttccgtgaataattacacatcgactaaggacattaatgaggttatttgatttttattctatggtaactattttataactcagtaaattatagataactaatagcagtgcaaaataattcttgtctatagacacgtagataatgtccagcagaagtctaaytggcgtcccttccccactgtgcgaaaaactagttttgcctccatttgcacattcatttcaacattcctgatttatacatgcgtattttatctttaaattttcttttgaactgattgtaacatcttaccaatttcctttttaataacaagtgaaataaaatctctaatacgtgtctatcttacatttgtatgaatcacaattctaccttctttgaaaattatcttttaactcttccaaggaatagcaacaccatttaccaatagttatgtttccactgaaacacatcacctttgacactctaaccctcatacctcatatccaacagcctatgagccttatcaagtgtgtctctaacacagagcaaagaccactgtggtactgagtgcaaacacatgggctgtagagtcagatggcccgggttgaatcctactttgctgcacaaccttgggctagttatttaatgtcttctaacttcagttcctttatctataaaatatggaagtaacacttcagcattgctgtaacggagaattaatgaagataatccatgtaaagcattaggccagtgcctggcatgtggtcagtgcttacctaaaggtaactattaatatctcacagactcatctgtctcttaccctcccttcttcctcactggctagtttagactcatttaatttcttccctaggttagtgctacctggcttccctggtccccttaccaccatttagtccctctacccctgtctccctgcttccccaagaataatttgtgggtgatgccattctcagaagcagtcatagtaagaggagataaaaatgaagagcttcttatgttctcctaccctcagtgtcgctgtctcaatcactgcttcccaatttaggaagtttcacatgggggctgtaaacaactgagaaaaacaacatcttttagagttgtcctgtccctcatgagatagaatacattattattttaaaatattctaacttgagagcactttgattaaaaatgaaagaagactgcatttaattctttctctgaaagacaaaaactttgttagacattttaaagtggacctaaatattttaagccaaaaggaaaaatatgagatcagcctctattattgagcaaattttcctacagagtaaaacttatactacttaactatgcattttttttaatttcagacattcatttttgtggacgtataagcagcctttataaagagtatgcttcttattagagttatagccagattagtaaacagagaaggagcgagtgcaatatgaggttagaaataggagctaatcttaaatgccggcagcaaaggagaatccatgttagcaaaatgctcctctgcaaaagccatactataatatcaagacataaaaggactcaaagggacatattccaggccattaggggaggaaagtggtcattgtggaatcaaaatgatattaaatgcatttgggggcaatttggcaatatcgtgcataattttaaatgcatgtatcctttgacacaattacgtatctcagagtctattccatagaaattgtcatgtgtacaaagatatttatacaaagatgttcattgtcatattgtttgtaaaaacaaagaagtgttgtcagtggaggaaaatgatgaaacaagtctcatttcaaggttgtgaaatttatttagttactaaagggtgttaaatcagacaaggtaagtgctctgttctttataagactgctgttgccagcatatctaggacaataattataatggttattgtacaataaacataggcattccttggtatacaggcctggttctgtgtcttgggtttaagccgtccacaacagctgtcgtctgcttctaatcctgcattaaaggttgatgtttaatgaactggaggcaaaggtctttggtgggagttacagtctactcaggacattgtgcctttttaagatgagagatgtgaatccatgagtctataccctctaattttgtggcacatggattagtcaataatacctggtatagtaccccttccactggggttgaaggaagtcctttattagatgtccttcccagtagacaaaatctcttagttgcagatcatggccaggcaccttatcttcagggtgcatactgtgaaaggaattatttaccaaatcttaatttttttttttttttgagacagagtctcactctgtcacccaggctggagtgcagtggcgtgatctcagctcactgcaacctccacctcccaggttcaagggattcttctgcctcaccctcccaagtagctggaactagaggtgcatgccactacacccagctaatttttgtatttttagtagggacagttttcagcatattggccaggctggtctcgaactcctgacctcatgatccacctgcctcggcctcccaaagtgctgggattacaggcatgagccactgtgcctggcccaaatcttgattttttttacggtaataaatgagtccctcacaatattgcaatatatctcccttaagaagagttggattggttatgttcattcccatacacatgggccttcctgttataatttcataaggggaaagttgatgttttccaaaaggggtggatcagaccgtaagcagctttggaccaggggaggtgaaatgcctctgtgaacttagccaattgtgttttaattattccattggtcctttccaccaggcctgaggactgggggtggtaggcacaatggaaatgttgaaatatgggccaaatttcacaaacatcttgaataacctggccggtaaagtgagctcccctgtcactgtgaagttcacaggggactccccacagtgggataattttttgtagaagaattttccaactgccatggctgttgcttgcctgcagggaaaagcttcaacccaacgggaaaacatgcagaccattacaaaaacatacttaacaaccttgagatgatggcagccaga

SEQ ID NO: 95773 - DNA, 40311 bp, Homo sapiens
cagacagctgtcctcaaggtctgttaccatccgaggaatcctgagacagcctgtaatcaggtatttgtccctcctcctcagctgtaattgggagactttgctctttttatatgcctttattgttatgcctgaaagtcccacaccttattaatgagggacatattggccaaagctggagctattatctatatgaatatgggaacaagttacccatttgttgtccccttctggaggaggaaatcaactctgaagtctgggcattggaaggacaattcagaagggcaaaaaaatgcccacccagtccaaatcaggctaaaggaccccactacttttccttatgaaacgcaatatcccataaggcctgaagctcataaaggattacaggatattgttagacatttaaaagctcaagtcttagtaagaaaatgcaacagtccccacaacatcccaattctaggagtacaaaaaccgaatagtcagtggagactagtgcaagatcttagacttatcaatgaggcagtaatttctctatatccaacccctataccctcctctctcaaataccagaggaagcagaatggttcacagttctggaccttaaggataccttcttctacatacccctgcactctgactcccagtttctctttccctttgaggatcccacacaccacacatcccaacttacatggatggtcttgccccaagggtttagagatagccctcatctgtttggtcaggcacgggcccaagatctaggccacttctcaagtccaggcactctggtccttcaatatgtggatgatttacttttggctaccagttcagaagcctcatgccagcaggctactctggatctcttgaattttctagctaatccaaggtacaaggcccagctctgcctacaacaactcagatatctaggcctaatcttagccagaagaaccagggccctcagcaaggaatgaatacagcctatactggcttatccttgccctaagacatgaaaatcattgtgggagttccttggaatcaccggcttttgctgactatggatcctcagatacagcgagaaggccagaccactctatactctaatcaaggaaacccagagggcaaatactcatctagtagaatgggaaccagaggcagaaacagccttcaaaaccttaaagcaggccctagcacaagctccagccttaagccttccacaggacaaaacttctctttatgcgtcagagaaagagctggaatagctcttggagtccttactcagactcatgggacaaccccacatcagtggcatatctaagtaaggaaactgatgtagtagcaaaaggctggcctcactgtttatgggtagttgtggcagtggccatcttagtattagaggctatcaaaataatacaaggaaaggatttcactgtctggacttctcatgatgtaaatggcatactaggtgccaaaggaaattcatggctatcagacaaacgcctgcttagataccaggcactactccttgagggaccagtgcttcaaatacacacgtgtgtggccctcaaccctgctatttttctcccagaggatggagagccaatcaagcatgactaccaacaaattgtagcccagacttatgtcacctgagaggatctcttagaagtccccttagctaatcctgaccttaacctatataccaatggaagttcatttgtggagaatgggatacgaagggcaggttatgccatagttaatgatgtaacagtacttgaaagtaagcatcttcctccagggaccagcactgttagcagaactagtggcacttacccaagccttagaactgggaaagggaaaaagaataaatgtgtatacaaatagcaaatatgcttatctaatcctacatgcccatgctgcaatgtgggaagaaagggagttcataacctctgggtgaacccccattaaataccacaaggaaatcattaagttattgcatgtggtgcaaaaacctaaggagatggcagtcttacactgccaaagccatcaaaaaggtgaaggagaaaaggcagaaggaaactgtcgggcagatgctgaggccaaaattgctgccaggtggaacctaccattagaaatacctgtagaagggccactggtatggaacaaccctctccaagagattaagccccagtatttcccaacttaaacagaatggggactttcacgggggcatagttttctcccctcagggtggttcactacggaagagggaaaggtactcatacctgaagccagacagtggaaaatacttaagaccctccaccaaacttttcatatgggtattgagaacactcatcaaatggctaaatctctatttacgggtccaaatctcctctggaccatccaacaagtagtcaaagcctgtgaggtgtgccaaaggaataatcccttggtccatcataaggcccctctgggggaacaaagaatagggcacaatcccagagaggactggcagttagacttcacccatatgcctaagtctaagggatttcaacacttgttggtctgtgttgaaacctttacaaattggatagaagccttcccctgcaagacagagaaggctcaggaagtggttaaagtcctaatgcatgaaataattcctagatttgggcttccccaaagcttacaaagtgacaatggtctggcttttaaagccacggtaacagggaatttccagggtgctagggatatcatattacctccactgcgcctggaggccacaatccttagggaaggttgagaaggcaaatccctataaccatgaataccatcttaactttccaagcccctctatgcatccaacacaacccgttatcaggcctgcccctgggggacctattatcccatcagtgtaattacatcctacaacttcaagcccgaactgattatagtaacttccgagtcacccaaacagctccactcagatggcttgtccacttctcagagcctccaaaaatcatcacctcctccctgcttaacaaacagtctgggttttttaatagcaaacatactccctgcatgaccattcacccctggaccccctgcagcagtgcccccaccactagtgaatgcctcctcatcccctctttcaattaatctattgaatggttcctagtagatacaaaacggctttttcccccaatgggaagatagagcacagggagccactcagtttgctcccaacacccctttccagccactcaccggagccaccttggcamgtactctaggagtatgggaaaatgaaaacaacaaactcacacacctttttaacgtacacaaccagttctgtctacccagccaagacgtattcttcttacatggaatgtcaacctatatctgcctccccaccaactggacaggcacctgcaccttagtcttcctaagtcccaatataaacattgcccagaccctatcagtgctcctcaaagcacaagtccatcagcacagggccatacaactaatacccctacttatagggttaggaatggccactgctacaggaaccggaatagcagatttatccacttcattatcctactaccacacactctcaaagcatttctcaggcagtttgcaagaaagaacaaaatctatccttactctacaatcccaaatagactctttggcagcagtgactctctaaaaccactgaggcctaacctcctcactgctgagaaaggaggactttgcaccttcttaggggacgagtgttgcttttacactaaccagtcagggttaatatgagacgccacccggcatttacaggaaaagtcttctgaaatcagacaatgcctttcaaattcttataccattctctggagttgggcaacatggcttctcccctttctaggtctcatgacaaccatcttgctattacttgccttcgggccctgtatttttaagctctttgtcaatttgtttcctccaggatcgaggccatcaagctacagatggttttgcaaattaaaccccaaatgagctcaactaacaacttctaccaaggaccccctggatcgacccactggccctttgatacctagagagtttccctctggaggatactacaattcagggtctcttcttcacccctatccagcaggaagtagctagagcagtcattgcgcaattctcaaaagcagttggggtgtcctgtttaaagggggtattgagaggtgaagccagctggacttcctgggtcgagtagagacttggagaacttttctgtcttacaagaggattgtaaaatgcaccaatcagtgctctgtagctagcaagaagtttgtaaaatgcaccaatcagttctctgtaaaatggaccaatcagtgctctgtaaaatggaccaatcagcgctctgtaaaatggatcaatcagcaggattctaaaagtaaccaatcgtggggagaattgagaaaagggcattctgataagacagaaacaggacatgggaggggacaaataagagaaagctggccaccccagccagcggcagcaactggctcgggtccccttccactctgtggaagctttgttctttcgctcttcacaataaatcttgctgctgctcactctttgggtctgtgccatcttttaagaactgtaacactcaccacaaaggtccgcagctccattcttgaagtcagggagaccaggaacccaccggaaggaactaactctggacacaatatttttttttctttttttaaatttttttctttatttcttctaaaaaaaagtgggatgcatgtgcagaacgtgcaggtttgttgcataggtacacgtgtgccatggtgatttgctgcacctattgacctgttctcctctaagttccctctcctcaccccctaccctacaacaggccctacaacattcccctctctgtgtccatgtgttctcattgttcaactcccacttatgagtgagaacatgcagtgtttggttttctgttcctgtgttagtttgctgaggatgatggcttccagcttcatccatgtccctgcaaaggacatgatcttatttctttttatggctgcataatattccatgatatttttcaaaagaaaatatttgctgccaacagaagattttatattaaaatctgtatttgcagcttttactgaaaagaacctaaggccttgccatattgggctcattttctcaaatagcaacatttagctgaactgaatagacagagaaagtactttccagtcagatcatatctggcccactttcctcgtgtatgttaccctcctcactcctgtaggcatttgcatgtgtagtcacaagcaaatgtggtttagaaattgttcagtgaaccatgttggaaaatgtccctaaacacaagtcctaaagatggtctgttatattatcttacaagcacacagtggaaggaaaaacagttaagttttctatttctgccacagcttctataattattacctttcttgtgccctaggttaatatctaaaaatagctttatgctttctcaaacacatttcaccagctccctctgctgatccaatctgaaggacaaaacagcttaaattccttgtaagtcctgaactttaaaatcacatttctggggttggagaactccaagcatgaaagaacttgatgaggtaatggtcatctaaataactttctcctttggacagctcctatggtaatccaagcaagagtcagggtgtagaagtttgtttccaaaagtagaactcctgtttcgctgagaaagctgtaatttggggtgatttggcgccctctacagactataatggcaaaagcgacgctatcatgtgcttcccatagctttagggctttgccagaactatgacgttgaggagggtggggtaaaggggcaggaagcgtttatgttctgccaatccaacagctgtattctaactcaccattccgccctcccttaagatcacggaagtatcacgcttgcctcttacacaactttttttccttagtctgtatactttctgctgtcactagcataacagaaaagacgaatggcttttgttttaaactgagggcacttttacaaaagtcatctttccatttatttttctttcagaaaaaagaatttgggttttgagcttttttaaaaaaaaaagacaaacactttccttgactttgagaaataatttaagtcaaagaatctgctctatgctaaccaaggtaagtgtcctggattttttttttaatggggaaatgatccagaaactgctttcacaaaagatgaatgtttttcttggagtgtgttccttaagaatgaatgtgattatcttcttttggggtctcttgactagggctaaagcaagagaattaaggagagagtcaggaagcaaagggaagttgtaaggaaacaaagttatgttgtggacagaaccatccaaaaggaaagtgtcagtgagataaacagaatcatgagactttcagtgactccagtgacctctgatttcatcttatgaatgagatggaaatgccagccattgggaaacaaataccccatagatggcgtgggaaaaaaatactgtaacaaagcaagagcatggtaggatgatgataagaaacataaaatgatcaaatttcaaattcaaagaaatcataattgattacatgatttgcaaatcacccaagtctctccatgtctcataaaggattcctacatttgctggtcagtcaggtatagggtggggttttcccgttgtacaaaggtctagttcaataggtcaggtctcctttctgccaagggactaaatataagcaacctatggctggcacggtggctcacgcctgtaatcccagcactttggaaagccgaggagggcagaccacttgagatcaggagtttgagaccagcctgaccaacatggtgaaaccccgtctctactaaaaatacaaaaattatccaggcgtggtgccgcctgcctgtagtctcagctactcaggaggctgaggcaggagaatcacttgaacccaggaggtggaggttgcagtgagccgaaattgtgccactgcattccagcctggaagacagagtgagactccaactcaaataaataaataaataaatataagcacctttgagcaaccaagtaccttatgaagtccactttatagtttgcagagtttgcacacacgttctcccaatccttcaagcctgcagtattctcgcctacctttgaattcatatctttttttttttgtgcaccaattacttggttttcagacataagaacagtcctttcaagcttgaaggaaacaaagagaaagccacttgaaccctctgttttacaaatgtggaagcactggctcagagaaattgagaattgtgtccagggttacaagctgcttagaggcagaagcagaactagaactcagatctctcaatttccagttcactcactaccttcctctactgactcaaggcaaaatttaaaaaggttgctcccattcagaaatttatagtctgtaaatacggattaattttaaaaggtgctaattcccaatttgtttctactgcctgtagagtctctaagtcagtccttaaagtgcttttgcccagcacgtttttaaccccacaggccactctgtgtcactaactaggtctctagacagggataataaacaggccaggagagtgcaagcattcatgcctagagcatgctgctaccataggacttagcacaaggtagtatcagcctctccatatacaacatcttaagagcagtcacggtcttttttaaattctaagactttactactatttcttagttgcagggtcttcattatcttcagggccccatacttagcttaggacctgcacttagaggtacccagggcatatttgttgaatgaattaatttgcttccagtctattcacgtcagtatatttttcactttggcaattcagttagcagtcatttctttttaccttatgattgcagagatagagcacagcaaagatctgccagccccaggcctctacctagtggcctggaaattcaagtattcttattggtggaggccatttgtttctgattagaagctgtctaaacctcctactcctcaactcaaaggaaaacacaggtatgtctgcctactcctttccaaacttgttgatacattttatctgtatgaactgtcttttccaaggagaagagaaggaagacaggagacaagtagggaggtagagaatgaacactgagtaaatattttgtgcaaggcacttttttgtgtaagtaatatcaagttttttaaaatgcaaacaatccttcaacatagatatttttattattttacaaataatatatctaaggttgcttcagtcggttgctcagggtcatatggctagttggtagcagagaaagttcaaacccaactctgctgcctccaaaatccattttcattgcattccatatagctctctcaactaaatagggactcccaaataaaaagtctaagaggaaaaatgatgcattttttaatacataatgaagccaggtatggcaatctcagccttacaaaggcaaggcagcaaatacattcagaaattggcagccctaggaaatccttctgatcctcattgcaagttcatgaatctgccttagggtcaggtaagtctaagggttcctggaggactcaggagtctttctttactccctccagtcagtaaattctcttagattttgtgcctggggcttctgatctgattaagagacaagctacagagccatagagaaaaactccaagcccatcccaaaggtgcagcagcaaacctgagcaaagatgaaggaagaggcttagtgacgggaaccacaggatacctcaggctctcagaccaacagcatgttcacatcttggtttcagatcctgaaatccatactcagtgcaaactctgcctcttaatagcagtgtagtcttaagttgtttcaaatgattatgctgatttcccatttactggtcctaatagctcaaaaaatatatgctctcttgtttccccaaggcaaataccactgtgataagtgacatgagactacaaaaatcacacaggggttatacagcttgatctttcctcaaaaaatgctgtatcttcaaaggcaaagtgaaatgagttatatatatttcataaaacaatggaatactttgaggtctcaactatcatttgtgtgtcttctgaattggccaagtgggttgcagggaaatgcagggaaaagcagcacttgcaactaagtctacatgacatattaagggcctcagtgtgacataaacttgatttactagaattaactcagcccatttgattgaggcaaaagcaatgtgatatgtgcagaaatgataaaatccagaaaaactggtaaaaactggtcctatatctccatgtgtgtgtatgtgtatacttcctccagttcccgctgacaagcatgagcatccccatttctagctgacatcatcgtgggctctagaatatcccttatgacgttccttggggactttattttctattatggtcagtcttgcctctgcaagctaagaacctcccctcaacccatgtaatatccttgttttatggcaaggcatgaccgtgaccagctattctttaggactctaaatgctttgaatcaaaaccaacatttctactgactgaaattcctaggattcagaggcaaagtgatagcaaagagcccctttaatactgacaaattctagcatcccaacggggtcaaggtactgtctacactctctaatagtaataccacagattgagtactccttatccaaaatacttgggaccaggccgggcacggtggcttacgtctgtaatcccagcactttgggaggctgaggccagcagatcacttgaggtcaggagttygagaccagcctggccaacatggtgaaaccccatgtctactaaaaaatacaaaaattagctgggcgtggtgacaggcacctgtaatcccagctacttgggaggctgaggcataagaatcacttgaacctaggaagtggaggttgcagtgagctgagattgtgccactgcactccagcctgggtgacagagcaagactgtctcaaaataataataataataataataataatagttgggatgagaaatgtttcactaggatgaacatggtggctcactcctgtaatactagcactttgggaggccaaggcaggaggatcacctgagcccaggagttcaagaacagcctgggcaatatggtgagaccccatttctatttaaaaaaattaaaataaataaaaaataaatgtttcacatttcaagtcttttcagattttggaatattttcattttacttcctggttgaacatcccaaatctaaaatctgaaatactctagtgagcatttcttttgaatttcatgtcagtattcaaaaagttttggattttggagtatttcaaattttggatttgggggtttgggctgctcaaccggtaatagctaaatttagttgagcacttactatgtagcaggcacacttctaaaaccattccaacatttatcagtcatttaatcttcataacaaccctttaaagtcattattattattactattaaaacggaagagttccctgagcccccgcagaacttgctacaggggtgtggcttgtttgcatgttcaaaccccttatgggaaggggagcatgcagacaggcaggtgcaggagccagggctagtgcttttgggctctggccccacagtaggatctagaggtgtcataaaattaatgctcttttagcagttgctatttacagacagctaagtattactagttcagtggagattcaggtgacagtcttttacaccctgcccttttggtacccaggtccttgtccaaagtccaggaagaatcaggtcacatggacttgaaggatggtgaatgcgggtattttattgagtggtggaggtggatctcagtgggcttgctggggagctggaaaggggatggagtgggaagatgatcttcccctggagtttggccatcctgggccgatctttccaaccatccccagctgaactcctcttgatattcaaacactccttctcttctctccttctctgccacactgctctgctctgccactggagcttggggtttatatgggcatgggatagggcatggtgggccagagtggtcttggaaaaggcaacattggggtgcaaaaacaggaatgcctgttctcatttagggctgtaggtttccaggcttgagggtggggcgtttgccagggaactgctctctcctactcagtatttccttgcctcctgttagtatcactattattaccattcacattttacaggtgagaaaactgagtcctagacaggatagttagcccaagatcacacagttaataagtagtgaagccaagacttaaaccaaaacaatctgatttcagagcctggatttttaagcagcatgtgattctgcccccactcaaagatgaaaaaaaggcatatatagcactacaaaaattgagtcttttgacaagggctcccttccaaacttattaaataaagaagttctgcttgactttcctctaacagagcataccatggccaagaaagttgcagtgattggagctggtgtgagtggcctctcctccatcaaatgcygtgtggatgaggacctggagcccacctgctttgagagaagtgatgacattgggggattatggaagtttactgtacgtggttcatctctatcagtcatgatctggccatttgctttgtctctgctcagacatggtggctttagcctgccttggtgatcaagtaagggagtggcttactgcaacggcacaaacaagtgcataatgcagtgttaaacattaggcaggatgcagtctgattggtgaggaatcttgagaatgcrcagactcgggtcagggacagttggaagagagaggaaaaaagagttaactctgataaataagcatagtattggacatttatgatgatttctggaccatggacattctaagacaaagcagcagagtgtaacatcaggcaaactgaatagcattggtgaacataaaacagattacactctagggagaatggaagttggcaacagggagtggaaccacaacccccagacattgttcaggtctttaggaacagaactggcaagagtgaggcatggccccagatcttggaaggccttgtgggagggggagggttccctgtcacattttcagaatacaaagaactcaggcactaaccaatcattctttgaagtggaatatttagcctcggaggctacactcaggtccaggccacctgttaggtgacttgagcatcagacagtggggatggaagtggttaaataccacctgcctctggtcaggattggtgctggttactggaagtagcagggtatccagtagggackgagggatctgccccagtagtgaagtataaggaggtatcagaaggtttatgcctgtaatcccagcactttgggaggctgaggtgggaggatcacttgaggccaggagctcaagaccagcatgggcggcatagtgagaccctatctctacaaaaaataaaatgaaaaacaaacaaaaaaaataagatggaagctaggcaggcccaagtactaaatgctataggggaaaagaagagtggcattcgttcaacaggcgtgagagagaagccttcatagaagacatgttgtttgctattaatagatctctgatggatgatgaataaaacagaataagcaactacatataagcaggagtaaccataaccctaggattatagtatactaggagaaaaaaaaaatggtatattgttaacctcatcaagccaccaaatgttaatgtggaaggaaaatattgggtctggtttatgtagcttctgctatttgaccccacagttggtttggtttacttcttctattctaaagtaatacagattaagtttagaaaacaatcttgaggtaaacaaatagggaaaaaaaagaaaaatataaattaagtaagtaacaatactcacaaattagtactattaacatttcaatgtaatttctctcagtcatatatatacagttgtctcttggtgtccgtgggggtttaggtatccctttggttttgctgtggataccaaaattcacaaatgctcaagttcctaatagaaaatggcataatatttgcatgtagcctacacacatcctcctgaatattttaaatgttctctagattacttataatgcctaatacaatataaatgctatataaatagctgttacactgtaatgtttagggaataatcacgaggaaagaaatatgtacacgttcaatacatatggaagcatcctttatttttcccaaatattttccatccttggttgattgaatccatggatctagaacctacagatacagagggccagctgtactattttttttttcaaaaatgttatcataatattaattttcactcattcaacaagtacttatcatgtccttctgccaggacacaatgataaacaaggtagacaggggctctgccctccttgtagtccggtgggaaacagaaacagtaaatagggaattataacacagtgtcatcaagttcgtggtagaagtacaggatgcagcagggccgcatcagctaccttatgcagcgctgttgggtcatggatgacttcttagagaaagtgacagctaagaaagaggcttaagggagaaacagagattagcttcagccacaagaagttcattggtgtctttaatatagacctatttgttttgttgttttgtttttgagtgatggagattgaatcaagataagttgaggacttcatgaaaaaacagaggctgcagtaaatgattcttctatgaagattgagataggatggagagagacagggctgaaggggacataggttgagaggatgttttgttttgtttttaaaattagagtattttgtgctgatgagaaggagccaataaaggaaggtagattgggaatatacggagacaataatgagaaaaattagtaaggtattccctgaggaaaggcaaaaaggaacatgtccagggcatgagtggagggagtagccatgccaatgaaagaaggaaaagataaacaagacagataataagccctgcattcatggaattgtttaaggacaatgttagtcttggagagccctatttaatttggttagcttctttgtggtttgaaaaatatattgattttaattatacaatcccaccaatgatttctgataattatagcttagagacctaatgctgggtttcctggaactctttaaaattacaaatagtggctgggtgcagtggctcatgcctgtaatccaggcactttaagaggccaaggcgggtggatcacttgacgccaggagttagacaccagcctggccaacatggtgaaatcccatctctactaaaaataaaaaaattagccaggcatggtggcacacacatgtaatccaaactatttgggaggctgaggcatgagaatcgcttgaacccgggaggcagagtttgcagtgagtcaaaatcgcaccactgcactctagcctgggtgatagagtgagactccatctaaatcaatcaatcaataaaagtaaatraaattacaaatggaacattaattgctataacccgccctcagtgaggctagcatgagccaccatgatctctgttctcttcctcctatctccattatcccaacaagctaactatgccttcaccacaggaatcttccaaagatgggatgaccagggtctataagtcattagtgacaaatgtctgtaaggaaatgtcatgttacagtgacttccctttccacgaagattatcctaatttcatgaaccatgaaaaattttgggactatctccaagaatttgctgagcactttgacctcctgaaatacattcagtttaaggtaagatactttgggttatggaagatgaatagatgggggctggcctattcagcaatctaatgaaaattggatgtttaaagtaaactttttattgattttatctccaaataaataggaagataataaggactcctcacttccgctgctgctcaagttttactcgaataaatcgttaaaatactgaattggggacgggtgcagtggctcacacctgtaatcgcaatactttggaaggccgaggcaggcagatcacttgaggtcaggagtttgagaccagtatggccaacatggtgaaattccacctttactaaaaatacaaaaattagctgggtgtggtggtgcacacctgtgattccagcttctcaggaggctgaagcatgagaattgcttgaacctgggaggcagaggttgcagtgagccaagatcatgccactgcactctagcctgggccacagagtgagactccatctcaaaaataaaataaaatgctgaatttgctgattcctcctctaaatgccaaactctcattcaggatgaaattttgactttttttaagagagaaaaaaagaattttgtccatgaagcccattggggaaaaaaaatctagatgtctgaaccacagaaattacaatraggcaaaactaattttcctaaatttcccaaaacattgggcattgtaactcatctctttctyaccaggaataaaacgtgattgtttcttccttccactgaaagattcaaatgtcttgagttaaagtctatattgccacctttgtgagtttgcataagttacttaacttctctaggaagatgataaatcaatattaatagacctcctgtcatgggacttggcctactaaaagtaacagacatggttaccacaccagtcattgcatgaggtccaagggtgttagtgagaagtgagtgtttgtctttcacttttagaccactgtgtgcagcataacgaagcgtccagacttctccgaaactggtcagtgggatgttgtcacagagacagagggcaagcaaaatagagctgtctttgatgctgttatggtttgcactggacatttcctgaatccccatttacctttggaagcctttcctggtgagtcatttctacctgagaccaygcctaygcttctgggttcttctagaagtaaacttattgatttgcagttggaaataccgccccatgattatagatggctttatattcattctcaaaaataatatgtgcaaaattactttaaaagttgtataacgcactatgtaggtgtcaggtcttatttatttattaatataaatattattgttattgcttaagctttctaatgtgtgtctaattcaaattcagtgatcacataaggttcaaaacaatcagatctgtcatgaaaaagaacaggctttgattttagggattaaattacaggtaatttgaatcaggactggcctgtaatagaacttacaggaagtgagagtatatgatttttttttaaagaaacaaaccagaaattaaacatgtaaagcaatatattcaaccttctctagagttggaggttcttggacaaataaaactttaaaagggaaaaaaaagcaatatagtcacccttcaaaacagtcaacataataatcatacaattctttggctgggcatagcggttcatacctgtaatcccagtactttgggaggccgagggaggccagaagtaggagaccagcctgggcatcatgctgaaaccctgtctttactaaaaatacaaaaattatctgggcatgatggctcatgcctgtaatcccagctactcagcaggctgaggcacaagaattgcttgaacctgggggagtggcggttgcagtgagcaaagatcacgtcactgaacttcagccggggccacagagtgagactctgtctcaaaaataaatgaacaaataaataaataatcatacaactcttaaaccagggctatccatagaaaggagttttagaaacttccatttggaaatgcttttcactgtgacaacatattctttttaatatactcatgactgacaaattgccatcattttgaggtcaaaactgattatttgagaagccaaaagctattcaaattcagttgagggaaataaaattaatcaattgaggattactaaaatgtaataaagctactcttttgttacatattagtggccctaaaggcaattgaataggtgagtttttgaagtatcttcaaggaattaaaagaacttttaaggaaggaaaaccttgaagaataaaacatgcaaacgttggcaaaatgaaggaaaatacwtcttataaatgtaatcacaaattgacaaaatatcctactcaaaaaggaatgaagtgaaaattcaatacataattttgcaaggaaacaatattataaatggtggttggcttcaggcttgctgttgatctgggggctaaacacacaactgtacagtactaaaggaatataaaaacacctcttatgacattttctataggaaaatgtgctgtaagtgccaaactattgacatggatgctttyggaatttattctcttcaagtttgggattgtttaccctttattccacactaaattcagttccacatagactatccttttttttttttttttttttttttttttttttttttttttttttttttgagacagggtctcactctgttgcctgagctggagtgcagtggtgccatctaggctcactgcagcctcaacctcctgggctgaagcaatcttcctgcctcagcctccagaatagttgggactacaggtgtgtgtcaccacacctggctcatttttgtattttttgcagagacggtgacttgccatgttgcccagtctggtttcaaactcctgggctcaagggatccacctgctttggccttccaaatactgagattacagaactatgactttttaagattcygtttctgcttttaactaaccaccacaatatctttcacgaatagctgtaggacccctgttgaaatgaatgttttacttgggaacatgaactcttctctgcatagaaagtaccaggattatttctacactattgaaaaaaatccatagaaatcacaagctttgtctataacatgtcgccacaactgtttgaaagttgacattgcaacacatgcataccctttttaaaaatctatattgtcaacctaatggaagaagctgaggcataaaatgtgatttcaaagaatttacttgagtcaaaatacaattttaaagagttaccttgaggatagctgcttgggaaacatttccaagttgctttgggaagtgctctgttcagcctttgttacaagcaggtttctgaagggaacagggaacaaggagtgcacagatacaaagttgtttgacaggaactctcattaatttatagaaatagcattgattagtcattggctgtacattgtttaactataggctatgagttatgacatccagcatatagcattgtcagggtaatttatggctacttaatgtcagtaagtctagagcccaaatagcaagtgtcttcaagaggcaattatttaacttatcatggagagtgacatgtgactgctgttagatttcaatgcctctctgggcgtgataacttaaaggggacttgcattcctcagataaagtttcttttctttccaatataaattgacttctgctgttttcctgaattagtagttttaatttatcaaatatatttcttttttactttttggcactgcattgacataatcattgactcagaactatctacacattctctattttttcttcttcaatatgtaattacggagaatctgtcatttgcaagtcattgtgtgaggcaatatgaaagatataaaatccatgagcaaagttgagccctccagtaaattccctccaggaaaacctcataagtggctgaaagtcccactctctaatgcgtttgatgcatattctgttcccacttcttggaaacttcttcgtgctccccttttccaatttctaatcatcctttaacaaattcttaatttaagaaaatccccttcaaatgccttcactggctcagtccaggctggacgtcccattggacccatcttaatgccttctcttctgggagggagtatagtatcatgcctgacagctgagctccagagtcagacatcttgagttcccatacaggctctgctacttactgtatggttctgggcaagttgcttaacctccctgttttgtttgtttggttggttggtttttgtttttttgcactgcaatctcagcagtgcaaaacaaaaacaaacagggaggttaagccatttgcccagggattttttttttgtctcaatctcagctttgacaaaattgaataatactatggtccactctatgggggtgctgtgaggtttaaattcgttaatacagacaaggtgtggtggctcatgcctataatcccagcactttgggaggccgaggcaggcagatcttttaaactcaagagttcgagaacagcctgggcaatatggtgaaaccctgtctctactaaaaatacaaaaaattagccaggcatggtggcatgtacatgtagtcccagctactcgggcggctgaggcgggaggatcacttgagcctgggaggcagttacagtgagctctgatggtgccactgcactccagcctgggtaacagagctaaattctttctcagtaaataagtaaatttgttaatatgtataaagttcttagaagcctgggactagcatagcaagggctaaataattgttagctattttctgtttacttacttacatccccattagaggacaaagtctttatttatttatttattttgagacagagttttgctcttgttccccaggctggagttcgatggcatgatctcagcttgctgcgacctccacctcccaggttcaagcaattctcctgtctcagcctcctgagtagctgggattacaggtgcccaccaccacacccagataatttttttgtatttttaatagagatgaggtttcgccatgttggccaggctggtctcgaactcctgacctcaggcaatccacccaccttggcctcctaaagtgctggaattacaggtgtgagccaccgcacccagccaagaggacaaattctttgaggatatgggtcgggcgcggtggctcacacctataatcccagcactttgggaggctgacgcgggcagatcacttgaggccaggagtttgagaccagcctggacaacatgcgaaacactgtctctgctaaaaatacaaaaattatccgggcatggtggcacgcacctgtaatcccagctactcaggaggctgaggcaggagaattacttgaacctgggaggcggaggttgcagtgagccaagatcacgccattgcactccagcctgggtgacagagcaagaccctgtctcaaaaaaaaaaaaaaagttctttgagggtgggaactgccttttgtcctcacattccttagaccttagacctagcatagtaccttgggtggtgttgaaagtgttgaaagaacaggctatataagatacgactattagccaactttttcctttagtatccctgcagacttgatctgtggggcttgtccttccgttgcccctggatgaaatctcaggcagttttctgcttattctcagataatgaaatgtcctctgatcattataagtcacccaaaaacaaaaaaaaatctcattttcataactaaaatgtcctgttcaggcaatagtcaaaatgtgcaactgtatgtaatgtaaaagcttctccctccaccgtctggcacctgctatgagctgacagcagtgtcaagaagagacagtgtgcttsacttccttcttcctctgccatcctctccctccgaaccctaaacctaccagctgcagtttctgacctttgcagaattggagttggggaaaggtcaagagggaagagagaagaaaagttctttctgaactggccccaatcctgggctagttttctctgatctcgggggtgtttaaaattggctttgtcaggtggtgtcccaggttctgattcagagagacgctttgttactggggatgtctcaactgtagcttctgttacagattatatgctctcaggctggctacctacaactctctaacccccagttctccccaggtcatcgccacacagactatctgttagggcctcatcgtgtgttcaaattgccaccttgggcaaagttcccttacgctggtgtcagactggctctcttccacagggccttctggtccacatgaaatatagatcttgtattgtcaacagtgggagaaatgctgccagtgcagccaccatccctcgaaggcagtcccagtcacggccttacaagcaccagttgctgtgctctgtagaccccaaacatgaaggtctcgctcagagtggtctccttgaagcccctcacacctggctccatgtcaacatgacagaaaaaaatgccacaattcctgtcaatttccaactcctagccacttcaacctcaaccattttagactgtcaaagtgagtgtgaggctaagtcagaatcacaaaactggyctcacacacacagtttctgcaaattcagcatagttggtttagcacctcacttggactgcgggaactattgtttastgtccagctttgggggcctcagtaggcaaagaatcctgttaaaacattttgttatacaatctacttcttgcccaggatgttcagcgtagtgtataagatgtttcttattatttgtgagtttgatttcctgaagcaactgctttaaaaaagaacactgatatgcactataagatctcttatgtttttaacaaggcaggttgtagctattcaataaatgttaccaagtgaatgaatgaatcaatgactgaataggaggaaaataatatattctagaagagaatttaatctttgtatattgacacttcaaaggaacttgaagccttggagtgagaggcagtctagtcctcaaaactgctgggcttctctttcagattctttgtcaatgcttcatctcatctgtgattctggccatcactggcctcatmacaattgtttcctctgtcacctcccacaatttccattgttgctgctgctgctgtaaacaccctgtttccactattcttaccattcttagtttatgtgaatccatggttcatgtctattctcatgctgctaataaagacacacccaagactgggtaattcataaaggaaagaagtttaattgactcccagttccacatggctcaggaggcctcacaatcttggcagaagcgaaggaagagcaaagtcacgtcttacagggtggcaggcaagagasagagcatgcccaggggaactcccattcctaaaaccatcatatctcgtgagacttattcactatcaggagaacagcatgggaaagacctgcccccatgattcagttacctcccactgggtccctcccatgacacgtgagaattagaggagctacaattcaagatttgggtggggacacagccaaaccacatcagtcttttatgtctgccaaggagataatcaccaaaaatgaatcaaaagaagaaatatttgtagtcttccttacatatgtaaatatcattatagctgtgcttctatggacagagtattaggagcttcatgaaagatcaatcagaaacaagagtaaataacataagaataaaacacaaataagcatactgcataataacacatcaataataaagcataaagtacaagtaacatgaacttaaatcactagaataattacttcatttacgaaagaacttaccacagaatctcccctgtggagaattttaattgaatcaaaatttaatatgtaaacatattatatatacaaatcacattctgatagaatatatctattgggcaaagtaacatgcatcaacaacctactgtttttatttgtttgttcaagatctttattcagtatccaaaagaagatgtcaagtaggtatttagatacaagtgtaatggtcctgggagaagccacagttggatataatacttaatgtagatgaactagaaacaatctactttttgcccaggatattcagcatagtatataagatgtctcattatttgtgagtttgatttcctgaagcaactgctttaaaagggcacattcatatggaattcaagatttcctatgtttttaacaaggcagtttgtactaaatccacatctgggctcacagcatcccagggagagggaggttatatgctttttctacttcctgccacaagcagcataagcaaaggactgccatagttgtgggacttccctttttccacagaccctatccctgcrtagtgagaaattataactttagacatttcagactttctgatccttcactcctctcaggaattcataagtttaaaggtcagatcctgcatagtcaagagtacaagatcccagaaggctttcagggcaaacgcgtcttggtgattggtcttgggaacactggaggagacattgctgtggaactcagtcgaacggcagctcaggtacatcatctctgaattaatgcccctaatcccatcaycagttatgatggctggaaagagatattcaaaactatgaagtacattggccaattgctaaattatgcagacacasagtaagtgggaaaaaaaaaaaacattgaaaatctttaaagccactcacggttctttctgaactatttaaaaagccatgctttacagaactgaactatctccaagaagggtctaggaaaattgtgtggatgccagacctctaagcatttttcaggagtgcttccttcagaaacaagaccatataggcaaattgcttcacccagttcaattatcttttttttacaccctccctttgtcattctggtaaaatccctatgtaagaatagaaaggtcattttcttgaatgtttctaagttctctactaaaggtgatatctgtaccttgttttgagatgaaagcaactcttgcacaacaagtatacataatggttttagaaagtctaagcccagattcacaaattagaaatctattgcactttagcataaattaaaggaaaatgattagatctggaaagaatatatttttatttaaaaataaggtaaaattgcttttccataccttcactttaagttctattttgcttacatgtaaaaaattgccagatcaattccatgtatctacaaatattatacttctatatttataattctataaacatagtaaaatatttaagagacatacagatctagtaaagtgattttgagaacaatgacagcaataggaacagataatcgtatgtagacctatgtacaaattcaccaatcctctgttgttaaaagaccagactggaataagatcatttgaaacacactgatgaaaaatactacaaaatgatgaacatttatttatccttcttgccttactttactttttaggtacttctcagtactagaactggtacctgggttcttgggcgctcttcagattggggctatccttataatatgatggttacaagaagatgctgtagttttattgcacaagttctgccttcacgttttctaaactggattcaagaaaggaagttgaataagagatttaatcatgaggattatggattaagtattaccaaagggtacttacattttttatttagtagaaaaaatattaaatcaatatttmtcattacattttattcagaattcaaaatgttcaataattgtaatattgcctttgtttattctactctaaatccatttccctaaaacactgttcatcaggtaccacagcagtttttaaaatatatgtattctctttctggtggcaaaagtagtgattcatgargctggaagaaaataaaagatgaaaacttccatttcctgctgttacaaatatcacatatttttgttgttgttgttgttgttgttggggtttttttgtgttgttgatgttgtttttgttcttgttgagacagggttttactcctgtcacccaggctggagttcaatggtccgatttctattcactgcaatctctgcctcctgggctcaagctattcttctgccttaccctcccaagtagctaggactacaggcacaggccacctcgcccagctaatttttgtatttttagtagagacagtgtttcaccatgttggccaggctggttttgaactcctggtctcaagtgatctacctgcctcggcctcccaaagtgctgggattataggaatgagccactccactcagccaaaatgatatattttaatatacatctgtatagagttgcacattggcaagtaaaagaaagcctttgaaaagcacgtaaggtcattaaatatgatttttattatacacttgacccaaatatttttctttggtaagatatctttttttgttttgtttctttttttgtctgtgtttttatccttgagatgtccttcaacttatgaggaaaactactggcaaaggatgatttgatatgtaaattttacaaagaaaatatgtttgatgtgattaggtagaatgatggtcacactgaaaatatgtatcagtataaattttttttaatggartctcactctgttgcccaagctggagtgcagtgggtgtgatcttggctcactgccacctctgccctccccgggctcaagtgattctcctgcctcagcctcccagataggtgggactacaggtgcaggccaccatgcccagctaattttttgtattaaatttttatttaaagagttccttgctaatttcctgtctgcctgatgtcattccctagaggcctaagtaatttgagacccaaaattgatcatcaaatggattgttgtaccctctatgctgacactctgagaaaagcattgctccagaaattagttctaagagatagagagttttaaaccccaagcaagaaagagtaggtttagtcattttccatataccttctactgagaacagaaacacaaaaccatgttataaacatactaagtcaagtagatgactttgaattagacattggttaattctcttccttagcttggcaggtaatttccctgaattggctaagtaaatcatttgctgaagtttctcataaaaataactacagtgaataattttctcctgtgtgtcaaaggaaaaaagcaaaattyattgtgaatgatgagctgccaaactgtatcctctgtggggcaatcactatgaaaaccagcgtgattgaatttacagaawcctctgctgtctttgaagatgggacagtggaagaaaacattgatgytgtgatcttcactacaggatatacattttcttttccattttttgaagaacctcttaaaagcctctgtacaaagaagatatttctatacaagcaagtctttcccttaaacctagagagagcgacattagccatcatcggccttatcggccttaaaggatccatcttatcaggcacagagctccaagcacgatgggtcacaagagtattcaaaggtaccatgactctactgaaagtyctctctttggatcgtaaaattggtgccctgccatttagctaaaatcaaacagatgtgaactaaagtaacaaaatatttttaacattagtgtacaattaattgtatatgtttgtaatatgagggtgtgctgtgtcacttaatgtgactgaataggaaaagagattttggctctgtggatgagataaatttggacaacagaatataatcaaatttgtcaggttagctgaaattattgaaggcttcatgatcctgttctagcctagtctaatctatctactcctaaatcttttcatttagtactagaagtataattttatattgcttccaaagaaagatattggaataatatacactatgaatgaagttgagattagagacccataaaaaatattttagacactggaaactactttctgtcaattatgcaataagagcatagatactggagtcagagctacggaggtccaatcccaacttcaaaattctttagctttgcaagaacccctctaaatctcagccccttcatctgtaaaatggggataataaatcccgtatgacaagaattttgtaaaaaggataatgtctgcaaagcaattagcacagtacttgacatataactaacgcgtattaagtgacagggtttctctgaccattgctattgctatcatacctctctaaagcagggcaaattttagattagcaagcattttagttttaaagaactgcagttttctgtttttaaatataaacagccatagcaattgggcccatcagctatgctgtagaaaaattctgttcttaatgaataaaaacaattaccaataacttataaatagcatacaacatggtattaaatagtgttgacttctatcaaactgtagaaatataataggcatcaatcacacttaaaaccgtacgttctcctaagttggcacaaaaaaaaatgttatttgaatggggggaggggaaagaaggcagttagaaaatctcattttatttacattacagaaaaaaatcctacaaccctgcagtaaattaccacaaatttctgttttttaaggtcagttaaagagctttcacagcattatccaattacattaaaaccacagaagacttaattaactactggttttaaaaagtattttatggtgagctccaaaatggttattagaatgataaagctgacaaaacaaaactcttttagctcacaccataggagtaatggcatgcttctcctgagaacttccaaaaagcaatctaggaacaaccaattaaatcttgctagttttttagaggataaggtgaccctagtggaaagcagtccacagagcttagttggacctatctcgtgtggaaagtaaacacacaccctgggccagcacttggtacctgacaaaggcaggactggccagaatgggatggcaaacagggcagactaacaagggtcacaagtggcctgaggtggatagggacagtgaaggggcagggggtggggacagagtttacattataagagggagtatgggtgttctaggaacccagaagacaaacttggattttagtctctggggaagctggacaactgcagagaattatcagggtgcaagctgttaagggagaataaggtttagaattcagaaaaacaagaagagcagagtccaagtgctaagactgtctagatgggagattgggaatgagcaggtcctcacaacaaaagcagacagagcctgggtgagactgactgcgaaactgccaggccccttccacacatgaggctccttgtgtaacaaaaatgaaaatgttctaagacagggttataaagtgggttttttttagagaccagtcctcactccattgcccaggctggagtgcagtggcgtgatcatggctcactgcagcctccatctcctgggctcaagggattctcccacctcagcctcctgagtagctggaactataagcccatgccaccacacctggctaaatttttattttttgtagaaagaatatcttgctatgttgycaggctggtcttgaactcttggacttaagctgtcctcctaccttgccctcccaacgtgctggggttataggcatgagccactatgaccagcctaaaatggggtcattttaagtgtttacatctaaccaactaatagctttaacacaaacatgmacacacacacacacacacacacacgtacaatgtggagggtatacatacaatataatataaattatattatttatacagcaaaagcagatgaagagagacagggcaggccaactggcacaggtgcaggtgtctggtgagtgtggcgcaggctgacagctgggccatagaggcatctctcctcacaattctggcagtagagtaccctggttaagtgaactgggyggggaattttacctccagaaaattattttctgtgctgcatttccattctgagctttgactatcatgtgctctgaagttagagcagtgggaggctagaaatgagtgggtggagaatttaaataaaggaaaagccacatgtgactttagtgttgtttgtgatttttcccacaggactctgtaagatacctccatcccaaaaattgatgatggaggctactgaaaaggaacagctcattaaaaggtatgaaatgtagcttgytctagggcaaacttacagtatattctgttacaaaaaaaggattcagagtataaaagccattcctagagaagcagtatggcaggttggaaataactctgcattaggaatcagaaggatacatttttagtcctaactctgccaccaatcagacgtggccttagacaagtcatctggggacaccaggtcttttcagtggaacacacagcctggccccctaccagtggcaatcctgtcttcacttagtccaggaaatctattctgacttcactctcttcctacctctcaggctgctctttctctgtatttgctggtatcgcctcttcctcactcccaaaatttagtgagctccaaacttagtcctcaggcctcttctcattcctatttacacccactcccaggtggcctcatccaggcctgtggctttaaatatcatcatatactcagggctcccaaactgtgtctctgactcaaatctttctccagaacttcagactcctaattcccctccctctagatagctccacttagatatttaataggcgtctcaaatttaatatgtctaaaaatgaactcttgaccccctccgccccccatctgccctgtaaatgggctgatctgaaacttttccccatctcagttcatagctactcattccagttggtcaaaaccaagttcagtcaaaaaccttggattaatccttttctcttctttttttctcacatcccatatcggcaaatattgtcagctcctacctaccaaataaatccagaattcagacacttctcactgcccctactgctaccatcccagaccagaccaccaacatctctcatcaggacacttgctgccacctcttacctggtctccctccttccactctgttctacaatctaggcttgtcacagcatcaagagtgagccacatcacattgcccttctactcaaaaacctccagttgcttccttttcactcccaggaggctccctacagcctctgtggcccacagcacacccaaatattgatatgccctcactgcctactgctctccatctcatccatgctgctttaggcattccagcctcctacctgttcctcaaacataccaaacataaccccctcagaacctttacgctctactcttctgtcagcctggaatgttccatcagacacctaaaagactcactctgttcaaatgtcacttaataagagagaagccttctctgacaacactatatgtgacagcaacccaccctgactcaccattgcctctccccttaccctcctttctatttctcagagtgcccattattaccacctgatatattacatatctacttagttgaggttttttaataatgtattcatttcccccattaaaatacaggctttttgacagcaaggactttgttttgttcactattggatctccagcacctacaatggtgcctggaatgtgatagacacttaatgttcatttatttatttactcactgaatgaatgaatgattgacattgggacatcatgaaagtttactgacagaaataagtaaacttcatgaaaagtagaacatcgtggaagtttactgacaggaataagtaaataagtaagtttactgacagaaataggtatgaataatgccttcatattaatatataatatgctcatatctgtggaaagttcagtccacgtacaccaagtatggccttctcaactcacaattcacaccaataaaaaaatttaggtacatatgatgctttctggtcatgttcattcattcaacagctgttctatttggactgatcagacgttgttctcacatcaaatccaagaactgaaaacattatttaaagtttctctcgagtttttaagaacctacaactatttatggagaaaaagcagcccaaggatgatctttttgatagactcaatactggtattctgaataagcatctccaggatctcatggagagcttgacagccaaggtattccatacatacaatgcctccatcacgctacagcagcagctagaagaactcacagccccggatgagaacatcccagcgaagatcctttcttataaccrtgccaatcgagctgttgcaattctttgtaaccatcagagggcaccaccaaaaacttttgagaagtctatgatgaacttgcaaactaagattgatgccaagaaggaacagctagcagatgcccggagaaacctgaaaagtgctaaggctgatgccaaggtcatgaargatgcaaagatgaagaaggtagtagagtcaaagaagaaggctgttcagwgactggaggaacagttgatgaagctggaagttcaagccacagaccgagaggaaaataaacagatggccttgggaacctccaaactcaattatctggatgctaggatcactgtgccttggtgcaagaagtggggtgtcccaattgagaagatttacaacaaaacccagcragaaaagtttgcctgggccattgaaatsgctgatgaagactacgagttttagccagtctcaagaggcagggttctgtgaaaaggaacagtgtggtttgggaaagatggataaactgagcctcgcttgccctcgtgcctgggtgagagaggcagcaagtcttaacaaaccaayatctttgcaaaaagctaaacctggagatattataagggacagctgagccagttgtcctacggacaacttatttaaaaatatttcagctatcaaaattctagctgtatgatttgttttgaattttgtttttattttccagagggcaagtggatgggaatttgtcagcgttctaccaggcaaattcactgtttcactgaaatgtttggattctcttagctactgtatgcaaagtccgattatgttggtgtgtttttacagttagggttttgcaataacttctatattttaatagaaataaattcctaaactccctcccctctcccccatttcaggaatttaaaattaagtagaacaaaaaacccagtgcgcctgttagagtcgtcactgtctattgtcrtagggatcaattttcattaaacttgaagcagtcgtcgctttggcagtgttttggttcagacacctgttcacagaaaagcatgatgggaaaatatttcctgacttgagtgttcctttttagatgtgaatttttatttctttttaattattttaaaatatttaaacctttttcttgatcttaaagatcatgtagattggggttggggagggatgaagggcgagtgagtctaaggataatgaaataatcagtgactgaaaccattttcccatcatcctttgttctgagcattcgctgtacactttaagatatccatctttttctttttagccctgatctttcacttgaaagattttattgtataaaaagttccacaggtcaataaatttagaggaaaatgagtatttggtccaaaaaaattaaaaataattaagattttagggcttttattttttcttttgtaattgtgtaaaaaatggaaaaaaacataaaaagcagaactttaatgtgaagacttttttgctataatcattagttttagaggcattgttagtttagtgtgtgtgcagagtccatttcccacatctttcctcaagtatcttctatttttatcatgaattcccttttaatcaactgtaggttatttaaaataaattcctacaacttaacggaaaaaaaaaagtttctcttccatctctagtaaaattaattgcctccttttaccatctctagtaaaattaattagcttcacagataccctctgtagataaactcctttaatttctttcttcctaacatacaaaaacattcccaaatatggtttgatttcccccaaaaaatgtaacaaaatggtgggaggatgggtgggtctgataacttgagaaatgcagrgcaggtgtgattaatgaaaggtcctccctcttttttcctctcaggggagtgtttaaagacaccagcaaagacaaatttgactacattgcctacatggatgatatcgctgcctgcataggcacaaagcccagcatcccacttctgttcctcaaggatcccagactagcttgggaagttttctttggaccatgtactccttatcagtaccgcctcatgggccctggaaaatgggatggagccagaaatgccatcctgacccagtgggacagaacattgaaacctttaaaaactcgaattgtccctgattcctccaagcctgcctccatgtcacattatttaaaagcctggggggcacctgtcctacttgcctctcttctacttatctgtaaatcttcacttttcttgaaattggtgagagataaactacaggacagaatgtccccttacctagtaagtctttggcgaggatgaacctgattgttacaagggttacacmaagtcatgctaattctatctccaagtatcttgtgcatccctcctctgctctccatcataactgctattagccaaattcaggcccagtcatctcctatctgaattattgtattatcttcttctttgttttcagtaccctctttcttgccaccctttccaatgcatcttctaccctgctacctcagtgattattctaaaataaatatatatgatatggtttagctgtgtccccacccaaatctcatcttgaattgtagctcccataattcccacatgccgtgggaggtaggtaattgaatcatgggggcaggtcttctcccatactgttctcatggtagtgaataagtctcackatatctgatggttttataaatgacagttcccctgcacaagctctctcgtgtctaccaccatgtaagacgtgtctttgctccttcttcaccttccaccatgattgtgaggcctccccagccatgtggaactgtgagtctgttaaacctcccttcctttataaattacccagtcttgggtatgtctttattagcagcaatagaacagactaatacaatatggtttattactctaaagtaaatatatggtttataaatatataggaacctctgattcccaggaaggtctcagtaggaacaaaatggcattcaaattaagttgagaaaattttttccatcacccaaactggaacacagtgatgcaaacatagatcactgcagcctcgaactcctgggctcaagctatcctcccacctcagccttctgagtagctgggaccatgactggctaatgtttttaaaggttttcatagggacagtgtgttactttttctttctttttttttctttcttttaaaaaaaatacggccagggtctcgctatgttgcccaggctggtttcaagctcctgagctcaaacaatcattctgcctcagccttccaaagtgctgggattacaggcatgagttatcatgtccagcctcactattttttttagatctcagatcttgaactcttgggttcaaacaaacctccctcctccacctcccaagttgctgggattacagacatgtgccaccatgcctgcctggaaattttaatatagagattattttaaaagatatgggcagagtgtaggaagatcatagagataatgaaacactcccagacttgtaacctttactatccatagacctaatgaggcgagagaataaagcaattactaaagagaaaaagcaagcactgcgtagagggccacctaacaagagcaatgaccttcagctgagtgacaaaggcaggtgcacgatgactacaaaagtagagatctgggggaataaattatctaatcttactctcttcccactctctgatcccttgctagtgctccccaagggccaaaccaaatgaaagtcagaaggcaaggttgccaacagattttatccacagaggtcaggctcctagggcacagagcagagcaaagatgatggagaggatatatggtgaggcacacaaaagggatccagtttgatcatgtcaccctcccatataaaatccttcattctctatcttgattagagataatagtccttggctgggcacagtggcttatgcctgtaatcccaacactttgggaagttgaggcgggcagatcacttgaagtcaggagttcaagaccagcctggccaacatggtgaaacctcatctctactaaaaatacaaaaatcagctgggcgtggtggtgcgtgactgtaatctcagctatttaggaggctgaggcaggagaatcacttgaacccaggagacagaggttgcagtgaggcaagatcacaccactgcactccagcctgggtgacagaaagagactctctcaaaaaaaaaaaaaaaagaagacataatagtcccatattccttagcataacatagaaggcccttcatggtctgagtccctttgcctgggtcagcaggatgcctgttatttcaaaccctcccatccagcactaccaaactatgaactttcataactcctccctttggcatcagctcttgcctctgccaggcacacaaatctataccgtgcctgactgatgagatcctatttatctttcaagagagctcagtgctctcattctgtgcagccttccctaaatccccaaagcagaaatggtcacccctgtgtagcagctgcaccttgtgtatgctctggtgctgctcttttcttactatagtatcattttctttttgtctgtcacctaacaaatggtgagttcctaaaaggaatcatatcatgttcatcggacacactgcctgatatgaagcattgctaaagaagtatttgatgaatcgacagtggccttgccagctggcactctttgttttctctcttctacctacattcttgtcttctgccaacatgataaattacctcagccttgcaaacaaacaagaacagtccgccaacagctaatgttataagtaaaggacaatccaagtggcaattagaagaaatagaactatacagtccagtacttgcacaggagcgaagtacactggttaagagcactaacttgagaatgagaactcaacttgttagctatgaagtcttggccatgtgacttagcctctctaagccttagtgtcctcatccggaaaacagtggtcataatagggcctaccttactgtgaacattaatgagaaaatgcacggtgtttggtccaaagtaagttaactactaatagctgcagaatcggggacattttctattctctgaattaaagaaaggacttgaaactattgccaaatcccattccctgttgtgtaatctggaggcatggcctttgctctccctggattctctggcagcactttccagttaacgatcgtttttgttgttgctgctgctactgataaacggacatgtttaatgacacattggtcttcacagagatgactacagagacttttaatctataatccagtagtatacaaccatgcatcacagactaattagccagatgtaaaataaactagcttcttaccacaactaccctataaacattgcaactattctttccaaaatgaccctagtcttacatgaaaacacctattgtggggaaaccggaaacctagttatgtgaccaaaactaaaaattaaaggaaaaattgcaattcactggtgaaagttggtgaaagcagaggaaattcagtgcccttcactatgctactttgatgttacttgtgttcttttggtccctcttcttcagcccatccatgttagttctcagtaggtttgaataagccatccggaacttattcacttctttggagctcaccacaatgctaaccttctttttcccatcagtagttcttaacagacacctgtctgaagactcaaagcccgcaacagaacctttcactagaatgggtttggttcaacctcagttctcaaggaacaaatggtaccaggaaaagtccgctgtaagtgaacccattttaactgagaatcaaaacatcatagtaaatagtatggaaaaaaattaggtttggtcaaaacttcaacttgagaaataaaaccagaaattataaaaataagtttgctttactgttcatttaactgagttagattataattggaactatgtacaaatgggaactgcctaattgtctgacaacttatattacagcaagataaaacattccccactttatacaacattctttacttcccatatgactttcaaagcaagattacaagattgccctttttaaaaaaattcacagttttcattgattttgccaagtatttacatcattctatttgaatttcctgtcttgtcattatgtttgccaattctctctatgttattcttgtatttcttacatgatttaactctgcaagatctagacttgccaatggcttaacagttctccagtattacttcatcaacttcaacattcttcttagttgcaggtgatatggtttggctgtgtccccacccaaatctcatcttgaattgtaactcctgcaattcccacatgttgtgggaggaacctggtgggaggtgattgaattatgggggtggagctttcccatgctgttctcatgatggtgaatgagtctcatgagatctgatggttttaaaaacaaaggtttcccagcacaagctctctctttgccccctgccatccatgtaagatgtgacttgcttctccttgcctttggccatgattctgaggcctccccagccatgtgagactgtaagcccattaaacctctttcttttataaattgcacagtttcaggtatgtctttaccagcagtgtgaaaatggactaatacagcaggatatgtaacttctctttgccattgatttgcatcgtatggtctgcattatcagacaattatcagagactgaccacaaacacatttgtgaaatacatttatgggaatgatatccagagtagactgtactgtcaaacagtcctgttggatatgtgtttgaggaaaagtaaacttttttttttgaagacagagtcttactgtgtcacccaggctagagtgcagtggtgcactgactgctcactgcagccttgacctctcgggctcaagctgggactataggcatgcaccaccatgyccagctaattttttcattttttgtagaaacaaagttttaccatatttcccaggctggtctcaaactcctgacgtcaagtcatctacccatttcggcctcccaaagtgctaggattacaggcatgagcaactgtacctggccgaaaataaacttttaagtggtcagttaatttgttcactcaataaaacttattgagcacctaatatgttccaagcactattctagaccatgaggaaatagaagcaaatacaaagagataaaattcttgactccatgaaatttataatccagtgtgagaggcagaaaatgaacaataaaatgttttatagtgatcagtcttaagaagaacaagtaagtttaagagacaaagggtgatgggggttagataggatgctcagataagacttctcctaagaaatgactcttgaaatgtttttattggaacttgcataaagtgaggatgtgacccacatgaatatgtcatagaacggtattgtttctgaaagacagatcagtaagtaggcctgagtcagggatgttagaacagtgctttccaatcttgttcacactgtgacacatagaagattatggtaatgggccaggcacagtgactcatgtctgtaatcccaacactttgggaggccaaggtggggggatcacttgagctcaggcattcaagaccaataggcaacattgcaaaatcccatctcaaaaaaaaaaaaagaagattatgataatgaaagaagacatatgaatagcaaatgagcatatgaaaaaatgctcaacatcactgatcatttcagaaatgcaaattaaaactacagtgagatatcatcttataccagccagaataggtattattaaaaagtcaaaaaataacagatggtcagaacatggagaaaagggaccacttatagactgttggtgagaatgtaaattagtagtacaacctctatgtaaaacagtatgggccggacgtggtggctcacgcctgtaatcccagcactttgggaggctgaggcaggcggatcacctcaggtcgagagttcaagaccaacttgaccaacatggagaaaccccatctctacaaaaagtacaaaattagccaggtgtggtggcgcatgcttgtaatcccagctactttggaggctgaggcaggagaatcacttgaacctgggaggcggaggttgcaatgagccgagattgtgccattgcactctagcctgggcaacaagagcaaaaccccatctcagaaaaaaaaaaaaaatggagatttcataaagaactaaaaatagaactaccatttgattttgatccagcaatcccactactgggtatatacctataggaaaataaattattatatcaatgatttctgcacttgtatgtttattgcagcactattcaccaacctaagtgtccataaatagataactggataaagaaaatgtggtacctatatatgtgggtgtgtatgtatgtgtgtgtgtgtgtctacatgtgtatgtctatatgtgtgtgtgtatagatacacagttcatggaatactactcagccataaaaaaataaaatcatgtcttttgaagcaacatggatggaactggaggccattatcttttttttcccccacatgttctaatggcggccattgtcttaagtgaaacaactcagaaacagaaagtcaaatactgcatgtcctcgcttataagtgggaactaaataatgtgtacatatgcgtatttttccattctcacactgcaataaagaactgcctgagactgggtaatttataaaggaaagaggtttaattgactcacagttccacatggctccagccagggaggcctcagaaaacttaaaatcattgcaacaaacacatccttcttcacatggtggcaggagagagaagaatgagagctgagcgaagggggaagccccttataaaaccatcagatcttgtcagaacttactcactactacaagaat

SEQ ID NO: 95774 - DNA, 25625 bp, Homo sapiens
tcactgcaacctctgcctcccggtttcaagtgattgtcctgcctcagcctctcaagtagctgggactacaggcatgcaccactacgcacagctcattttttgttgttgttgttgtattttagtagagatagggtttcaccatattggccaagctggtctcgaactcctgacctcaagtgattcgcccgtctcgggctcccaaagtgctgggattacaggcgcgagccaccacgcctagcttcctgtgggcttttctatgcctctctgccagatccttgtgtcctcattacaggatagaggtgtggttctcaacatgtgctccccagaccagcagcacctggactctccttagaaactaaactaaaccacaggggtagggtccagcaatccaagtcctgccaacagcaagtccaccaggtgatgctgagaaccactggtgtggagaaattacctggttatttgccatctctcctatgagaccagtgattctcaaaccctgactgcccatgagaatcacctggaagctttttaaacaaacaagtggtcagcctgcactcggagcgattctgattgaagtgctctgcagtagaacccagcacgtttttttactttgttttgtaaactttcccagaagatactcatcagtagccaaggagagattcactcgagtcatctgtcagctcctagtagacaggcaatccagtttctttcaagtttatgtcccaagcacctaaggggcttagcccagaggtgctcagagaatattggatgaatccattagtgaacccatcagtaaataatggatcctgagttcagatttctccaaacatacgatcattaattgcaccaaacaagccctcaatgcacacacacacacacacacacacccctctgcttacctgtaaaatattctacttctttctccaactcttggaaaatctcatctgcctcagctttgccaaacaggactgtgtaactgcagtccaggccctcagcccgaatgtgccgccagctagggcctgctgagtggcctccattccctggggcctctctcctgggcctcttccttgtgctttctttgtctcctcccaacacagctggctcttctccagttggctcttgctcctcctgcttcctcaaaaggcccccttgagcccctttcaccaggaatctgtccatcctgtccccacaggaaagaagggacgtcagtggcgaggccaagacagaaattgctcaagttctatccccagtgcaaaaatctgtttgtccaaggggtctcacagcaacattcctagtttcacattttcattttaaagtttaaaaccatgtcctagaaaggaaacagaagatgttaaagccggaagggaccctagggacaatctgatccagggtctcccacgtccacctgtgcatcagaatcagctggctagcttgcaaaaacccagaggtctgcactccacgcctgagcacctgaatttttaaagaactacctcctgggaattcgcacgccacagctaaacttagaaactacaatccaaaccctcattttgcagaaggggaaactgttgcccacagaggcgaagaggtttgcccaaagtcaactgtccacccctttaaggaggaaggacccataactgacctcgctgccccccaccagtgttaaaatagatcagtctagtgatgctcaagtggatacgattcagaagcgagacgcaaagaggttaaacacgggtaaaccgcacgcaaaattctgatatcactgcaacacgtccgtggggtgggggtggcaagagtgctctagcatcgcagctccggcgcagatcggaatcccgcagtcaccctggtggcctcgtggtgggaaagacgcgccccagcgaatcggtcgcgtcacttccggagcacgctgggaactacggcaggctagggcgcaaagagagcagccgggcggccctctggtgccacctgctggcctcccgtgtgtggcaagcactgccgctttcccgttgatcacctgttgggccactgtcgagaatcacggctggggtgagaactgtggcttggcgtcacttctcagtgagggttactttggtgtccggaaagggcgttgggccaccagtatattgtcacgagtgggagcaggagttctgcagtcggatatcgtggattctgtttctgtctcctccgccctggctgtgtggcctcccacaggtcacttaacctctctggggttaagttgcctcatctgtgaagtggggactacagcacctatgtcatgagagcgcctgaggagatgacaggatgcatgagaaatgctctgtcctctaaataaatgttggttccattattgctcgtttttctttgttttcttgttttttgatgttgttcttgtttgttttgtttttttgagacaggatctcactctgttgcccaagctggaatgcaatggcatgatcatagctcactgcagccttgaactcctgggttagagcgatcctcccgtctcagcctctggagtagctgggactacaggcacawcccaccccaccctaaataatttttttattatttttagtagagatagggccttgctatgttgcccaggctggtctcaagctcctgggctcaagtgatcctcccacctgggcctcccaaattgttgggattacaggcgtgagccaccacgaccggctcctaatttttatttactctgtctcccctcaatggaacgaaagctccatgagatcagaggctttgttttgacagatttcaacaaatgtacaatattgtatgatcaccaccacaatcaagatctaagacagttccgtccctccataaaactgctccagcctcttaatcaacttcgcccatcacccagcatcagcaaccactgatctgtcttctctccctatagttttgccttttccagaatttcatatacagggaattgccgtggtttgaatatctgttcctccaaaatccgcgttgaaatttaatcctcagtgtggcagtattgagaggtggggccttgaagaggcgattgggacatgagagctctgtcataatgtcctcataaatgaattaatagattaatgggctcaggggttaatgggttaatgggttaccgtgggagtgggactggtggctttataaaaggaagaagagagacctgagctagcacactcaggcccctcgcgatgtgatgccctacacggcttcaggactcaacagagtccccaccagcaagagggttttcaccagatgcagcccctcaacctcggacctctcagcctctatgagaaatgcctttgtgggacttctttcacttaagcatattgcttttaagattcatttatgcgcccccccacctccccgcttttttttgtgagacaaggtctggctctactgcctaagctggagtgcagttgcatgatctcggctcactgcaacctccacttcccaggctccactcccacctcagcctcccaagtagctgggactacaggcatgcaccactacacccggctaatttttgtattttttgtagagatgggtttttgccatgttgcccaggctggtctccatagtcttcagctggtgagctgaagaaatccgcctgccttggcctcccaaagtgctggaattgcagtcatgagccgctgtgcccagtcgtatatgcacatttgtattacttatttgttcctttttattactggtatagaagggatgccccacaggagtaggccccacatagggttgtttctctgattttaggttactatgagtaaaatcactataaacattcacatacaagctttgtgaatatagtttttcatttcccttgggtaaatgcctaggtgtgggagtgctgggtcatagtggctctaagggcaaatgattttcagctttgagcctctctcccttagacttcagcttcttgtcctaggcactgggacacaccagcaacaagaagcagcaagttcctttcttcactcaggttacattttggggatggagacagaaacacacaaggaaagaataaataatatgctgtctctaaagaaattgtgtaaaaagaaaaaataaataagatgcttttgtatagtatagcagttatagagcaatgggctagaaagtggggcaggaggagaagtccttttcagggaaagatcctgagctgagacctgaggctttccaggcaaggggacggtgaatgcaagggtgtgcaggccacagggggacaagctgggtgtgtccagcaattgtgctgggagctggactcagtagtgggggcttccatcagagaggaggcagcactgagacctgggtaggaagctggggtttattctaagcctttttgaaaaccaaagaagggttttaacctaaggattgtcttttttttctttttcttttttttgtttgtagacagggtcttgctctgtcacccaggctggagtgcagtggcacaatctcagctcactgcaacctccgcctcccgggttcaagtgattctcctgcctcagcctcctgagtagctgggattgcaaatgcatgccaccacgcctggctaatttttgtatttttagtagagacggggtttcaccatgtttgccaggctggtctcgaactcctgtgctcaagcgatacgcccctccttggcctcccaaagtgttgggattacaggcgtgagccaccgagctgggccaggccccaggtattgtcatgatgtaaaaatctctctctagaaaagagaacaccagcttcccagctggtcttctgtagctaggagatgcaagagcagcagttgaatttgaggtttgctttggagaaagaaccaaaagcagatatggatggtttggatgtgagggagggaaagagaatcctaagtgtattagtagtggtgggaggaggttcggtacagtggtgtcatttggaagacaaatcgttggtgtttaacctctatgacccgaaagtctcccacaagcctgatacattaggcaaaatgtttgactgcactaagccttagtttatcgtcataaaataggccatgaaaattgcgtgagaaaatgtatataacagttcaacaaataatattggctgggtgtggtggctcatgcctgtaatcccagcactttgggaggccaaggtgggcagatcgcctgaggtcaggagttcgagaccagactggccaacatggtgagatcccccatctctactaaaaaaatacaaaacacacttgggcaaacatggtgaaaccccatttctactaaaaatagaaaaattagccaggcgtggtggcgcgcgcctataatcctagctgaggcacgagaatcgcttgaatccgggaggcggaggttgcagtgggctgagatcacaccactgcattccagcctgggcgacagagcaagactctgtctcaaaaacaaaatacacacacaaaatataatagtatttgtttgtttgtttgtttttgagatgcctcggattacagtgcggggattacagacgtgagccatcaagcccggacaatattattatattgttcattgcactcccacaacacccctaaggggcaggaacttttcttcccagccccctccccccgaccccaccgagagacagggtctcgctctgtcgcccaggcctggagtgcattggcgcgatcaaagctcactacagctcagaccctctggcctcaagcgatcctccagcctgggcctcccaaagcgctaggattacaggcgtgggccaccgcgcctgaccagtcttctcttcttgcagctgagccttaagagcctgtccaaagagcagaggtgggctgaaggcacaaagcgaatgaaagaataggcccccgggcaccgttgcacgccccacctcctcccaggggcgttgcactccagcccctcccgcacatgcgcactgggccttccaccgccccccgcccccagcaaagccccccgctcggagcatgcgcgggccgcttggcgccaattgctgaccgccacagccacagccagggctagcctcgccggttcccgggtggcgcgcgttcgctgcctcctcagctccaggatgatcggccagaagacgctctactcctttttctcccccagccccgccaggaagcgacacgcccccagccccgagccggccgtccaggggaccggcgtggctggggtgcctgaggaaagcggagatgcggcggtgaggcgcggcttgggccggggctagggggtgaagggggaggaaggcggtgggccccgcctgacggagggcgtgcaggatcgcgcctctgactcggtaaacccgggctccgctttccaaatagcctccacgtgttcaaaatagccgccgctgtcccccatgggccgccatgctaaagggccagccaatgggracgcgtctcggggcccatggcgccaatccgcgcgccgcaggccctccwggctcggtgcgctgtccaatcagaggggagagggggcgggacccagagggaggttttttgccgcgaaaagaccacgtggggacgcggtggggcgggtctggcgggggcggggcacctctgtgcagggttcccagtcaccgcgacgctcctcgggaagcyatagggcgcctcccagcccgtctccccgctccagtttagaacctaattcccaattcccggaccgggcccagccctgggctcttactgtccgcttttgctgggacctgttccacaaatgggcgtcttctgccttgggccgtgggggttgggccggaagctgcggacgcctgggaaggggccgctgcagctcttgagccgcctctgcggggaccacttgcaggccatcccagccaagaaggccccggctgggcaggaggagcctgggacgccgccctcctcgccgctgagtgccgagcagttggaccggatccagaggaacaaggccgcggccctgctcagactcgcggcccgcaacgtgcccgtgggctttggagagagctggaagaagcacctcagcggggagttcgggaaaccgtattttatcaaggtaaatatggaaatgcaccttccataagggtaaatgtggaggctgccggcccttttgtcttgttagtgtagccggccaagttcatgtttccgtaggcttaggttgtacccccttcmacctcctttactcacaaagggggtaaaagaaagccatgatgtttcactctgcagctttatattggttaaagttgttaacgacccgcgagatgatatcatggattcatttaagtcacatagtctattgtccaggaaaggctggcgtagtaaaatcaccaaccatcctgaatgaaacctggcttgagctttaaaaagccgagaggagtggcactgtcaggacccagcccagagaaagaggcaaggaattgacctgattgaaccacttrggtgggggggcaggcactgtttttgtttgttgttttttaaaagaatttggacataacatgacaaakaactaatgatgttccaaataacttgcactagaasctttctwattgaattcttatggtttccaatgagaatctgattttaagtctagtttatctttaaatcagctaatgggatttgttgcagaagaaagaaagcattacactgtttatccacccccacaccaagtcttcacctggacccagatgtgtgacataaaagatgtaagtacaacttgttgataatttttattggggagaaggagtcaaatagtatttttaaattagggacactggagttaagccacagtccatcattcagtagtaaataaaacactgaaatcccgaggtttggctgactgtatttcagcctgtatttactctttttaatgtttaccacgtggtatttatgtggcaaaaaggaaaactatgtacatcctgtgctcttatttcttgtattttttttaaatcctgaaactaacctcccgcggtgtcagatgttatggtggtggtgaagttcaaactgacacacaaagcagttaaatcttttgcagcttgttatagtcaaccccaccttgacctgaccacactgccttatagttagcactttcaagctcttgacttctggcctgaacagttttgtggttctgttatcagatccctttgctttagtttgtcttatataacagttgctggttgkcggctctcatccatcttgtgttcagaagttcgtggggctgggcacggtggctcatgcctgtaatcccagcactttcggaggccaaagtgggaggatcatttgaggtcaggagttcaagaccaatgaaacctggtctctcctaaaatacaaaaattagccgggcatggtggcgcacgcctgtaattccagctacttgggaggctgaggtgggagaatcgcatgagcccaggaggcggaggttgcagtgagctgagatcacaccacttcactccagcgtgggcgacagagccagaccctgtctcaaaacaaaaaaaaaaccgtggcttctcactgttgaactatgaaagcagagcaaccctctttaaatagggccacgtcctacctctcagccttacctccacstcccactctcccactccagagttggacagtgtggcaaacccctccccacttctgtctcttaaaaatcaagtagatgcctctgtggcacctccttgaattgaagtccgttgcctgccacctctgtgatccagttttcctctgagctgctacgatgcatttagcacctgctgacactggacttttaggtttcttacccgttttcctcccccgttttgtaaactggggcaagaatcttgtgatttaatgaatatctgtgaaatgacatagargtgaaataggtgaataaatcatcttgataaggcagccacacctaatacttagaaaatctcgtaagcttaattttagagtaagaatttagaatctagctctttggttttgaagctaaattaaatcctattaagatcaatactaatttgcttcttgtttgaatgccctattctgaataccagtaatcagtataaacagggaatattaaaaggaatattktgagggaatgctcaaaaaccagtttcaaacctatgaggatcagatgggccagcagggcttcttgacagaccagcattgggagagttgtttcacaagagaatatgttggcatggtgtgaacaccaaggggagggacaagaggtccccaaaagcctcctggtcatggaacatctggagctggattctgaaagatagagtatgtcagctgtggaggaagattctaagaacgcaatggcagaagcttgagaatgaagactaggtgggtgggccctggatgggaaggacgaggcggcctatgtttcaacacctcccgtgacaggaacttcatttcatttcattgtctcttgccacctactcccatggcccttttgatctgacctcattctcttctggctccacctgttagaggatataggggagcagacaccctcatatgctgctggtgggaaatctgaattgcttttttttttttttttttttttttttgagatggagtgcagtggtgcaatctcggcttactgcaacctccaccccctgggttcaagcgattctcctgcctcagcctcccgagtagctgggactacaggtgtgcgccaccacacccagctaatttttgtwtttttagtagagatggggtttcaccatgttggccagatggtttcgatatcttgacctcgtgatctgcctacctcgscctcccaaagtgctgggattacaggcgtgagccaccatgccaggccctaaattgctttaattcatcgaaaagtaactgggggctaggcacagtggctcatgcctgtaatcccagcattttgggaggccgaggagggaggatcccttgatctcaggaatttgagaccagcctcagcaacataagggaggccgtgtgtctacaaaaagtaaaaaaaaaattaggtgggcatagtggtgcactcctgtgggcccagctactctggaggctcaggtgggaggaccacttgagcccaggagggcgaggctgccatgagctgtgatggcaccactgcacatcagcctgagcaacacagcaaamccgtgtctcaaaaaattaaaaaagcagctaggtacatatctttacaagtttaaaatacgcttagcctttgaccagcaactctgytattagcaatctatgccatagaagtgttttatttgttttgtttatgtttgtttgaggcagggtctgtgctgcttacattacagtattgtttaattcctgacccctggtggttcacaggtgaaggttgtcatcctgggacaggatccatatcatggacctaatcaagctcacgggctctgctttagtgttcaaaggcctgttccgcctccgcccaggtacagttgctttacaggtgactgcagtccagacatgattcctttcagatgtgtacttagcttattacaagtgggactatctggggcactgttcactagccttggaggaggatttctcggcctcagcaccattgacatttggggctgagtcattctttgttgtggaggaggagaggagtcctgtgctattgcaggatcttgtgccacatccctggcctctaccactggaaaccaggagcaacccccagctcgtgataatgaaaaatgtgcagacattgccaaaagtcccttgggggcgtaaaatcacccctggttaagaaccactgctttgggccgggcgcggtgactcacgcctgtaatcccagcactttgggaggctgaggcaggagaatcgctggatcccgggaggcggaggtggcagtgagccgagatcctgctactgcactctagcctgggtgacacagcaagactggaaaaaaaaaaaaaagaaccactgcttttggaggatttggkgtatgatatacataaatatgctaaggacrgaaaactgtccctgagcaacagtgggggtctgggttgtaactgctgggttgatttacttaggttttccagagtgctgttaaatccaagtacagactaaagtaaaggtctttggcagagtcacctgttagaaggaggactggcagtgttgatctcattaatcggcgccatatgtgccagtgtcccttccaagggctggctgtaacttctaaccttttcacatatgtcttagacgttactgagctttcaaaattatgcttaagattctgttttttgtttttcttgtggcttgctttcagtttggagaacatttataaagagttgtctacagacatagaggattttgttcatcctggccatggagatttatctgggtgggccaagcaaggtaagccagcgactgctagattttttttttttttttttttttgagaccgagtctcactctgttgcccaggctagagtgcagtggtgcaatctcagcttactgcaacctctgcctcccaggttcaggcgattctcatgcctcagcctcctgagtagctgggaccacaggcatgagccaccatagctggctaattttttaatgtatttttagtagagacagggtttcaccatgttggccaggctggtctcgaactcctgacctcaggtgatccgcccgactcggcttcccaaagtgctgggattacaggcataagccaccacgcccagccccgactccattgttgatggtagtggctgctgccattatgccggctgcagcagggaagcacagcttgctacactggatcccatcaagcattggtttcatcatggatttagcycctgttgctgggtattgggctgatttgcctgagcctacatttaacctgtttctctcatgtgtataggtgttctccttctcaacgctgtcctcacggttcgtgcccatcaagccaactctcataaggagcgaggctgggagcagttcactgatgcagttgtgtcctggctaaatcagaactcgaatggccttgttttcttgctctggggctcttatgctcagaagaagggcagtgccattgatagggtatgttttgttttctttcttttttttcttttttttttaacactataaaaacaatgtaaagaattctaggagtccctgctgtgtttggtcctggaaaatccatgttataaaataacttttattttcccttaggcctgttataagggtttcccattgaaaactgagaagaatttggacaaattataggggtgatgagttgtgtatgaggaaagcaaagcaactggccaacttgtgactgaatgcagttggtgctgtaggcatgaacttggtgtctacaagatacaagtccctgggtaccattcacttaacaagtgatggatgaggcatgtttctggcttccaagaaatttgggracatatagaaaacacaaagaattccactcaatcacaaatttaacttgcccatgaaaatactatcagtgatcattattgtttkgtttctgggttttttgttttttgatggagtctcgctctgttgcccaggctgtagtgcagtggtatgatttkggctcactgcaacctccgcctgctgggtttaagtgattctgcctcagcctcccgagtagctgggactacaggcgcccgccaccacacccggctgatttttttttattttttagtagagacagggtttcaccatgttggccaggctggttttgaactcctgacctcaagcgatctgtcctcctcaacctccaaagtgctaggattacaggcatgagccaccacacccggcctatcggtgatcattattaaccccaaggtctaattgcagatacccaacacgaccaaaccagtggctcccctccctacatcttccccctatctgctacctccctctttcccttcactcactgaagcacttctacacctggttgtggaaatcagagacctaaaagtcatccttgaatcctccatcccatcagtaaatcccatcaactctgcctcccaaaacaccccagtctactgcttctcattcgccactgctgcccttcaggcatgagtcaccatcatctttctccaggagaaccgtgatggactagagatggaggcttgatggagagccgcagagtggaggagggagagatagggggtgggaaggagacgagccaggggtgtgttcatccctggcaaatgggagagacattgggtgggggagaaattatagagtaaatgcttcaatgatcgaaggcaagggcttagcagaggtaacctgacaatagtttttggtgtatcagcaggaggtaacgggggtatcagaaatgtgcacgtatatttaacccctaccttgtgtgggtactaggttgagcacttttgttttttgagatggagtctttctgtcacccaggctggagtgcagtggcatgatctcggctcactgcaacttcgcctcctgggttcaagcacttctcctgcctcagcctcctgagtagctaggattacagttgcctgccaccacacccagctaatattttttatttttagtagagactgggtttcaccatgttgacaaggctggtcttgaactcctgacctcaagcgatcctcccatcttggtctcccaaagtgctaggattacagatgtaagccaccgcacccgaccaggttgagtactttgcatgcagaatcttacttaactctcagaaaggctttgaggtaggcatacacttgtatgagtgacctaagatctgactggtatgaactgctaagatgtgatcatctaggtatgtaagaagtgtgcstgagagtaattgctaatctctatcccttagggaggtttacggccagtgttgctcttccgcagtatattggtaatctttaatcatggtttggtctgaaagtaaacagttgttaaagtagcttggtcattaaagccaaattgcatatctccagcccagtgtctcttctgatctatagagtgccttgttactactgccccatgaacatgccaaattcaacattttccaaacgaagtttctccttttctcatccatgcttcactaaacttcctcctctgcactccctagcagcaaaaagcaccatcatctgcccagttgtccagccagatmtattactgacacctgcctacctctctttctcccctcttctgtcctttttttccaccttcccagtcagtcagtcattcatatctgtgttctttcttccccctccaaatctacccctgcctgaccacctttgccttcattcaggccctcacctgatcttgcctggagggttctgatgctttctccctggaaggccttgccttaggctgaagatctgatttcaggggggtagrggggtggcccccaatcggcctcccagacttaactctatccctctttgcactccgatccctaggctgacccattcccctttactttttcacggtgccccacttccctgcctttgcatatcctgctttctctgcctacagtgtagaggtcattttcttctgggattctttagagctctgcagggctgacatttacaggggcctgtgctgcttgcgtgtgtgttcagcatttggtgtgcatgacttcttatcacactcagcccctgtgatcctcatttgattggtcacagtaacttcataagctgggcggtattgttattcccagtctacagatgaaaactgaagcagcttagagttgcagcaacttctctgtggtacagctactgagggtagaggtaggcctcgaccccgggcagtctggctccaggctctgtactcttaaccacactggattgcctggctttagtcctcacccctcatcgcccctcctggactgagccccttgaaggcaagagtgttttgagaaacagtgatttgttcgttagtttttatatacagaaaagaagaggaaaacaaaaatggtctatatctccctgttaaaataactatagttgatattttaaaaaaatcaaagtagtcatttgccacataatgatgtttcagtcataaactgtatatatgacgatggtcccataagattataatattctggccgggtgtggtggctcatacctgttatcccagcactttgggtggccgaggcgagtggattgtctgagctcaggagtttgagaccagcctgggcaacatagtgaaaccctgtctctactaaaatacaaaaaattagccaggtgtggcggcgtgtgcctgtagtcccagctacttgggaggcagaggttgcagttagctgagatcatgccactgcactccagcctggcaacagagtgagactctatctcaaaaaaaaaacatatatatatatacacatatatatatacgtatatatatatacacatatatatatacgtatatatatatatatgtgtatatatatatatacgtatatatatatgtgtatatatatatacgtatatatatgtgtatatatatatgttttttttttgagatagatatatgtatatatatatatacgtatatatatatgtgtatatatatatacgtatatatatgtatatatatgtgtatatatatatgtatatatatgtgtatatatatatatacgtatatatatatgtgtatatatatatatataaaaaatatttttactgcatcttttctatgtttagatacacaaatgcctaccattgtgtcacagttgcctatagtatttagtacagtaacatgctacacaggtttgtagaccaggagcaataagctacactatatagcctaggtgtgtagtggtaggttatcccatttgggtttgtgtaaagatgccctgtggtgtacggatagcagtgaaattgcctaacaacacacttctcagaatgcatccctgtcattaggtgatgtatgactattgctttttttcttttgaaacagggtctagctctgtcacccaggctggaatgcactggcttgatctcaactcactgcggcctcaacctcccaggctcaagcaatcctcccmccttagtcacctgagtagcagggaccacaggcgtgcgccaccacacctggctaatttttgtatttttttttgtggagacagggtttcaccacgttgcccaggctggctcttgaactcctggacttaaacgatcctcctgcctcggcctcccaaagtgctgggattacaggcgtgagctaccacacctggccactgactattcctcttttttttttttttttttttttttctgagacagtttcactcttgttgcccaggctggagtgcaatggcgtgatctcagttcactgcagcctccccctcctgggttcaagtgattctcctgcctcagcctcctgagtagctgggattacaggcatgtaccaccacatccagctaattttgtatttttagtagagacggagtttcttcatgttggtcaggctggtcttgaactcctgacctcaggtgatccacctacctcagcctcccaaagtgctgggattacaggtgtgagccaccacgcccggccaactattccatttttgtggcgagatttttttgtttttgtttttgttttttaattcttccttcttaggagctgtaagactattcagagagttcagaaaggcacaaaatggaaagtaaatggcttccactctttctcttaaaggaactactaaatacagtgtcttgggtatttttctaaagtttttaaaaaatgaaattattttgcattttgttcacttggtaaattttggaggtcatctcatcagtatatttatctttcgcatgtttttctaggagttatgtggttttacattgtaagaactttagaaaaatacatttagccrgttctgtaacactgaattgtatactaggttttagctgacataagcagtgtgtcagtccctttatatgtacctatttgtgtaggtacaactggtccctggcttatgaagtttgacctgatttttttcgactttacaatggtgtataaccatactttgagcactyacacgttgtttttttttctttctttaagagacagggtctcttggctgggagcagtggctcacgcctgtaatcccaacactttgagaggccagggtggcggatcacttgagctcaggggtttgagaacagcctgggcaacatagtgagaccttgtctctaaaaaacacaaaaaattagcctggtgtagtggcacgcacctgtggtcccaggtactcaggaggctgaggtgggagagtaacttgagcctaggaggtggaggctacagtgggccacagtcatgccactacactctagcctgggtgacagagtaagaccccatctcaaaaaataaaaaattaaaaaaaaagatcttgctctgtcacccaggctggagtgcagtggcacaattatagctttttgcagcctcgaactcctgggctcaagtgatcctgccacctcagtcttctgtgtagctaggactgcaggtgcatgccatcacacttggctaactttttaatttttttgtagagatggggtctcgctatgttgcctcagttggttgtaaactcttggtcccatgcagttgtcctaccttggcctcccaaagcactgggattacaggtgtaagccaccgtgactggccccgttctatttttcactttcagtacagtgttcaatgagttacatgaggtactaaacacttcattgtaaaagaagctttgttttgcccagctgtaggctaatgtaggtgttctgagcatgtttaaggtagggtaggttaagctatgatgtkcagcaggttatatgtcataaatatatcttcaacttaggatattttctacttaggatgggttttccaagatgttaaccccatccattgtgttaataagttgaggagtttatctgtgtgtgtatgcatcatggtgtcctttagcaaatacagtcttagcagtggaaattgctggcrgtatgatagggacacttgaaaattgcatagataattgccaacttgaaggcagagggtggtgctctttgcatctcagagcctagcaaaggtaggtagttgctcaacaaacggactaatgttctaatgcaaatgctgaatgctccactttggaagggggagaatttagagggcaaaggggaatcgcacagggtcttaaagtgcaacagccacagtccttcctttttgggraaaaaaaaaaaaagtcccggccgggcatggtggttcacgcctgtaatcccagcactttggggaggccaaggcgagcggatcacgaggtcaagagatcgagaccatcctggccaatatgatgaaaccccatctctactaaaaatacaaaaattagctgggtgtggtggcacgcgcctgtagtcccagctacttgggaagctgaggcaggagaatcgcttgaacccgggaggcggaggttgcagtgagtcgagatcacgccactgcagcaagactctgtctcaaaaaaaaaaaaaaaaawtttaaaaagtcccaaatctgccaccatttattcttgatctttttcagaagcggcaccatgtrctacagacggctcatccctcccctttgtcagtgtatagagggttctttggatgtagacacttttcaaagaccaatgagctgctgcagaagtctggcaagaagcccattgactggaaggagctgtgatcatcagctgaggggtggcctttgagaagctgctgttaacgtatttgccagttacgaagttccactgaaaattttcctattaattcttaagtactctgcataagggggraaagcttccagaaagcagccatgaaccaggctgtccaggaatggcagctgtatccaaccacaaacaacaaaggctaccctttgaccaaatgtctttctctgcaacatggcttcggcctaaaatatgcagaagacagatgaggtcaaatactcagttggctctctttatctcccttgcctttatggtgaaacaggggagatgtgcacctttcaggcacagccctagtttggcgcctgctgctccttggttttgcctggttagactttcagtgacagatgttggggtgtttttgcttagaaaggtccccttgtctcagccttgcagggcaggcatgccagtctctgccagttccactgcccccttgatctttgaaggagtcctcaggcccctcgcagcataaggatgttttgcaactttccagaatctggcccagaaattagggctcaatttcctgattgtagtagaggttaagattgctgtgagctttatcagataagagaccgagagaagtaagctgggtcttgttattccttgggtgttggtggaataagcagtggaatttgaacaaggaagaggagaaaagggaattttgtctttatggggtggggtgattttctcctagggttatgtccagttggggtttttaaggcagcacagactgccaagtactgttttttttaaccgactgaaatcactttgggatattttttcctgcaacactggaaagttttagttttttaagaagtactcatgcagatatatatatatatatttttcccagtcctttttttaagagacggtctttattgggtctgcacctccatccttgatcttgttagcaatgctgtttttgctgttagtcgggttagagttggctctacgcgaggtttgttaataaaagtttgttaaaagtttgttttgtgcaagtgtcctttgtgcgtccaggccagggcatccatggacgtccttgggctgccctttcccttggcgcctcccagggttcccatagcaaccaccgtctgcaggaggggccgcccttgcccctcctccccgccctgccgctcagtggaacggcccaaccctcccctggctgcggtgagcgctgggcccaacccccggcctggagcagcgccccaactccgagcaccgtggagcaccggctgccagctgagaccccagaggggtaactaacggcctgaggaaggcatttcttcggggaacatggcgtgcccgtcgtggctacgttctgccaagccctgtgacgttggaggggagccgcctgcatcccccgctcagccagtgtttctagactccgagacatctggaactcggaagtgaggccagggctccaggaagactccctgatgacgcactggcccgcagcccaggctcaggtagtgggggctgtcaggatgatctgtgggatcccccagtgtccgaagaaagaagccacaattgtgtttttttttctttctttctttttctttttttttttttgagcgagtctcactctgtcgctcaggctgaagtacagtggcgcgatctcggctcactgcaacctctgcctccaggggtcaagcaatcctcccacctcagcctcccaagtagctgggattacgagcatgcactaccacgcccggctaatttttgtacttttagtagagaaacttttaactaaatgggcaagaaagaatgcatccagccagaacctcgagactagcaaatgcatttcttaaaagggcagggagggagaccagagtttgcttgaaaatactgcttcctttccttatctatgtagggaagggtttatcattctacattttgtggtcagcaagctggctttcacgggaggaggatgcatggtcgatttgccctctggtaactttgggatcttcctctaaacaacagtggactcccttagccaaggaagaagtgaagggataattgtgcttacaccagttagcttttcacacttctctctctcccggtgcagcactgccggtagggggagcagtgagctccaagtttccaggaataattcaaaacacaattattttatattttaaaatataaaatgtatattttaaatatatatacatacatttctatataatatatacaaaagttcaatatacgtatattgaatatatatgtatataagttcaatatatatgtatgtatattcaatatatatgtatgtatatatgtatatatattcaatatatatgtgtatatattgaactttagtcatgtggtgacactttaaacagtacacagagcagcttctgggtccatgaccctccaaaaatttaattactgattctttagaaactaggcaactcagccaggtgtgggggctcacgcctgtaatcccagcactttgggtggccgaggtgggtggatcacctgaggtcgggagttcaagaccagcctgaccagcatggagaaaccctgtctccactaaaaatacaaaattagccaggcgtggtggcacatgcctgtaatcccagctacttgggaggctgaggcaggagaatcacttgaacccgggcgatcgcaccattgcactccagactgggcaacaagagcataagagcaaaactccgtctcaaaaaaaaaaaaaaaaaaaaccaaccaggcaactcattttgatgaactcttagctatgtggtagttgcttttttcatgtgtcaagtctgctatattcctgcactcagtgtgcaaagatgcataaaaggcagtcttagccttttaggtcagcggttggcaaactttctgtgaagggtcaggtggtaaatatttgagggtttgcagttacccgttctccgtgggaactgctcaacaactcactgcagagaaagcagccgtgggcaaaacgtacaggaacgggcgaggctgtgttccaataaaactttattatttatggacactgaaattagattttaatatgattttcatgtgtcacgaaatctttttttttcctaagcatttaacaaatgtaaaaaccactcctagcttgggagctattggaaaacaggcatctggaaccacagtctgcagacccctgtgtgtactcactgtcagtgcggtgggaacaaaaaggcagcaacggctgggtcagcccaggaaagaagacatttcccagtggagagaatgtctgagtggatattgaactttccaggccacaaagaggaacaagagcattcaacactgaggagcctgcctctgcaaaggcaggacccacatgctggatgtggagctggatggttccacgtggcaaggtttgggaggcttctgagaacctggcctaatgattcctgtttcctcccttttcaggtgagttagggagatctctgacagcttttggaattggtaacacaaggaagtcagttattagcaaatgttgtactggaaacgtccagttataaaataattaattgtgtgaaagtcactgcctgcttttgatctacatccagcaggggaaggtcagggactataaattgtttgcattttttaaagatagactttagcatgttgctagtatgcttgcattattagataatacatctctgttcaaattcactttctgcttcagtttgcttctcatataaaagtcttcgcaaatatgtttggtggagaagcaaactttttggcgtatgcgtgtggtgttggcttttcatccttgccaaaccttcaagatttgcaaggaaaaacaggttgcagggaggtgctctgggttactttgaaaagacctcacatgctgacttgtgctgactcaagctgaggaaagctagaacattcctctgctggagatggcctccttgtttagagtccttctgacactgtaatttgggtctgacaacaggaagttcctttgtagtttaagtcaatgggaaccaatttttttttcttttttttgcgatagagtctcactctgtttcttaagatggagtacagtgactcagtcatggctcactgcagcctcaacttcctgggttcaggtgatcctcctgcctcagcctcctgagcagctgggaccactggtatgcaccaccatacctggctaagtttttaatagaaatggggtcttgctaagttgcccaggctagggaaccagtttttaagtttttgaaatatgcttggaaatataaatattggtgagcggagcagaccaggagatcaataatttatgttctctgcttgttagttgtgtatatagcatgttcttttgtctctcttaatgatgtttggggtgagggtgtgggagaggaaggtagggagccttccaacaagaagctagtgctcctccagcctagagaagctaaaacatgcaaagccagaccccatccctggaaattctgatttaattggtgggggaaggcatgtgaattctcacagagggtccggtttgcagcaggactggtgatttctttccaggtgccttgttttgttagaccatgtggtcacttaataattttttttgggccaggtacagtggctcatacctgtaatcccagtgctttaggaggcaaggcaagaagatcgctttaggccaggagttcaagaccaacttgggcaacataatgagaccttgtctttaaaaaaaaaaaatttttttttttttaattagccaggggtggtgtgtgcctgtagttctagctacttgggaagctgaggcaggaggatcatttgagcccaggagttcgaggctgcagtgagctatgatcatgccactgcactccatccagcctgggcaacagagcaagatcctatttctaaaacaaaacaaaacaaaacaaaaaatgtaacttgatacctgtgactttctgaaactaacagctgtttgaagaaatatatttctattaccgttcttgtgtttgatggaaagagtttatgaataactttggtttcaagccttccaattatattctggaaaatacctgtgtcttaaagagatagtgtctagggagaactgaatcactgcagagttcttcacctgtatgtgtgggtatgtctagtctttttgcaagtaatgaatttcattagaaagatattaagtgcttgtcatgagcaagcccctgtgccagaaactcaatataaatcatttcattttctcacccatatggtgaagtagttgatgaggacactgaagctcagccatttgctcaaagtcatggctaatggagggaggattcaaacccacatcagcttgatttcaaagcctaatagtcctgccactgtcaacaccctgcctagatcatgattatttggaatcactgggaaagaatttttttttcatgaagttagaagcctaagaatttttttcaatggaattttataaaaatgtccttgaatcacagatggctctccctggaaacataggtttgtttgagagtcacctcttttattgtcttaataaatagactaagagccatcacaagggctactgtggctagagaacatatgactcgggccgggcattgtgcaggcatttgacctgcattccttcacccccggttcctgtaacatgtacctggtgctgtggggttacagctgataatgctgaggtttccagagcacatgcttccaagtccagtggagaaaatcccaagaagtccaatattcaatgactgttccttattgcaaaataagcccagaaacaaagtagctgtgaacaggctgcaccagccccagcagcaatttccatttaaaccattttgcacagatcccgtgctcagcgctctcgccagtttctccacttgctgtttagtaaggccatcattgttggcaggaagtgggttccaccttccctgttgcctgagcacaatgtgctcctatgtggtctccactttcctgctgcctagttggctgggcttctccagctgggccttggaggcgacctttgtcccacatgccagccctccccacgttgcagaacactatgtaactgcagcgtgtgctgaatttcctcttctgtgctcaaccctagcaagagccagtcaaccctgaatgagaatgtggcaatggagctgtttttttcttttatccccaagtcacaagaaattggaaacattccattaagtggcgtgatttgagagggtttcgccaaatcttttcaggggagagaagccaggtgacctgatagcgatcaccttcccattcacggttttcaatgggggcttgtttctcaaatgaccaacacctgtaggcagttaattttcagcatgtcacaggagggcccagatgactttctgcctactgcttacgacaacatggactttagatgcctcatggcttcaacagctaagaattatgaaataaagcgagttatgggattaaaaggcagatagcagaactctcccaggagtagccagggctgcacaagtggtttgacgtgggatctttctcatctttgccccgggttgttgctgctttgaaggttaagtgctccagggatatttttaaacagcaggggctgattaatctaaaagtgacatttgcagtccccagagtaagcagctagcaggcttagattcaggccctcagcaaacaaggaacctggaaaatgtaaccctgaatgcacggtggggaggacatggcaagagaaaagcggcaggaataaagtggtaagtcagctcgcccctccccggggtccggaccattctgccaacgtccaggtaaattcgaacccaatgtatagtgagagcagaccctgtctgaaggcatgcacttggggtccccggggaaaaacgactcccgtcatgtttgaaggaagctaatcagaagagctcgaaatgtaacgcagatgaaagagaagggcctttctttgcttctataaatggtggtgtggatccctggacatgctcccatataagttccacaacgttttataaacaattctgttttttgcctccaa

SEQ ID NO: 95775 - DNA, 39566 bp, Homo sapiens
  misc_feature (1)...(39566): n = A,T,C or G
cctcgcaaagtgttgggattacaggcatgagccaccactcctggccatagcagcattattcttaatggcaaaaagtggaaacaacccagatgcctatcaactgatgagtggaggaacagagtgtgatatatctgtacaatgaaagactattcagccatatgaaggaataaagttctgatccatgctacaacatggatgaaccttgcaaacattatgctaagtgaaagatgctagttacaaaaggccacagattgtaggattccacctacaggaaatattcagaaaaggcaaatccatagacaaagaaagtaaattactggttgccaggggctggggagaaggagaattgtggagtatctactaatagggatgaggtttctttctgtggtgatgaaaatattctggaatgagacagtggtaatggttgtacaatcttgtaaatataccaagaaccactgaattgcacactttaaagggggagttttatggtgcatgaattatatctcaataaacattgcataggaataataaacaccaaatcaggagagtctttacttcttgggttggggggtcagtcatggagggaaacaaaaaggtctttatattagcagtgttttattttgcaagctggatggtaggtacacaggtatttgttctgttaatttttatacctttctcagtggtttcataataaataaaatgtaaaagtatttactgggcatcaacctggattaggcactgggctacatgggtggtacaatgttgagtcaaaacagatccatcctgccaaaaagtaagtggatacataagtatataacaagtggagaagagggtctataagtaagttatctcccctttctaaccttctgtgtcctcacggatgaaatgagagccggactgggaacctgttagtagaaggtctctgaggatccctggagccttgaagtgtgtcttccctttttcagcccacacacctcaaacacgaccagggcacagaccctagagttggccctcgtgccatcaaccaccacaagagggcctaaggcaaagcccaacttcaattagtctgtttcttctcggtaaaataggcagagtaacttctccctcccaggatgactgtgggggtgtaaatgagataacacatataaagtgtcagggacaggcctagcatacagtaaatcctcaacacctgggacagtcctcactttgattccacaggcatttcctgagcagcaatgctggcccaggcctgtgctaggggctggaagacagaggaattccactctgaatggccaaagcagtggcccccagccaggtggggagatggcctcataaacaacagtatgaggcagggtgatatcactgctaaaaagagacagtagccatgtgcacagatgcagaccatgtgtgatgcagaccctggggctgacagagatgttccaatcaaaaggcacagtccagtggctgggtgcggtggctcccgcctgtaatcccagcactttgggaggctgaggcgggtggatcacaaggtcaggagatcgagaccatcctggctaacacggtgaaaccccatctctactaaaaatagaaaaaattaggcgggcgtggtggcaggcgcctgtagtcccagctactcgggaggctgaggtaggagaatggcatgaacacgggaggcggagcttgcagtgagccaagatggcgccactgcactctagcctgggctacaaagcaagactccatctcaaaaaaacaaaaacaaaaaaaacccacagtccagacttggagagaggccctcgcagggagaaaggcaagacacaaaattaagggattggcctccattcacagtgaagtacatccctgcataccttttttcacctaattcagacccaaatgttcccacaaaccccaagaacagaggatgaaattgattcaacagttagctttgggaagtctgagcccatggcatgtcccaaggtacatatgtgggaacaccatggctgacactgctgctgtgatctttggcaagtcaggatacctcttcaagccttcctttccccggctgtaaaatggaggctataaagatactgatgtgatagggaggtaagggaaagtgagataacgactgtaaagtcattagccaagtacctgacacttagcgaccagatcaataaagggtagttattgttaggaaaaaacagatttcactttgaaagtgaggaaagccaggcgcggtggctcacacctgtaatcccagcactttgggaggctgaggcaggcagatcacgaggtcaggagttcgagaccagcctggacagcaaggtgaaaccctgtctccactaaaaatacaaaaaattagctgggcatggtggcatgtgcctgtaatcccagctactcgggagactgaggcaggagaattgcctgaacccgggaggcagaggttgcagtgagccaagatcgtgccactgcactccagcctgggtgacagagagagactccatctcaaaaaaaaaaaaaagaaagaaagaaaaaaaataaaatgaggaaagtgggattcggagaggtgagatgacttctgcacagtcaggattcaaactcaggtctgagacaccagaggctcagggcaaatcatctccctctgctccggaatcttcagcaggttccctacagtccactacatggactccatccttgccagggagtgaggatccagcaaaggcctggggccaaaaagaccctgggcaagttccccaatcctatgtgtcttgatctgagatccccaagtgagcctgagaaggtctgtgaattcctccacgtagctgatgcaaaattttatactaatggatctcagacgagtctatagcctcaaaagtaacaaaccacagacttgacctgacttagcatggtttcttattcacccaatggagatacgatttctaccttgaaaggctgtgaagggattaaatgaggtaatttgtgagaagtacttgaaacatcctcagctttcattaaatgttggtttccttctctttctctctccccaaactatttccatcagttagcaaatattattgagcatctgccacgtggcaggcaccagtcaggtcctgggggtaaagtggtgaacaagacagacatggcccattttcatggggctcacattctagcagagggaaacagcaaacaaataaaagcaacaatttcagatatgaataactgctatgaagaaaatacaaggccgggcacggtggctcacgcctgtaatcccagcactttgagaggcagaggcggacggatcacaaggtcaggagtttgagaccagcctgatcaacatggtgaaaccctgtctctcctaaaaatacaaaaattagccgggcatggtggcacgtgcctgtaatcccagctactcaggagactgaggcaggagaattgtttgaacccaggagacagaggttgcagtgagccaagatcgcaccactgcactccagcctgggcaacagagtgagactccatctcaaaaaaaagaaaaggataacgtgatagacttatagggtggggcagcctccagggatgaaacatctgaatgaccaaaggagccagtcatgccaggattttggaggaaagcacccaggcagagagtgcagaaagggcaaacgctccctggaaagattcttagtcaagagtccttcactcccagtcctaccacaaactgggtcaccttgaacaagtcacgtaacttctgaggctcagctgccacatctacaaaatgggaataaagacatcttacctgccacattgtgagaggtttcaaccaaagggctgttaaggtctgggatcctccccaaatctcaccatagacacctgatactcatcacttggcacccgtcttggaagaggggaacctgcacagagaaccctgggtcatgcttttgatttttaatttcatgctgcactagaaatagcttcttttgttcctggttgacccaggagcctcttcctgccacctggggcctattctagttaacagctgcttatcccctcaggtacaaaagccaacgaggaaaggacatcaggaaacattgttctgggaataaccagacacctatctgccaccatctccccccatcccgtgaccacacacgggagactggaggactcagcctgtcctgtagtcagataatgtacatggtttatttaaagagtcaaaaggggccgggcgcagtggctaacgcctgtaatcctagcactctgggaggctggggcgggtggatcacctgagctcaagagtttcagaccaatctggccaacatggtgaaaccctgtctctaccaaaaatacaaaaattagccgggtgtggtggtggacgcctgtaatcccagctacttgggaggctgaggcaggagaattgcttgaacctgggaagtggaggttgcagtgagctgagatcgtgccactgcactccagcctgggcaacaacaacgaaaactccgtctcaaaaaaaaaaaaaaaaaaaaagagtcaaaaggatcttggtccctgggttgggccactgatttacgatcactaggagttctcactcctaaatttctttgatctgttcgcttcgctccatctccacagctgctgcactggctacagcctcatgatctcacatcttaactctctctgctttctctggcccatctccccacttccaaaccatttgtcacgctgtaaccagtgcctaacacacaaaactaaccatgtctttcccctgcttaaagcccttagctcctgttgctcagtggaactggcgtctgaggctacctctccaagcctaagcgcctaagtcctgttgcaaccctcaggcccttcctcattatccacaccaaactcctcagtgtctgtaaaacaagccgagcaaccctcagaattatatgccttcgctgctcgtttgttttgtttttaggacagggtctcacgctgtcacccaggcaggagtgctgcagcgtgatctcagctcacagcagcctccgtctccggggctcaagaattctcacgccgcagcctcccgagtagctgggattacaggcacgggccaacacacccggctaattcttgtatttctagtagagacggggtttcgccatgttgcccagcctggtctccaactcctgagctcaagtaatccacctgcctcggcctctcaaagtgctgggattacaggtctgagccactgcacccagccagcctttgctgcttttgttcctgcaatttggaacactgtccccatcccagcctctcacctctacccctacctccttcactacctataccttcctatccatccttcaagaccccaaaaaccatccctgattccttcagaaaggcagtttattgcctatcttatcagactgaaagcagtggctgtgtcttatttatggttaattccctagaagctggactgatacattccatttaactaaaattcgtatcaggtgcttcggactgcagacaagcctatcacaacccagaaggaagaaacagggaaggcacctgggggctgccaagcaatgaggtggggggtaggaatcatgaatccgcatatttttaaaaactgccccagatcctgatgtaaacggtacaagagagtctgagaaacacagggctcccctcaaacagtcctgacttcagcattcctggaaaaatgaaaatcctttccttttgcctctaatgctttccctgctggtatcccaggttaaaaaaaaatagataaaatcagggggatttttctgggacttggctgggctgggaaacaagcctgggttctaatacaggctcagcccctgacgtactatgggcccctgcccctccttggggcctccattaccacggccacccccacccttatcaattgtgtgcccctgaggtagtgactgtcccgctctgagcattagtttccccatcttccactagtcgtcgtcagctctgacgctctatgagctatgcatacccgtagctccccgccgaccccgatggtcccctcccctccttcccaaggtccatccgccagggtgcagccgacgcactcctaatgctaaggccgccctctcatcgaccgccccttcctggcctcgactcagcgccaaaggtatgggtctctgccccgcctgctctttaagcctagccggggcggtcagcgcaagcgcactgggtcgcatcgaggccccgccccctgagcctgggtagcggcgcgagggccgggagaaccgttcgcggaggaaaggcgaactagtaggttggggcggccacggcggccggcatgggtcacgtttcctcgggaggaacgatgtgagggaggggtctggcaagagattggaattccggaggccgggagaccttgtggctgaaacccttcgtaggagcggggcaactagtgtctagtgagggggttgggctggcgcgcactgatcccagactttccggatcttctgcctttagatcgggccggtgtcggggcatgtaggccagtgagactggagccagttagagctacaacggggagcgattagggccaaactttgtccagggtggaagcgagcgggcccgtgaagtggggccagcctgggcagccgaccgtgtcgttgcctcggggcctttccaggcactggcctaagtcctggcgataaagtgcgaccgatttccttgtgggcgttttgaggctttcggtgatctgacccgtctgtcattcattcttcattcattcatgtgatgaatgaatacagtactaagcgcggctaattactaggtagagaagtgatcaagacaaacactgttcctacggtacagggaaaagtgatgggctgtagaatgtagaagcccggggcggagaacagggacagcttccggaacgaaatcgcgagcccagatcaggagtggtggcgagagttccaaagagaagacagcacgtgccaagtcctggaagggggacagaggccaacatatcctggtcactgaagacacctgactctgaatctgtttcacgcccagggaagagatgacagtggccggggctaggctacaaactctggaaatggagataaataaaggaattcaaagtactatatacttaggcagcaaaatccataggatttggggagagtgagatgtaggaaacaagtactcaaggcttgggtacctgggtggggttcatcagaggagaagcagatttgtgggagacaacaacaaattctattctggttgtatggagactcgcaggaaaaaattggatattctagtttgaaggtaggaaagtattgctgtgaagatgtagatttgaatgtcatcagcaaaacataaataaagccaagggagggttgaggctgtagaatgagaaaaacaaagggcccacttagcaccttcatctgatttcttttctttctttctttttttctttttttttttttttgacagagctttgctcttgttgcccaggctggagtgcaatggcacgatctcggctcactacaacctccacctcctgggttcaagctattctcctgcctcagcctcccaagtagctcggattacaggcatgcgccaccaggcccggctaattttgtatttttagtagagatggggtttctccatgttggtgaggctggtctcgaactcccgacctcgggtgatccgcctgcctcggcctcacmaagtgctgggattacacgagtgagccaccacacctggcccatggtgattatctttatgtcttatcctcctccatatccccagtacctagtcaagggagtggcattaaatgcaaatcagtgtttgccaactaaataaaagcccaacagcaaacagatgttggaatttcagagttgtggaacgatgggggctcatggagggtttcattactctaatgtcaaggtaatgggttcttgtcctggctctgccactaggcttctgtgtgacctctgacaagtctcctcctacctataaagagagtacagccaaaaaatggtctcatgtatagagcttcaaacactgctgataaatttcacactgatttttctcttttaatccacacagcaatcttacttgaaagggaagtcggctgggcggggtggctcacgcctgtaatcccagcactttgggaggccgagagtgggggatcacgagatcgagaccatcctggctaacacggtgaaaccccgtctctactaaaaatacaaaaaattagccgggcatggtggcaggtgcctgtagtcccagctactcgggaggctgaggcaggagaatggcatgaacccaggaggcggagcttgcagtgagccgagatcgtgcggctgcactccagcctgggcgacagagccagactccgtcaaaaaaaaaaaaaaagaaagaaagagggagggagagagagagaaagaaagaaaaagaaggaaggaaggaaggaaagaaggagggaagggaaagggaaagggaaaaggaaggaaggaaagaagggaaagggagaagtcgtattattatggactcaaacccaggtctgtctgtctgtctgacttgaaccttgttctttactatgattgccctcatgtatgtctcactcaacagggatattatcaggaccctcttgagatcacatgcgcattctttcaaagcattgtgctgaggctggcagactttcataattggcctggcactggctctgtcatggggacagggggacagagctgaatgtgatggaggtttcctattattctctaactcccttcctggggaccactgagttgggcaaccatgttctgttaaatggcaacagggcagaacaaaattagtgactgtgtttccagatttttacccagatcttaaactcctgaggcctgctgaaaaatgaatgagtatcagggtgtgagtttgtacacctctgtatgtctctgggcaaccaatcagacaacttctcctattacattggacacttgggtttcagcaatttccatcttgctaatgtgatttctcaaaaatattttctgtcttttggtgctttgatgataaatgtccatatatggaatgtagtcatttcctgctactaagattccttctggtttgtataagggaggagttcaccttattcgcatttcatggtattccacaaagagctccctcccccttcccatgtaatttatttgagatctgctgacatgagttgttggagcttgaagggaattaataatgtactgcagtgactcctatcccaggaaaacttgttaaaaatacaaagcctcggctgggygtgatggctcacgcctgtaatcccagtactttgggaggtcgaggcgtgtggatcacaaggtcagaagatcaagatcatcctggctaacacggtgaaaccccgtctctactaaaatacaaaaaattagccaggcgtggtggtgtgtgcctgtaatcccagctactcagggaggctgaggcgggagaattacttgaacccaggaggcggaggttgcagtgagccaagatcgagccactgaactccagcctaggcgactgagtgagactccatatcaaaaaaaaaaaaatacaaagcctcaacccctccttcccmtcaggcctcttgcatcagagtctctgggatggggcccaggaatctgtattctttcccagctccccagaatgttcagccaggtttggaaactgatctatccgattcttcttgtttcacagttagggaatctgtagctctgggaagggaaggaacttgccccagtcacatctgatattagtgcttctttctccaatgaagagcctttaggctgggagtncagagacatgggttcaagtccaggctataccagtcatcacctcgggcaagtcatttcacctctccaagcctctgcttccttactgtgagaataatgccattgtgttgggaatcaaaagagagagtggcaatggaaatgctttgtcaagctttctattttgtgcacatggaagttgttaagagctagaaccagccagtgttcactcctgtataccacgctgttcccttccaacagaggtcagggtcctgctgtgttgggggtggccgccagccagtttcggtggttgctgggcttcaggccatctgttaccaactctcttctctccatcttttgcaggtgttgggatggccaccaactgggggagcctcttgcaggataaacagcagctagaggagctggcacggcaggccgtggaccgggmcctggctgagggagtattgctgaggacctcacaggagcccacttcctcggaggtaagcccctagctcctccccacagcattcaccatggcccactgtctggccccggccaggctgagggtcactcctttgcatcagggaccatatctcttttgccttattttttccagtaactaaaattgatctctagaagtagaaaataaaaaggcagtgtcctggagtaatcaaatttaaatatggggtttgaagtgtgacttaggcaaattacttaaccgctctcagctgcagtttcttcaggtgtaaaaatgggataataataggacctacctcactggtttggtaagagaattacaggatgattcatgtgaagcactttgcccagtgagctattactgaaaaccccataatcactctaccttctctgtaactggtttgtgatatatgctttcaagcctttctctgtgcatttatatacatagataggtatatatagaaatacgtcttttttaaaaaacaaattgtatcatatatattattctatgatatgtttttggttttttatttgtctgtcttagaactttctaatgccttctattagggtcatcttcattctgaggcatagtattccagatgtgggtgtatcacagtttagcttccctctactcatgtctatttaggtgatttctcattattttatgaccataaatagcattatagggaacatccatgcatatgtctgttggggcacctatgtgagtgtttctccaggttcaatacgtaaaagtagaactgctgagtccaaaccacacctttttaaaacctcatccttagggaagaaaaaaaaataaaaaaataaaatmttttttaatttggtgactaggtaagacattttcatggttcaaattcaaatggtacaagagtttaccctaatgcagcttgtgttttggtttcttgttgatcctttcagatggcttattcataacaagtaactaataacaagtaaatatattccttggggcctcgctctgttgcccaggctggagtgtagtggcacaatctyggctcactgcaacctcygcctcctgggttcaagcaattctcccacctcagcctcccaagtagctgggactacaggcatgtgccactacgcctggctaattttttttttttttttggtagggacagggtttcaccatrttgtccaggctggtctcaaactcctgacttcaagtgatccactggcctctgccccccaaaattgctgggattacaggtgtgaaccaccgtgcccagcctccttttgcccacttttttttctttaacttaacagtacaccttaagaccatattggtgactaaagagctgccaacatctcttctttttttagccagacccattcttttttgtctctgtgtgcccagaacctacacaggcctgatggagtccacactcagtaattgtttgctaaggcccaagtaaatgacaatgtctgtcacctaaggcaggctgatggtatggaatagaattgcttgggctgtgaacctagattttgtgaattacttgtatgaatctaaaatgaagcattttctcttccacgcttttgtttcttctgttaatcaataggtaccatgtgaagatccaacacttggtctttctgggaggttatggagcctagaaaaggcgtaatccacaatgagatttctaatccagaaaaaaagtcagaaagtgtacgtgtgtgtgtatgtgtgtgtgtgtgtgtgtgtgagagagagagagagagaatgattttactccaaatctttaccaaatgcctgctctatgccgggccattgtaggcactgaggacagagaggtgagtcagccagagccctagcctctggggctcctggtctagttagagaacataccacaaaacaaaattaaataacatcagctctatgaggaaacacaggcagtctgctacacaaagttaactatcatttattgagtatttagtatgtgccaggcattattctaaacactttggaatcactgactcctcaccacaacagagataaggaaaccgaagcccagagaggctaagtaacctacctgaggttatttaaatggtaaaataattggcagagccaggatgtgaacccaaggaatttggctcctgagtccatgctctgaacatccatgctttttttcctctcccaagatactatataggacagctggaagaaagagtagttcattatgattagatgattgagatggggggtggtatttgaactagaccttaaaagacaaatagggaaaaggaacagcatagcaaggacccaaaagtaggaaaaggcaaaaaaaaaaaaaaaatgttcaagagaatgcagctgaaatgcagggcgcataagtggatatagtgggaaagaaggcaggccagcgtcagacagccgcggggccttagctactgggtggaggaggagtatgaactttatcctgtagatcagagctgcaaactagccatatctaggctgagtatttggctcctgcagtgtttggggagttaatttgttttttacaataagtaatacgttcaaatacatttgaacagggcgcaaaattcaaaagggtattcagtacagagtaagtccccttcctccagccactgtttccctgaccaggggcaagcattgttaacagttgttttcaccagagtatttttaaaaagtcagagccaacatttaaaaaaaaaaatcatgaaattaaaacaaaaaatctagcaacccaacttgtcttgaaaaattatatcatctggcaactctggcctactttcctgcatggcaacaattggctagagcagagttctggctgccccctttagagaagatgcaagtacttctttttgccacaattcctatcactccctgttgcttcctggctacaaagcagaattttgtcatgcacgtgctataggtttttttaaatagtagaaaaatgtttctttttttttttttgagacagagtctcactctgtcgccaggctggagtgcagtggcacgatctcagctcactgcaacctctgcctcctgggttcaagcgattctcctgcctcagcctccagagcagctgggactacgggtgtgtgccaccacgcccagctaatttttgtatttttagtagagatggggtttcaccatgttggccaggatggtctcgatctcttgatcttgtgatctgcccgcctcggcctcccaaagtgctgggattacaggcatgagccaccgtgcccggccagtaatgtcattttatgttaatgtctctatcaaaagtgagaagactgtgtgtttcagcctttagcctgtagatagcagagaacagctataaactattgatcctaaattcaggagggcataatgagccctgggacagaggcagagggatgtcttagcagaaaaactctgagtttttgaggccaagatgagacttgttgggggcagcagagctctatgtgttcaagccaaggaaatgctcctgtagtcatcacatagctactcagggtattaggtcaccccttatgtaatctgcagtcattcccattctaactcataaaggcttcagactgaataaaccttattctcacaaatagccttcctcagttttatcttagatgctgaggccagggcagtggtacacacctgcagtctcagctactggggaggctgagacaggaggattgcttgagcccaggaatttgaggctatagtgcactatgatggcacctatgaatagccactgtattccagtctgggcaacatagtaagaccccactccaaaaaaaaaaaaaaaagatgctgagaagggtaatttagaaattatctaccaaaatttaaaatagatttacctgaattacttgatatttttacttttagaaatttagaatgtatggactttctcatatatgaaaatatctagaatgtatattctaggatacccattgaaacattaatggtaataggaaaataaagaaaccacctatatactagattcaataaattatggtatatcctaagagtagaataatatacagcaattaaaaataatgaaaatgctctatttgaacatataaggaaatatttaaaaagcacaatgtagtatagtttgctatgggggtgaaaaaaagagaaaatatatgtgtatacatatatatcaatacaaagatgactggaaggatgtgtgagacactagtctgtcatttgcctctggggaggagaactgggtggctggggcccagtcttttccccaggagactggaatgagagtgagacatacttctcactatatattcttatgtctcttttgaattttgtatcatgtatttgtattacctgttaaaaaaataataatattttggctgggcatggtggctcatgcctgtaatcccaacactttgggaggctgaggcaggcagatcacttgaggccaggtgtttgagaccagcctggacaacacagtgaaaccccatctctactaaaaatacaaaaattacctgggtgtggtggcacacacctgtagtctcagctacttgggaggctgaggcaggagaattgcttgaacccaggagatggaggttgcagtgagccgagattgtaccactgcactccagcctgggcaacagagtgagactctacctcaaaaaaaaaaatagtactttaaaaataaatatctaaataccaagttctaacaccgtaaacttataccaccataatgacaaactgatattaactcaaaggttaaactcaggaatgctttataatacaagtcacaagattttcttttcatctcttacccaagttctagttcagttgttggcagggatctcagaatgcacttttcccttctagaatcagtgtccttgatggtatttgggtttctcgtctatgataaagtccaaagaatgcggaatgcagctgaactctaggcctgttaacctgagtcaccatcactaacattggtggaaaaaacactcctggcttctactaagggaaccagagttcacttgtcctacccagtaaccaaatcaaaatcaaaaggcaaggaaactggagtgtgagctcctgatgcatggaagggcctgggcttgaacatcaaccagcaaggagcaggcttccatgtatgtatgtgtgtgttgtgtttagtaaccatcctggttcaaatcccagcaccccgttactagctgaatataattttggatctgttaactgttctggttcaaatcccagcaccagttcctagctgaatataattttggatctgttaacctctctttctcaggtcccgtctctgttaagtgtggataataatagtatcttcctcacagggctgaatgatgaatctatgtaaagtatttaaaatagtaccttgcacatagtaagtgctcaataacttgtgggtttctttttgttatttgcattttgcttttttgcttctctctcttcaatacgtagagataaactatcacagaatctggaagctctctgggttccactctcccccttccactctcccaaggtaaccactaatctacagttggtgtgtcctcagtaaatataggccagactttccatgggattccatttgcaggaagacaacccgttcacaggtgccctacccctgtcccattctctcttcttgatcacaggtggtgagctatgccccattcacgctcttcccctcactggtccccagtgccctgctggagcaagcctatgctgtgcagatggacttcaacctgctagtggatgctgtcagccagaacgctgccttcctggagcaaactctttccaggtaggggacagtgaagcatkgggggrccaggagctgccagagccaaggaactggaagattgcagagccgtgaggtgttactgtgtcagctgacttggtgggatagaggaaaggtacctccaaagaacaaaaagtcataggagtcaggaaagctggcttctaatcctggctcgaccagttatttatatggcctcaagccactccctttccttctctgggcctaaggtttcttcatctgaaaaatgaagagactggcttaaatccaagatccctttattgttgacattctgtaatccgtgacaccctactttgaagactgatatttccatttggaattaggggaagtcagcctggttttggaggaaaacagaggtagggaaggttattgggttaaagtcagattttctacttctcctaagcagcgacactttcttgtcacctcaggcctctcatctttggatgggatggggtacagactgggccacactcagggcatgaggaagcaacctctgaaatggttcagcccatccgcccttctctgtctctttcccttgatctttttttttttttcttcagattctggggcaatttcttaaaatttctttatttattttagaattaaatatatataggctgggcgcggtggctcaggcctgtaatcccagcactttgggaggccgaggtgggtggatcacttaaggtcaggagtttgagaccagcctggccaacatggtgaaaccccgtctctactaaaaatataaaaaaattagctgggtgtggtggcgggtgcctataatcccagctacttgggaggctgaggcaggagaatcgcttgaacccaggaggcagaggctgcagtaagccaagatcacgacactgtactccagcctgggcgacagagcgagactccatctcaaaaaaaaagaaataataatacatatatatatgtatatatattcattgtagaattaaatatctagaaatattatgtatttacatatacatgctagatgtgtatatactgtacaggttgagcatccctaatccaaaaatccaaaagctgaaatgctccaaaattcaaaacttgttgaacaccacatgactctaccagtggaaaacgccacgcctgatgtcatgtgacaggtgcagtcaaaacacagtcaaaagtttgtttcatgcacaaaattaattaaaatattgtataaaataatcttcaggctatgagtataaggtgtatatgaaacaaatgaattttgtgtttagacttgagtcccatccccaagatgtctcattacgtatatgcaaatcttccaaaatccgaaagacttctggtcccaagcatttcggataagggatatccaacctgtaattgcatgtctttgattaatttttcaacagaaattagacttttgttggagacaaaatcttttaaaaatgtgtgggtgaatatgagaaggggtcataatggtaagaagcttggaaaccattgacttgtagccaaaaacccaatgagtcatgaatgtatgaatctgcccaccaccttgcccctgagctgtttcttggaatgggcccagctttgtacctgcaatcctggattgtgggaaacatgagcagcctggcttataaccctaatgatgcaattatgaaggagacttgcagctcatctttgcaacccctgccttctctgttcctctctcctctcatacacatataaaccctagttcctaagggagaagagccccctacaaaacatgaaggggagcacctcttcagaaaaaggaaagtgtgtctcaacttccttggaggctgaagcccagctgggactctcctcctaaccaagggctggcatgagagagctcacccttgggagagagctggctgaggagcagaggaacttcagggcaggcctgggctacttggcttccccccactggtctgctgtgacgtttctgtaacaaggtgattcaggcttgagcaggtgtgcagaatccaccctgaatctcaaagggcagtaagtgtgatgttaatcacctgtggattccttcttactgtggctcttgttgagacttcagaaaaccatactggataggcccctaacacatgtcacatgtcatggcagtacactgagctgtgacgatgagcctgcatagacacagccattaccttcatgaggtttatagtcaaacaggagagatgacactaatcatcacacaaagaaaatgtaaaattgcaactgcagtcagtgctgtaaaggagtggttcttagttctatgagaacacatagtagggggatctgactcagatagggaaggcttccctgaggaaatcacatcatatgaggactagttgaagaagaaacaaacaaacaaaaaaaacccaggatatttagcttgggtcagaaaaatcttattggtgcacagggcataactgctgtcttctaatctccaagggctgctgtggaggaggaggagaaggctcaccctgggaggtcgcagagggtaggaaaagctatggagagttagtattaggtcaaccagaaggcttgccaaccatcagagctattcaagtagaatagatacatcatgtcattttctagctcttcttcggtgcagtatgttcaattctttgaatgtaatatcttattggctttttaccacaactctatgatataaatataattatattctccattttaaagatcagcaaactgagacacagagaggtgaaatgattccctgaggttgcctactagtgagtggtagagctaggatttgaacccaggtctagagttggattcttagccactgttctctaccacattggggcggacattcaagttttggccagtagactcagagaggattcaggagtcaatgactgaggatgggactccttgaaattttaggtccaattaagcctgcaaaatgttctctgtttcttcctccagcaccatcaaacaggatgactttaccgctcgtctctttgacatccacaagcaagtcctaaaagagggcattgcccaggtaaccattcccagccctactccagtctgtaacctgtccctcccatctctgtttgttttctgttttgcttgaagaatttggtccaggccctcagctcatgggaatctgcctctcactggtcctcactgggtttatcccagtgaccaattctaggatgaccagaagaatgattccactgggcttgggagtgtttgctggtacctctaatctctgtgtagagttcatggtacctgtgtgctctgtggctaggtcctcagagtcagtccctgggcaggtactgtcagccttcagttttccccacagactgtgttcctgggcctgaatcgctcagactacatgttccagcgcagcgcagatggctccccagccctgaaacagatcgaaatcaacaccatctctgccagctttgggggcctggcctcccggaccccagctgtgcaccggtgggtcccctgggcagcccccggcatacctgtggggtgacatgctgatgggtgtacagtcactggctaggccagggaactccagctatgattgtgctttcctgggccccgggtcacatgttgcccctggccaccccgacagcagtttccacttgtaatgagatccttggtatgtcagggagaaaaaggacctcatagctcatctagtcctgtccctccattgtacaggcagagggaacaatatcttgagagccccagagagaggaatgcagggacttctgtctgggggctgggcctggtagcatccatttctagccagcagtgatgctccaggttgcaatgattttagatggtctgcagcaggattccagacagcacctggaggcccagagtaaggggctccagctcactgggacactagggtaggttggggtggggacagaggctctcaggtctcctccaggcatatacaccaggggccaaggttagggcagcccagcatattccaacctgaagtggatcttmcaggaatgtgatgggaggatgctttttagtgctcagctgattctcagagtcatgttgctgtatatatgaggtcatgggcagaggggtcttccaggtccatccaattactgaacagccatctctcttccaacagacatgttctcagtgtcctgagtaagaccaaagaagctggcaagatcctctctaataatcccagcaagggacyggccctgggaattgccaaagcctgggagctctacggctcacccaagtaagggtgtgaaaaggtagcaggaggatcctgctttagtttcagcattcatgggtttagcaacttcttttcttgccagccatcattagagaataaggggatttttctaggaatagaaacttatacctttacatgccaaaattattttaaggtttccttcttaaataacagatgctgactatgatttaactttttcttattgagtggaggtcatcattatgactgtcaacaattgcagcttgctgtaatacagtagtgctacctagggttagagaggcacgcaaggctgtttgcctgcgctaatagctctgactgctaggctttaagttcttagtcatttccttttttttttttttttgagacagagtctcactctctcacccaggctggagtgcagtggtacaatcttggcttacttcaacctccacctcccgggttcaagcaattcttctgcctcagcctcctgagtagctgggatttcaggcgcatgctgccacacctggctaatttttgtatttttagtagagacggggtttcaccatgttggtcatgctggtctcgaactcctgacctcgtgatccgcccaccttggcctcccaaagtgctgggattacaggcatgagccactgcacccggcctctcattcattttcttcatagttttcttgtctgtttcccaattctcagctcttacttttgactgctgttggtatgcttgaatttggaatcctccaccccccatgcccatgcctcccttctgatttgctgtggtttgggaaaacaaatgatccagattgttatgattgggtctgaagagtgtgagggcctcttggatgagtaaatgcataagctttgactacgaaattttatggtatcctttttaactgcttagaggcattttttgctttcttcctatttctcaagtgaagatgttaggtaagtgattttcagatcatcgaggggccgctatactaacagttattgcaatgttaatatagcattaatagtccttaatgtacacttactagtgctacaccttgtgctaagctctgtacatacaggatctcattgaattctcataataagctctctgaggtcaatactgttcaactccctcattttacagatgaggaaactgaggttctgagaaacgaagtgaattgttaaggctaagtgatgagttggtggcagatcccaaagtctacctccctctaaaacctccactcttaatcatgctcttacctccaagggagcctctctgtccttgctaagcctcactaagcccaaagaaacctcagactgtaagcatttagaagtcatcagacaaatattctttcaagtatattggctaggttgtattttaagagagtgaagccaggggatgggtcagctggggaactgctgacagacaaatgctgcagagggttttgcctgccagcctgtcagtaacgtggacagaaaatacttgtgtgtccaaaattaggcactggtaggtaggagttatgtggcacctgagccagaactggcttcccccattgtgagagtgagataggttcttctgctgacatagcacatgaccttggcaagttagttcttctctgagcttcagtttcctcatttgtaaaataggagtaataataatacctaaaggggtgttagtgagaattaaatgagatcayggatctgaaaaatgtttttaaaaatctgtgtggatcattatgtggtactttcaataataataataggccgggtgcagtggctcacacctctaatcccagcactttgggagaccgaggcgggtggatcatcagaggtcaggagttcaaggccagcctggccaacatggtgaaaccttgtctctactaaaaaatacaaaaattagccaggcatggtggcaggcacctgtagtcccagctacttgggatgctgaggcaggagaatcacttgaacccgggaggtggaagttgcagtggccaagatcaccccactgcactccagcctgggcgacagagcgagactccatctcaaaaaaaaaaaaaacaaaaaacaaacccaaataataataataatagctatcatttgacaagtattagttttaattcatacaacagcaaactgaggctaagagagtttgaataacttgcccaaagttacacaaccggtaagtatagaattcatctgcctctaaagcctatgttctctctacttccctattctgcctttaagagatatggttccacagtattgactgaaaaactgcattggtagagcagattaattttcgtcaattatctcatgatttttaaaatttcttaaaaatggaagcctgcaaaatgacttacaatttcaatttagacaaactctcaaagcatagggcctgtggttagaatgagtagaataagaaaaggggactactggtgataaaagtttgggaactgtgatctttttaacaccaatttttttctttttttttgagacagagtttcgtttttgttgcccaggctggagtgcaatggcacgatctcggctcactacatcctccaccttccaggttcaagggattttcctgccttagcctcccaagtaactgggattacaggtgcccaccaccacgcctggctaattttgtatttttagtagaaacggggtttctccatgttggtcaggctggtctcaaactcccgacctcaggcaatccgcccgcctcggcctcttaaagtgctgggactataggcgtgagctaccatgcccagccataacactcttattttatagatgggaaaaccagggcccaaggaacgaaattgccttacccaagtcaattaccaagacacactacaagtcactggcagagcctggactacctacgactcaggggtcctcacccccagcccgcatgcgtccttagctgacaactttcctactaggaaacagactgctgagaactgctcagaactgaaggcaggagaggtcaaatatgttttctgagcccagctctgattgtttagcagttggcaggctgacttaattagctggggcgtgcagttcctctttaacctccagctgccagccttcctcctccgcctctttttggaggtgggccagcctgggccaactgcctccctcccacacacaccctcacccatgagcgggacagtttaggctgcaaagtgaagagcaaagccattggcccttaggactctctcagggcaagatgacttgtgagagcaccacttttagtttgtctctcaggcacccaactcaaagccaagactcagcttaacatcacatctgacctcatgagatttcaggcaaaccaggagaggggacttactaagacctatattttggctaagcagaaaggagtcaggcaaacagagtttagactaagaggttcagccaaggtcaggagaagcagagatagacaagagaggctaagcagaggaggtcagggaatacacacttagaatcctaagccaaagcctagggttccatgggtctcaggaagaagccacagacacaaagcagtacagtcacagcaaaaatggagtttggaggctgagcgcagtggctcacacctgtaatgctaacactttgggaggccgaggcgggcagatcacctgaggtcaggagttcgagcccagcctggccaacatggtgaaaccccatctctactcaaactacaaaaattagccggcgggggtggtgcacacctgaaatcccagctacccgggaggctgaagcaggagaatcgctggaacccagggggtggaggttgcagtgagcctagattgtgccactgcactccagcctgggcaacagggggagactccgtctcaaaaaaataaataaaataaaatgtaaaagaaaaaaaatgcagtttggtactgctgagcattagccctaggaatctcttaggggactggacctatctttgacaacggaaatatgttagctggcagccaaacagatagttccctggcataagcttttccctgagccctcaagcccctgcctctttaagaaatacatgaataatcagagaggaagaagccacataagccctagtgatctcattaatactatgagatcaaatgtggccctgtgtacattataggaatcttgggagggcccaggagataatgtcgttgtttgtagttggccctgtgggtttctgtagggttccatcttgtgtaagaaccacattcctttattgtatcctttacaatctagtaatagagccattagccccggaccccctgcattgttcttttacaaaatgttcctcaatactcccacttgtttattcttccagaaagattttagaattatgttaagttctaagaaaaagtcctcttgggtttttgagatggttttaaatctaaattttaatttgcacagaaattcatcaacccatgacatcattacaatatttcatctgcccactggagaagggtcagaggcatcttcatttttgaagttttctattttcaggaaatcatatgtgatagcatcaggtgtctatgcctgaggtaatctcaaggttcctgagagagggaacatctgttctttcagggaagcggtgttcttattcttattccaggaggtggggcggtatgggggttgaggggagaaacaaaagaagaacaagttctatagtagcctygggccacctgtgctctttccccagtgctctggtgctactgattgctcaagagaaggaaagaaacatatttgaccagcgtgccatagagaatgagctactggccaggtaagtaaaggaagggggacttctaggtgtggctccaggattaggggtggggcactcagaacatagcatccattccctctggctcttgcccatttttcccaggaacatccatgtgatccgacgaacatttgaagatatctctgaaaaggggtctctggaccaagaccgaaggckgtttgtgtaagcattcccaagaatccagtggaaggctggtttatgaaactcatcctgccaccctcttccccaaaatgattctttcttctgggagatgtgatggcttgcttccttctctcataattcctgaaatatctcatcctcccaggaaattttggagaaagccagccacgctgtgcttctatcagagctgttgacattctggatcagggtctccttagagatcatcttagttttcatatgccctaagttcccaaaagttttcttgcctctcctagtaaggtgaggtcaggcctgagaagctgagctgggcagtcagggaggaagaggagcagctggctcatgctgtgattggtctggatgccactgtctgagctcgagcctggatttgtgttccaagccaagccttatccttttctctaggggccaccaccaggtagatttggtgctacatatttgggtagcattgcagcacatatatttagacctagacctttgtgattgttaaaattaaaactgtccatggaatttcacaataccactcactgtttttcaaaatgtgcttttatcataactaaacaaagtagttaatttacttttcagataaactagacaatatcaaataggtcaaagaaaaggaaaagacatttaaaaagcctgtgtcttaatcagactcatcattttacatgtttgcgttttcaccttcacccctgccattaaaaattttttcaktctggtttcagctgctttaagcagtggaaatataaagtgtgttttactacacatggcagtatgattctgctgctcggtaatttcgagccaacatttgtatgcatttaccaaatttgattctagtgaccttcttgttccttctggccttcttagaatgactctaaatctggcatattctaaagtattctgtatggcacacctccctgttttcagtggaagccctggtagtgtggatatctactttcactggttccagtgaacccctgaccaggctcccactgtgggctgaattttgaaaaagccaaattcatcttgatgcaccctgaaatagattgaaccactgaacaaatcagttataatttaacacagcagccttctccatcctgtgttccagggatggccaggaaattgctgtggtttacttccgggatggctacatgcctcgtcagtacagtctacaggttggtattttctgtgagaccattctttgcctcctgggacccacaagagctccacagagacccaattcaggcttataacaacctgggttttcygagtcctcacttcacttctttctcagggagcttgctgctagaacctcctatcctccctcaagccttttgctacctatcactctacacagtcttctagaatttgaatcctcaggaatccacagagcttcagmcatttacactgtttccagagatgtgctggcaaatgtttaacaacaatcagctctcactggttgatataagccagttccagcatactgctgaccattttttttcctgccaactcttacctttcctttatctgaatcagaaagttttatcatctcctcattcatgttaatgacagttatatcacctcattttgctatcctaccatgtagtttcattagtttccacatccattatttcatttaaccctcacaaccactcggtgaggcatataattatccccattatacrgatggagaaactaacgtttagagagatggagaggcttctctaaggccctacaggaagttcccaggttttctgactttcaggccgatggtattcccattcttctcctctgctcctaacatccacatcatggagaggctaagaagctctgctctcagctgggagatgataaaggaggaaataagtttagaaataccatgggcagtgagctggaggtcatgagcttgactgcctctgtgtgatgatgggcaagttcctgaccctttctaggtctgtttctatgagcggggggagctacactagaaaactgagggggctccttctaggtctgtaattcatctaggactccccccgagggttgagctccacatgaggaggctctatagaggtggtatctcgatagaacatccttttctttagataggtggttagcagtggtggcaacttgctgactacaggagagataaactgtctattagaaaaataggtctaggccgggcacggtggttcacgcctataatcccagcactttgggaggccaaggcaggtggattacctgaggtcaggagttcaagaccagcctggccaacatggtgaaaccccgtctctactaaaaatacaaaaattagccgggcgtggtggcatacccctgtaatcccagctactcaggacgctgaggcaggagaattgcttgagcccgggaggcagaggttgcagtaagttgagatcatgccactgcactccagcctggctgacagagcgagactctgtctcaaaaaaaaaaaaaagaaatgggtctagatttcaaaacacgacaaagaaaacttagaagagtttgagataacaaggaaggaaagtagtgtttaaagaggtagacttttttttttttttgagacagagttttgctcttgttgaccaggctggagtacagtggtgcgatctcggctcactgcaacctttgacttccagtttcaagcgattctcctgcctcggcctcctgagtagctgggattacaggcacccaccaccacacccagctaatttttgtatttttaatagagacagggtttcaccatgttggccaggctggtctcgaactcctgaccttacgatccacccaccttggcctcccaaagtgctgggattacaggtgttagccaccacacctggccaagaggtagacatttttagggaactgagcagctcagagcaggtttagacatggagagagatctagaaggcttagtgacttactagatgaccctgggcaagtccttgcttatctttggttttgctttcctgcttctaccataatggggtatttctctgggtttatttctgatgttctggtcacgtgtgattctgcgtggaatgccagactagtagttgggttcctggggttattgatgaagatcaggtcaaggtgctacaggtggaccagtagtatcaaaggaaggacagcattgggtgggggtcacaggagagacctgatcctgctgtgtgcagtttgcagtggtctggagccaaggacagactgtctccccattgcatgagaatgggaaccagagttgggaggcatgatcccctgctgtttccttgccttttataccctcagctcttgtggtaataaaccattcatcctgtgatcatccacttgagacctgtgttcatattattctcttagcctgagtatcccttccctattgagtctcacttgtcaggctctacctgtccttcagaaccccactcaaatttcaacttattcagcaacaacaacaaatatttattgagcaactacaaagtgccaggaactgtgttagacactggagatacaacagaaaatgaggaaaatgataagagccctgtgctatggagctcacagtctggtcagagaaatgggcatcagaaagtaaacaaaaatatggccatttactgtggctcgtacctgtaatcccagcactttgggaggcctaggtaggtggattgcatgagctcaggagttcaagaccagcctgggcaacatggcaaaaccccatctctacaaataatacaaaaattagctgggtgtgktggcrtgcacctgtagtcccagctacttgggaggctgaggagggaggatcacttgagcccaggaggtagaagttgcagtgagccaagattgcgctgttgcactccagtctgggtgacagagcaagacccacgtctcaaaagaaaaaaaaagtaaacaaaaataggaaaaaaaaattgggatttgtgtgtgtatgtttgtgtgcgtgtgcgtgtatgtgtgcatgtgtgtgttttagtctcaggtaactgctttcaatgaaacaactgggtaaaaagagaattatgggaaatccacattaaatagagtggacagggaagccttctctgaaaaggtgacattgagctgagatgtaaggatggtaaggatccagctatgcatgggaaaagccgaaaggaagggggtttcaggttgagggaaaagcagtgcaggccctgaggagggaaagagctttgtgatttgaggaatgacaggcctgtgtgrgtagaatggcagagactaggagtcagggatggtacaaggttgaaaaagtagacaggagccagctcctgaaggatcttgaaggccatggtagggagtatggaacacagtgggaagctgagcacgtagacaaatgttctacccttacaccttctattgtttcccacagattgggggattcttgcctttgcaggggctcacagtctggcacaatgatacataactacaacatatcacacctggctcacaaggatgttagaatgatcctgggtgataatgagggtgaagatacaaatcatgatacctggcacctaatggatggatgttcagtaaacgtcagctgaagtaaaataaagtcgaattccttttgtcttcttccctctgcagaattgggaagcaygtctactgctggagaggtcacatgctgccaagtgcccagacattgccacccagctggctgggactaagaaggtgcagcaggagctaagcaggcygggcatgctggagatgttgctccctggccagyctgaggctgtggccygcctccgcgccacctttgctggcctctactcactggatgtggtacgtgggcagcctgtttctcctaccacaggcctcctaggtggcagagacctacagcccaatgtgttggggagggtggagctggcattgtgacaaggggaaggtggagctggcaaggttggtgatgctctggagaacccctagaactctgagcagaagggcagcctcataatggaaggatgggggctggaatccattgtaagctccctcagcaaaggtagagatgaggatggcaaccagagggaagggactaaggcaggtggcaagaattgagaagtgtatcaggctgcctgctgcagagccctgagctgttgctaaagaaaggcctgttctcattgcatcggctgctgcagggggtttgttgggagtgtcatccagatagtagcatcctgcctgaaggaatttgtggctgttctccctcctgctcttcctctgatgctgctctgcataaccagctggacctaagcttcttgcctctttagcctttaaacttttgataactgctttctgcctcctgccagggtgaagaaggggaccaggccatcgccgaggcccttgctgcccctagccggtttgtgctaaagccccagagagagggtggaggtaggtggatctccctttgcagggctcctcaatgagagggactagcaggctgtggccagtgctcattggcacttactctgggcacagtcccgggcatgggggaaactattggaactgacacaggccacatgttggacagtgtcccctaagaccctgtgaccaagtccgggagcacaggggaatctgattaaccagcattgaagggtttggacaagttttacctgaggtgcctgtgggtagattgttgggaagtagagtagggtcatattaggagactggagagaatacatgtctgttttcctttctagtttgaaactccttgaggtcaggggtcatgtctgcctctccagaggagaggatttttttaatctttgtcttaagaggtgggtaggaatttcccaggtggaaaggaggaagagtgttccatacaaaagggacaacctcaagccaaggcaccgggccatgaaagtgtgagatgtttggaggttaatgagaaactggtgaggctggagggggagctgggaggggacagggatttaggctggaaaaatggtttgcatcctgattataaagggccttgaatatatactgagaaattggattttatcttaagggcagtgggaagccattagggagttttaagccaggaagggacacattgatccaggactcaagtggttagcagtggtgggaacttgcaaaacttacagtttctgcattgtagaagatgtcctggaatgaggggagacactggaagcagaaagaccgtggaagaggctgatacarttgttcagaagagcaacgtagaggcctgggctagggctatgactatggggccaactggagagacatgtcctagatagtgagagggtagtggaagggaggagttaaatatgactcaggggtaccttttgcctgattgggagtaggaaggtccaggaggggcaggttcaggcagaagtaataagttctgcttggacaagttgagtttgtttgggggccagtcatatgatgtctaagcagggagcctgcattaaatatttggaagttaacaattttttttttttttttgagacggattctcgctctgtcaccaggctggagtgcagtggcatgatcttggctcactgcaaccactgcctcccaggttcaagcgattctcctgcctcagcctcctgagtagctgggactacaggtgtgcgccaccacacccagctaatttttgtatttttagtagagatggggtttcatcatattggccaggatggtctcaatctcttgacctcatgatctgcctgcctcggcctcccaaagtgctgggattacaggcgtgagccaccatgcccggccggaagttaacaatttttagggtatagatggagactcaggaataggagagatctccttgggaaaatgtacatgggggagagagcaagcgtggaggaccaattcccctgggaccccagcatttaagagaaggagccagcaatggagcttgagaaggaacagctgtaggtaggaggagaaccagggcagaacagtgtagtggaagatgtgttcactgcatgagtaagggctctcctgtcaaagtgagcttccctcctgagaagccagatatgccctggcttcactgagcgggtgccaggaactgaggctgctgacttgcccatgtggccccaaaagtgagggcatgggatggaggaggtaggcagagggtccagggtgactggccagtttcattgcaggtaacaacctatatggggaggaaatggtacaggccctgaaacagctgaaggacagtgaggagagggcctcctacatcctcatggagaagatcgaacctgagccttttgagaattgcctgctacggcctggcagccctgcccgagtggtccagtgcatttcagagctgggcatctttggggtctatgtcaggtgagccaatcaggagaagctctttccactacctgcttgcaagagtgccagccaagtgagccagcctagaggggaacactggaaagagtcaggaatcctgggcttcggtgccagctctgccaatcactagctttattacctgtttctttatctattaaatgaggccaaggacccaagacctgcccacctyaccagggtatcagatgaagccctgatgagaagtcctttgcaaccgtgaaggaaactccaaatagcaccaagaggactcagaacacatggtttgacaacctaggactagaaggagactccagagaggcatagagactctaaaatcctagcactttcttggtatagacagttacccaggtactgctcagctgggtccagggaaggtcctgggtttggggctgagtccaggtgatgtgtgtcccctgcctccatttctataggcaggaaaagacactcgtgatgaacaagcacgtggggcatctacttcgaaccaaagccatcgagcatgcagatggtggtgtggcagcggkagtggcagtcctggamaacccataccctgtgtgagggcacaaccaggccacgggaccttctatcctctgtatttgtcattcctctcctagccctcctgaggggtatcctcctaaagacctccaaagtttttatggaagggtaaatactggtaccttcccccagctttccatytgaggaccagaaaagttgtgtctcccttagatgagatctagacgcccccaaatccttgagatgtgggtatagctcagggtaagctgctytgaggtaaaggtccatgaaccctgccccactcctgtcagcccctyatcagccttttcagcaggttccagtgcctgacttgggataggactgagtggtaggaggagggggagtggaggggcatagcctttccctaattctgccttaaataaaactgcattgctgattcagtgatgattccttacttcgtgcatagaggggaggcgggagctgtaatctacgttagcccacttaagatgtattagagcagggaagtgactggtctgtaatcagggtccccctagaccagtctctacaggtggaaccctgaagtttcaatccttagccacccactaatgctcttactggatcacagggaggaatgagagtccctggcaggagcccaggagggaaggcaaccaagatgggacatacataacagttgtgaactggcttcagtcactttcctgcttagctcaggggcttgtcaaaggccctgtcagtgaagcctccttcgctctgcccaaaccaaaagttctagaaggaagatattggggatagtcctaggaaatacccctcccttcccatctgccacacaaatcagagccactaatgaatatacagcctcagggcacagatacctaagaaaacaagtcaccacttcttgagatcacaggctttattcctacaaccacagggcttgagcctgactggggcaagaaaacagagtttcatctgagaatgtctcttatgggctgggttctgttcaggggagggtgggaacagaggacaaggaagacaagctcctctggccctaggaacaaaacacatttactccttcaaagaagcagatgatctgaataccctctggagactgaatctgcccatacagcccctggagccaatgggcagacagtactggcatctggcacaaaagggaattcagacccagaacagaagcagcaaaatattttaaaaatagtaaattgttcctggactcacaaatcattgtttttaagggcaagtgcatgcccaatataagtactggggcttcctaagagagctgacataggattacacagctgcctccctgcttcagtggaggccctcacatcccctttgaacacttaacttgggtaggagaggtagccttttcgtctctgttctgggttctgagagctctgcagtctggaggcacagcagactgaggctgacctgggccctgtcctttctgcctggcagtcacaggatgttgtctctacctggagacaaagctggtttccggtcccagacagctggtcaagggagggtagtgtgggtcaacactggccctcagcactcctgagggggcaaagaggatgggcaaagtttggagcaggaggaatcctaggtaaaggtcaggatcatgttcactggatggtcaggcagcggtggctgaagaggtgactgatgacagatgggtcagccacagtagacatgtccccgaggtcatggtcattctgagcaatcttccgaagcactcgcctcatgattttccctggggaaccacagacctctagttacttggtgaaagcactgacccaccctagccctgccaaaggctttcatccacgcacaccccaccaccaccaggcctcagcccatcccaatccatggaggcctctgaacatacctgagcgggttttaggcaagccaggtgcattctggatgtagtctggtgtggcaatggggccaatcttttctctaactgtaaccaacaaatcatcaagcatttcttcagcacccttagccagacttttcaaaaatcaaagtagagatggctttgttccccacctgtttcctcctcaagtccctgcccacagagacagcctcaggttcactgcttctcttgctctcaacacacttgtctctttactctctcattttatcttatggaactcaggctgtagaatgagcctgctagagtttaaatgccacctttctagcagtgtggccttgggcaagtgatttaacttccatgagtctcagtttcatcatctttagcatgaaggtaacaataagatctgtttcatggaggtgactctagggattaagtggggtaattcatttaaagcacttagcctagcggtggcacaaagtattctagaaatgttggctattattattatcctagtgggagactagtggagactgaacaggaagagggcaatcagcccatggggccccctggaatctgtttgtggtttggggagcagcttgctctagcccctccccaacaacttgcagtgataactgggcctccaagacagaccctatagtccctgcccagggaggctccttactctgcttcttgagctcctcggtgagcttggggctgaaggtgtggccatcacacaaggtgacaaagcagtagaggcattcacccttcacaggatgagggtggcccaccacagctgcctctgcaacagcctcatgttccacaagtgctgactccacctctgctgtactcagcaggtgtccttgtcaagggaaaggaagtgccatgagagagatcccaggctctgccccagcccatgctccatctgtacccatggggcagtcctggtctggccaaatggagaagacccttcattcactcctcagatgacatgctttcagtcaccccaccatccaagttcccctactctaggcacattccagtgttcattactcctctaaaacctgggcccagaactgaatgctacacttagtacatggtctggccaaaggacactcctgggctcttgcggaaggcttcggctgggtgttgtcagaggagcagagttaataagatgggaaggtggcccctggccctcaccagatacattgagcatgtcatcaatcctgccagtgatccagtaatagccatcctggtcccgctggcagcctgggaagaaatgcaaaacctaataaataaaaaccctacggtaggatacctgatccacattaccaaactgctacaccttctgcaatagccttctaacaagtcttcctgcttccactcttgcccactgtagtagccagcctccaagagggcaccactgatctctgcctcttggtattcatagccctgcagtcctctttctcattgtactagggttagtctgtgtcatcataggatttggcagaagtgataggatgtcacttctgagattaggttgtagaagacacctagcttgtctcggttgcattgtctcagatcatttgctgtagggtaagctagctgccatgtattgagtagtcctatggtgaggtgaggaactgaggattcctgctaacaaccatgcgagtaagcatgaacgtaggtcctccaggctcactcaaaccttcagatgactacaggccctaccaacagcttgactgaaactcacaagagacccagaatgagaactacccagtgaaactgttcacagactcctgatcctcagaaactgtgtgagataatatttgttattttaagctgccaacttttgggataatttgttccatgccaatagtatactcacctaaactctattctccataaatccagcaaagttattttctaaacagtaaatcaattcttagcactcccctgcttaaaaccccaaaaggtggccaggcatggtggctcatgcctgtaatcccagcactttgggaggccaaggtgggtggatcaggagttcgagaccaacatggccaacatggtgaaaccccgtctctactaaaaatacaaaaattagccaggcatggtggcacccgcctgtaatcccagctacttgagaagctgaggcaggagaattgcttgaacccgggaggtggaggttgcagtgagctgaggtcgtgccaccgcactccagcctgggtgacagagtgagattctgtctcaaaaaaaaacaaacaacaacaacaacaacaaaaaaaaggtttcccactgtcctttgaataaaattcaaactcctcaccatggcccacaagaccctccctgtattatgtacatctccaacgtcatgtaatattcttccctttgcttgctacgctccagccacacaggcttcagtccattcttcagacatctcaagctgtgtccctctgcacaaaacactcttactctagattttcccatgcctgtttccttctcacccttcaggcctctgctcaaatgtcaattcagagaagtcttctccgacgatcctgtgtacagtagccatccctgcacacactatcatgctaccctgtttatttttcttaacagcatttatctctatctaagataagcttatttatgtttgttgggtttgtctgtctccccttactagaatccccatgagggaggagattttgactacattattcatgatcagtgcctgggcacaggatcacagtgctcagatcttatggatgaatggattggtagatggatagatggagaaacacagactccagacataaagacaaacatgacataatagtcatgcactgccacatgccccatctctttcaacacaggagcatacattgtccatctttcctcatacatcaaagttcggatggcaccattctgagacccctcctgctatactcattcctgcccttacagtctttgtagctctgcgtagaaaccagatactgacatgtaggacacattcttctctaattttctttacccctaaccaactgatatagtttggatgtttgtcccttccaaatctcatgttgaaatatgatccccagtgttagaggtggggcctggtgggaggtgttttggtcaaggccggggaggtggggggggcgggggggacagatccctcatgaatggcttggtgctgtacttgcagtaactctatgagttcatgtaagatctggttgtttaaaagaggctggtatctcctccctctctcccttgcttcctctcttgccatgtcaaacactggctttccctttgctttctgccgtgattggaagctacctgaggcctcaccataggcagatgccagcaccatgcttcctgcacagcctgaagaatgatgatccaaaataaacctcttttctttataaatcacccagtctcaggtattattttatagcaacacaccaactcttcctgaaaatggaagtggaaggtacatgtcttagtgggaggtgcaagagggggatagctaaggctcaccatctcctgtaacatagtatccaggaaacttcttaaagtaggttgtctcaaagcgttcgtggttcccatagactgtgcgcatgatccctggccagggctgcttgaacacctggggagtgaggaagggacagtgatcacatttgctatgctgtctcactggaagataattacagcttttctaaatgtgggggaaagtgtcctgaatgaagtacaggctttggagacagaggatcctggcttggaatcccagctctaccacttactagctaggtgacctcagagaagtaactttacccctctgagcttcaggatcctcatctgtaaatcagagaaaatactttctgtcttccaaagttattgtgaggattaaattaatagtatatggaaattgcctagcacggtgttctattattgataagtgtttagtaaatttgtgtctccttttgggcaatccttgaggaaagcaggtccagtttgatacaaatgaaaacactcatttaaaaaacagtggtgcccacacaccaagtaaataattattgcccaatcagtaacattctttggcagcagatcgatggaatggatggaattctaggctgagtcagaaggcctggatgtaagccctgtccctgttactaacttgctcttgggaaagtgaaatggggtggggttgaagggacaggtgaggctcctgcaagtatgaatacaataatcacaacagctaatgtttatcaagtactaattgttagtttctctgctaaccccttcatgtggattatctaactcaatcaagcaagcaaccataggagacaaaggcattatttttttctgagacggaattttgctcttgttgcccaggatgaagtgcaatggcacaatttcggctcaatacaacctccacctccccggttcaagtgattctcctgtctcagcctcccgtgtagctgggattacagacgtccaccaccacgcccagttactttttgtatttttggtaaagacggggt

SEQ ID NO: 95776 - DNA, 45811 bp, Homo sapiens
attgattgtcctgatctgaacttgtcaattagcaaaagacaaggctgcaaacatttatactgacagtgctaggcttctggggttgcatatgactttgtgaggctatggaaagagagaggatattttaacttcctcagggcaactcataaaaaatggacaacaagtatcagagctgttagaagctattctaaaaccaaaacgttggcagctataaaaatcccaggtcactgtcagacaccacagaaagtcggggtaaccaactggctgatatcacagttaaaagggtagcatttgatccaccagccccaatttgggaaatggccataaaacctgaaacacttaaaaacatgttgaaagaaacccagaacatagctcctacaaaagagaaatctacttggaaacaggcagggggatttttgtctcccgaaactgaaatatggtgtggacctaataataaacccattattccaataggatgtcaggtgtcccttatggaatatgttcacaacctaacccactggaatcctgataaaattatatcctggtataaacaatattactggaaaccatccttcacagtggcacaaaaagcttactcttgatgtgctatttgtcccaaatataatccaggaaaacccctccatggrgcccagggtcattttccccttccggccagaccttttgaggtgtggcagcatgattttatccagctgccatcatctgaaggttatcagtgttttagtaatggtctgcatgttttcctattgggttgaagcttttccctgcaggcaagcaacagccacgkcagttggaaaaatcctactaaaaaaaatgactccactatggggagtcccctgtgaacttcrcagtgataggggaactcactttactggccagatttttcaaaatatttgtacagtttggccatatttcaacattttcagggtgcctaccatccccagtcctcaggcctggtggagaggaccaatggaataattaaaacacaattggctaagttcacagaggcatttcacctcccctggcccaaagcactcgccctagtgctgattatactgcaatccacccttcttggaaaacatcaaccgtccccttatgaaattataactggaaggcccatatgtatgggaatgaaaataactaatccaacttttctcaagggagatatatcacaatattgggagggattcatttatcatcttaaaaaagccaagatttggtaaagaattcctttcacagtgtgctccctgaagataaggtgcctggtcaagatctgcagcctggagatttggtctattgaaaaagacatttaataagggattctcttcaacctcgatggaaaggcccatactaggtactattaactaatctacgtgccacaaaattagagggtatagcctcatggattcacatctctcatcttaaaaagacacaaactcctgagtggactgtaactcctatcaaagaccttcacctccagttcactaaacattgaccttcaacccagcatagaagcagatgacagctgtgtggactgtttaaccccaagacacaggacaaggcctgtaaacaaaagaatgcctatgtttattgtataataaccatgacaattattgtcccagagctactggcaactgctgtcttacaaagaacaggacacttgccttgtctgatttaacatccttttagtagctaaatgaattttacaaccttgctattattgaccctatatccctacaccttcttgccattttcacccactgactccagtgaaacaaacctgtttctacaataggctcaggagtatgcagacagattacaaaaggacacctgctggatatacagactcatgcctctttccagtggctctggcctgccatggtaggtatcctccttccaaggttaggaccaaaaatttattatatcacagaaatggtctggtattcttagtgctggcataagagaacaaggaagatgggaaaagtttttcaatggaaaggaccagctcattagctctcactttagcatcccccacaactaaaaaaaaaaaggtggtaattatgccccaaacaacagcccatttcaaaatggaataatgcaaatttgggatgaatttctctggctcaccccttcatttggccaactcagccaaaatgctgggagcaaagaaaccacaccaaggatttatggccagaaagtatgagaaatatggggtggatactgggagaatgctgtgaccacattatcatattacaagacattgactggcatgccaccgattggttgtagcaactaggtatttattggctagctccaaatgggacatattggctgtgtggtactaacttacggctgtggtcacctccagggtgattaggaaaatgttccccaggttacgcttgagaacaggggtgaataattcagaccctgccaaaaccagcaagcctttttcatttacgatctcactggacacgttcagtattccaggggcatgatcacttgaagattgaagctaagtattgaagacattatatggcctatagaggccttaatgaattacaccaaaaaggccctaaatgatagccagatgagtatcccgttgctaaayaatgaggtcatgcttttgaggaaagctgtgttgcaaaaccatatggcctcagatatactcacagcagcacagcggggggcctgcaccatcataaaagctgaatgctgtgtgtatattccacatgaatcgaagaacataacctgacttatgactgatatgaaaccccggaaaaccaacctgtcagatccaaaaccctcactaatcaattggttgagtgattggtttgcatcctggggaagttggtggcagaagctgttgcttataataggaataataataataataataatttctgttctgtcctgtttctgcttacagtgttgttaaggtatgtgcttgcaaataagtccacacacaactgaaagggctagggtaatgattgcccagggaattgctctaattgaggaggcagtaatataacctgacccaccttccaggtttgcttcctatttgttgctatacatctggcctaggtccatatatatatacatatatatgtgtgtgtgtgtgtatttttttttcttttccttcttttttcccatttttttttatcttcatgggacataatgtcttaggaatgagccttcatagcaacgtgggacctgaacttctaggagttaaccaacctagtgaggagaaaccagctcaaaagaaaaggaagaaaaaacaaccctaggccagaaagctgtattccttctaaaatgctttctccaaaagattttaaagaaaaagaagggaaaatgtgaaaggaaattaaatcttgagaccccaaactcattaagccaaagggaaaagttaagctaggaactgggtcatgcaaatctgcgtcccccttttggtttgtaaataagatggctacaagatgaaaagctacatgtctcctccatattttgcccacaaagaaattcctagtgagctgcaagatcttttaaggtatttctgttaaaatttcaccatggcaatgtaaatggatagattatctttacagatgcagtcaccctgctgcccaccaaacacaaatgaatatctcattgttcccctgccccattttgcctatgctatcttacgtaaaaatgtagatttcctgcatttttcctctgctccatttgtctctgtcatcttatatataaaaaaaagcagatgcactgagctagacaagggtatgaatgactatttttccttatcccgccatacatgaaaattatgtacttctcaatatcccaccttttcccctttaaatttggagccttcaaaatcatcttcagagaaaggcatagaactgtctcctgggcgtgcatccttaactttggcaaatcaatctcctaaaatgattgagaattgtctcatcatttttctcgattgacacctttataaaagggttggaggaaattggcatgtttgcccttcttgcagcatgtgaggacacagcaacaggacaccatcttggaagcagagactgggcctctctatcagacattaaaccagttggcacctgggcgacccagtatccagaactgtgagaaaataaattcctgttctttacacattacccagtctgtgtgttattctgttatagcatcataaacagaataagacaaaagtcttcaaacaatgaatggattttgaaaggagtaaaagatgggctgggcatggtggctcatgcctgtagtcccggcactttggaaggctgaggtgggcagattgcttgagctcaggagttccagactagcctgggcaacatggcaaaaccccatctctaaggaaaaaaagaaaaaaaaagggatggaggggtgggagttttatagacaaagaaatacataagcaaacagataagcaaaagcacgtcctcagtaattccatgttgctttatctgtattcatgatcatgtttacaaatccattctggaattctgctgactactgatatttgcaatttttggcattacttctcatccaccttagaaaacctggagaacattttttctatctttaatcttcatatacatgcttaatgaattctgatgattattaatggaaatttcataacatcaatttattcaccaatatttattagacccttgatatgttcaagaccctgtagctggtgctgtcggagtcactaagatgaactatataaataactactctatgtgtacgaataactaccctacaaagcagaaagctatcaagtgccttaagggagttgaaactgtatttgctacaggagggctgagagaagacagaacatctacgattttttttcttttcaattctcttcctacaactaattcatccgaccttggaagtttggtcttactaaaaacaaaagttagctgttcttttacaacctcctcttcaagattacttgtcagggtttgctgtgcccttcgcagcttgaaagactttctcttcatccaacgatttgaggcaattaggagccactgccttctctctgccattgggttccagaaagcaccatacattgtccgcagatactttactcatgcttacactttcttgttctgaatcttcaaaaattagtggcgtgtggtggcacacgcctgtagtcctagctactcgggaggctgaggcaggagaatcacttgaacctgggaggcggaggttgcagtgagccgagatttcgccactgcactacagcctgggcagaatagagagaccccatgtcaaaaaaagaaaaaaaaagtatctgattgtgtttagcatatctgcaatatccccttgactttggcctttagcctctttatgagtaccctgatggaggaaggcccaggaagcggtagccttcctggtttgtgacgcacggtgtgcattgcgtattagattaacatcagaatggccctgaaggctggaacatcttatctgtgtttgagagttatggaaactctgatcctccatgagaataatttttccaaggtctcagatctctaaagcagtagatcttggatctgaacattgctatttctgaccttaaagcccatgcatttcccacaacatatgaaccatgataaggtgtattttaaagttcatcttttctgttttttgtgaaagtcttttagagatctcagctcatcacaaagtttccggttcagtctcgtgggtttcatgtactcagccagcatttacttgccagtcaaggtctaggatggctacctgtcctctgcaggagccccaagcctattcattaatttcatttacaattttatagtcataattatttctttgtataatagcattctgagattttccaaaatttcccactgtttttgttttacagtgggcagaattcactttgctctaacttgactccaagatgacacaatttcccagttttttttttaacggctrggggatgggggtatgyggaacagaacacagtggtctagctaaccgatttccgctagacgtccagctatctttcaaaatattttgtttctgcayggcaacttcagccgctaaaaaagcatccagcttacaacggaacctggagggttggtaaaggccccctgcgctggccccgccccatgggaccgggcggcgtgggmgtgagaggcggggcggggccgcgctctgcttgccaatgtctttataggtcacccggaaggcacgcggaacctcggcgcggtgcttccagcagggtctctccgccactccagccccgcgcccctcgccgcggccctcgggcgtctgcgccgcagctgccgcccccgcctctttggagtctctcgcggcctcaaagcgcggcctgcgtcgcttccggcagttccmgaccgcgggcgatggctgccgctgggggcgcccggctgctgcgcgccgcttctgctgtcctcggcggcccggccggccggtggctgcaccacgctgggtcccgcgctggatccagcggcctgctgaggaaccgggggccgggcggkagcgcggaggcgagccggtcgctgagcgtgtcggcgcgggcccggagcaggtagggcgccgtgcgggcgcgatcgccggcgcgggccggggtccccggtgggtggcgcctggctctctgggccgagtctctggttccagtgccttctgcgcgccgggcccacaccccggaggcctgcctctcgcccccctcttctggggtgctctcgcggctccgtctcgctgctcggtggcgtcgctgcctcccttccgtcgcaccgcagagttcctttccgcatcacccactcccggcgggaatcggggaccctggacgcccagctccctttcccagcgcttcccgtgccctgaggaaagccgggactttgctgctgcttgttctccgtgtgatttgtctgggatctgacctttgctctgcccgaaactggcagtgaccttcgcgacaggcttccctcctgctgtcctggcctgacacacctgccagctgtttttttcagggccttgccctgctttgagaggacacccaggtcccaggtctttgtcagggggtgtccaggtagaatacacccagcccataccctctgctgccctgtaggccctttgctagttgctcaagtgttgaaagcccctgcgttgaagtaatctgccgggacttgaaacttggctttggcactgattgtctgacgtgcctaacttggtcagtccttaggaacccagtttctccatttgcaagttggatataataacagtgtagacctcctatggttaattgaagaatcaatgagttaatacagcgatacaggtagtcttgtgcctagcmmgtartgagggctcagtagatgccacttggtagcagcagcagcagcagcagcagcagcagcagcagcttcttaggttcacaatgttaagagagttttgtattaaatattgaaagaaatgtgacaatttatcccaaatgtgttgaagttttaggttcttgggcatatttgtttttcaaagacactccttagatatactagagatacaatttacacataatttttaccaacatggtggcgatttatataatgcagatctctcgacagctctttgaccgcatgatgtagggtagcaggaatcgagaactagagggagagtgtgttggatttgtacgctgctttgtctagtttctttttgaggtctctgagagcagggtctaagactttcagtcatcttttccccactaatcccgttatctagtgggtgctccatacatttttgttgtgtgaactttgggggaaatcagggagaaggcaagccagatttatttgttcctgtttcctctgcacttccccccctgtctttgaccagtgtgggtaccttgctttctgttatacaatggatgagttttggacaactgaatmaattgggacagatattgaacatgcttgtgtaactggtataagggaacatgaatgtttttgtagtaattgggagttatctttctcagatttgttttttggatttggatatgtcaggttgttttaaaggggagcacgtctatttcctcataatcctgctgccctctttattggcacaatttctattcatggtcttatcattcctcttacagactttggagctacaactggattttccagttcttactgtgttaatgagacttgtgctrtaactaccgtaactactaatcacatgtggctattgaagtttaacataattaaaggtaaataaaattaaagattcaatctcgtagttacactagccacatttcgagttctcagtagccacatgtggctagtggctactgtattggacattgcaagtatgtgtagaacatctttgttatggcacaaagttcttatagacagacagagcagttctagaaactgtagttctgtctttgaagtttaacaactcgataagctatcagtaattgagagtcagaaaaactccttttactctaaaataccgtgacacaagggggtttgcagtgattcaggtagcaaagatctttcacgtgtattgtttcgtatgactcttaagacaattctatgaggtagggagggtagataaatgggaataaaaatttcatattaagtagctggcaaaactaggactagaactcaagaagtttttgyggatttwaaaaaaattttaaatttctatttatttttaaaatttcagtagttttgggggcacaggtggtgtttggttaatgggttagttctttagtggtgattttggaggtgttggtgtactcttcacctgagtgcagtggtgccatcatggctcactgcagcctacacctcccaggttcaagcgattctcgtgcctcagccacccgaatatctgggattacaggcgcgtgccaccacactcggctaagttttgtagttttagtagagatgagatttcactatgttgaccagcctggtctggaacccctggcctcaagtaatctgcctgcttcagcctcccaaagtattgggattacaggcgtgagtgaccactcccagcatagggtctacatcttctgactcttaggttccatactctttcaacttaagaattacatttttctttcgtttccgcctcctctcctcttctttggtaaacctgttaatactcttacttggcagttttttgtagggctgtttacctttaatacagaccaacaggttgggcttcttagcaaaagggcttggtctttaaataacagttattaatcagtgtgtgttgaattctactatgtgttacgtattttgcatacattgtcagaactataagattaaygttgtccaattttatagaagaggaggctgatgtaagagatttcgaattcctttgctgtaagcttagctctagagtgcttcagaagaacagcaacgctgaaacctctggctttcagtagtgtgtataaatgatggaattctttctaatgtgcttcctgtagctttagctaccaggcattcgttgatgtcaaatctctagacttctctgctgggctcagacccatacccatattkccatctggtgtttggacattctcatctggctttttcattattaaattcagcaggtctaagcttcaacttatttctgtcttccccaaagttcctttggttcctgtcttaaacctaggttaaatggtaccacctaattgtgtgagctggaaatcccaatgtttttctttccgcttttcagtttatcttatgtagatggtcactaaaaccttttggtctacctcctggatgtctgttaagtcactgcattctctgtccctgattagtttatgctgttttgataacctccaaagtggcctccctgcctctagggtattttcattctcagccattgtactttgaaaaaaatggcagttattcatgttgaaarttatgaataatatgtgggaatactagttttaaagcatgttttggctgtgaaaagaagttggagagcgcaggcccttttgaggaacattctggtacacacacacacacccttttgatgagttttaatgaatagaatcctgttttttttcccagtgttataatattagggagggcattatcccagtggggcttcagttgcctcatttgtgaaatgggatcactggacttgataacttycgagatagttatggctctgaaattatttaattctgagttttacttaaagwtttgtttgatgggctattgccatctactggtagtaataagaataacaactcattattttaagttgaagagaatcttttcaagtgtgaggtaaaaattaaaatgaccaatggtggaggaataaggatctagtttttagtataatggcttctcaaattttggagggatgtttgtgagaagtgaaggaaatttaagtcagctagctgatagttaacatactatcttaaaaaaacatgtaaggaggtatttatcttacagattcaaacaaataaactttttctagtccctttgatttgtaagtatacaatgtggactgaaatgagatgtcaaatacgcagaaaactaytaaacaacatctctcagcagtagtattctatgtagcactggaaaagcaatcgccctattgatttttttttttttttttttggagacagagtttcactctgccacccgggctggagtgcagtggtttgatctcggctcactgcaacctctgccttccgggttcaagcgattctcctgcctcagcctcccgagtagctgggattacaggcatgtaccaccatgcctaatttttgtatttttagtagagacggggtttcaccatgttggccaggctggtcttgaacttctgacctcaggtaatccgcccgccttggcctcccaaagtgttggaattacaggcgtgagtcaccatgctcggccwtgatttgctttttagaagctcactacaaccctggtctagtcttttatggacacattcatgtttttcagagagctgtgtgatgactttttttgttttttttkttttttttttttttgagacagggccttgagctgttgcccaggttagagtgcaatggtgtaatcacggctcactgcagccctgaacttctgggatcgggtgatccacctcagccccatgagtagctggtactatgggcaaataccaccatgccttttatttttcatacacctacaaccatctcatttttatttttattttttgtagcaatagggtctctctgtgttgctcaggctggtctcaaactcctgggctcaagcagtcccctgcctcggcctcccaaagtgctaggagtacaggtatgagccaccacacttggccttttcttttttaaatgacagggtcttgctgtgttgcccaggctggagtgcagtggtgcaatcatatcccattgcagcctcttcctcctcctgggctcaagggatcctcccgtttcagcctcccaattagctgggactacagatcacatcaccacacctggctaattattttattttttgtaaagatgggatcttgccatgttgcccaggctggtctcaaacttctggcgtcaaacaatcttcccacttcagcttctcgaagtactggggttacaggtgcaagctactgcactggcttgtatgagagtaaaatagagttcatgagtgataataattgccaaatgttttataactgtgactattagggagacatatactgaggccaccaggtggcgttgaccaggtagtcattgccatttcctgtaaggtagtagagcttattacctggtaggtgggtagatatatatgcctttgatttccaaataagctttggaaagaaaagaaaataccttcggctaggcatggtggctcaggcctgtaatctcagagtttyaggaggccaagttgagaagatggcttgaggccaggaatttgagaccagcttgagcaacatggtggcaccccgtcactacaaaaaataaaaataaaaaaaattagccaggcgtggtgctgggcacctgtattcccatctactctggaggccttataggcttttaaaccaattattttaaattatgttttgaaattactaaaaatactaaaggactgtttttttttccagctcagaagataaaataacagtccactttataaaccgwgatggtgaaacattaacaaccaaaggaaaagttggtgattctctgctagatgttgtggttgaaaataatctagatattgatggctttggtgagtatgaaacatttcttaaaatgcataagtgaaactgttagktttcaaatttttattttgtggtttttttttttgaagaagtttaacctatagcatgctatgtaaaatattaacattcaggatgtgttagtgttatattcttgtttataaagaataatagagtgacaccattgttctgttctttgtacatttaaataagtcatggccagaaatctgctgtggcctcattaccttactgtttatatgtgtgayacaaagccgacggtagggagtagagttaaaagataccaggttagagagaataaatgtcatagcacagaggggtacttaaatatcttgaatgtcagctcaccttcctaggaaaggtaacttatcctagaaagtgatttatttagaaagttttcatttttagacttctgaccatatgccttaactacacgtgcaaagcctgtgttcctgcaactgcccttttacacttcctcaggcgtaccctgtatatgacctgtcagttttgttcaagcaatgyatgtttagattagcagttctcagagggtttccttgaccgttagcattagtgtcacctgggaaatgcagattctcagacactcctcccccacccaccgcccccacccccgccccagacttactgagtcacaaagtctggggtaggtccagcattgcatgttgtaacagctgtctgtgtgattttgatgcatgttcaagtttgagaaccactggtctggaataaggttcaaggagcgtatctgactctgcttctttcaaggcactgttcacattatcctttaaagaaccatttctagatcagaattaatttatctctcttctgttttcccatgatatattaaatctacctctctttgttaatgcttataacagttttcctttttagagagaatggctatctttcttattagattattagtttttgaaagactgtactccatgaggttacctgagtcacctcatggagtaggctttgtccagagttggcactcaataatatttgctgaatatctttttaaaaattttttgagacaggatcttgctctgtcacccaggctgaagtgcggtcgtgcaatcacagttcactgcagcctcgacctcctggactcaagtgatcctcctgactccgcctcctgagtagctgggactgcaggtgcaccatcacacctggctgaattttgtattttttgtagagacagtgttttgccacattgcccagcctggtcttgaactcctgggctcaagagatcttcctgccttggcctcccaaagtgctggcattacaggcgtgagccaccatgcccagccttgaatactgaatctaagtwttttttgctagttttaaaataattataacaactagaatttgagtgtatactatattctagcatatgttaaatgaagtagattttttttttaactctccatttgatagttgaagaaacttgagtctcatggaaattaagtttccctggttatacatgcagcaagtgagagggctaagactcaaacctgtcttgaagtcaagatggtatatctcattgtggttttgatttgtatttctctggtgattagtgatgttgaacatttttccgtatgtttgttggccgcttttatgtctgtgtcttcttttgagaggtgtctgttcatgtctttttattttccarcttttatttagattcagggagtacatgtgcaggtttgttaaatggatgtwtcatgtgatgctgaagtctggagtatgagtgatcctgtcacctaggcagtaggcttagaaaccartaggtagttttcctccttgcccctctcccttccccctctggtagtgcccagtatctactgttcccaactttatgtccatgggacccagtatttagcttgcacttataagtgagaacactttgcttttctggttctgtgttaatttactcgggataatggccttgagctgtatccatgttgctggaaaggacatagttttattctttttatggctgcatattccgtggtatatgtgtattacattttctttatccaatccaccattgacaggcacccagactgattccatatgtttgctattatgaatagtgctgaggtaaacatacgagagcatgtgtcttttggtagaattatttgttttctcttgggtatgtacccagtactgggattgcttggttgaatggtagttccatttttagttctttgagaaatctccaaactgctttccacagcagcttaactaatttacattcccaccagsactgtcttaagtgtttccttttctccgcagccttgccaacatctgtaattttttgactttttaatgatattctttatgactggtgcaagatggtatctcattgtggttttgatttgcagagtggagtattttttcatgtttcatgtttgttgaccacttgtatgtcttcttttttaaatatttatttatttatttttgacacaaagtctcactgtcacccaggctggagtgcagtggcgcagtctgggctcactgcaaccttcgcctcccaagttcaagcgattctcctgcctcaktctcctgagtagctggrattataaaggtgtgccaccacggctagcaaatttttatatttttagtagttttatatttttataattttatgattattttcaaattttatatttttagttttgccgcattgaccaggctggtcttgaattcctgacctcaagtgatcygcctacttcggcctcccaaagtgctgggattacrggcgtgagccaccatgcctgacttctgcccgctttttaatgaagttatttgttttttgcttgttgatctgtttaagttccctattgattctggatattagacctttgttggattcatagtttgtgaatattttctctcattctgtagggtgtttactttgtttttttgtttgttttttgagacggagtcttgttctgtcgcccaggctagagtgcaatgatgtgatctcggcttgctgattcacctccacctcctgggttcaagtgattctcctgcctcagcctcttgagtagctgggattacaggcactcactaccacgcccagctaatttttgtatttttagtagagatagggtttcaccatgttggccaggctggtctggaactcctgatctcaaatgatctgcccaccttggcctsccaagtactgggattacaggtgtcagccaccatgcctgctctgcccacttccccccaaccccgagacggagcctcactctgttgtccaggttggagtgcagtgctactgtcttagctcactgcacccttcacctcctgggttaaagcaattctcctacctcagcttcccgagtacctgggattacaggtgcatgctaccatgcccggctaatttttttgtatttttagtagagatggggtttcccatgttggccaggctagtctcgaactcctgacctcatgatctgcccgatttggcctcccaaagtgctgggattacaggtgtgagccaccacacccggccctctgcccactttttaatgaggttatttgttttttgcttgttgatctgtttaagttccctatagattctggatattagacctttgttggatgcatagwttgtgaatattttttctcattttctagggtgtttactttgttgatagtttctttaatgtgtcgaagctctttaatcaggtcccatttgtcaatttttgtttttgttgcaattgattttgaggacttagtcataaaaattctttgccgaggccaatttccaggagagcatttctgaggttttcttctaggacttttgtagctttagatcttacatttaagtctttaatctattttgagttaaattttgtatacagtgataggtaggggtctagtttcattyttctgcatataatagccatcaatcccagcactgtttactgaatagggagttctttcctcattgcttatttttgttgactttgtgaaagatcagattttctagatgtatggctttatttttcgggtctctattctgttcctttggtctgtgtgtctaggttttctaggttgtgtgcataggggtgctgataatagtctctaggatctttgtatctttatgggattggttgtaatgccatctttgtcatttctaattatkcttatttggatcatctcttkttttttctttgttaatctagctagtggtctatccattttgtttattctttcagaaaagcaacttttggttttgttgatcctttgtatagatttttgggtctcgattttgttcagttctgctttgagtttgttatttcttctgctagctttgggttttttgtttttcaagttcttctaggttaattttagattgttaatttgagatctttctaactcctcaatataggcggtcagtgctctaaacttcatcttarcactacttttgctgcatcccagagattttggtatctgtgtctctgcttttatttatttcaaagaattttttgatttctgccatatggtggagccactttagctggtagaaatattttctgatctttgacagaatgggtaaaccatgctattgtttgtgtgcattggaagttgtggctgttgtgctgttgaaaaaatttaaatcttaatatctcataacagtgttaactaaactttcatttagtgatggtgtggtactgaaatatgtcccaaatcaataacattggaatggatgctaaacatgatctaacacaaaaaaaggctaaacaatcagcctgacgtttggtgctgttaatttaggtgtagatactgtaaagacaaaagtacttagaaaataggattttaaaaagacattacggtaggaatatttttaagctcacaaaaaaatcacttggtgaagggtaatggaaaacaatactggtggtctggctgtgtccacacccaaatctcatcttgaattcccacctgttataggagggacccagtgggaggtaattgaatcctgggggcaggtctttcttatgctgttcttgtgacagtgaataaatctcacaagatctgacaattttataagagggagtttccctgcacaagctctctgcatgcctgctgccatccatgtaagatatgacttgcttcttcttgccttctgccagtattgtgaggcttcctcagccacatggaactgtaagtccattaaacactttttcctgtataaattacccagtttcggatatgtctttgtcagcagtgtgaaaatggactaataaagcaaattggtacgaggagtagggtgctgctgaaaagataccccaaatgtggaagcaactttggaaccaggtaacaggcagacattggaacagtttggagggctcaggagaagataggaaaatatgggaaagtttggaactccctagagacttgtggaatggctttggccaaaatgctgataaygatatggacaatgaaattcaggctgaggtggtctcagatggagacgaggaacttgttgggaattggagtaaaggtgactcttgctatgttttagcaaagagactagcgcattttgcccctgccctagagatttgtggaactttgaacttaagagatgatacttagggtatctggcagaagaaatttctaagcagcaaatcattcaagaggtgacttgggtgctgttaaaggcattcagttttaaaaggaaacagcataaaaaagtttggaaaatttgcagcctgacaaygtgatagaaaagraaaccccattttctggggaaaaattcaagctggctgcagaaatttgggtaaggaatgaggagctgaaagttaatccctgagatactggggaaaatgtctccagggcatgtcagagatcttcatggcagcccctcccatcacaggcctggaagcctaggaggaaaaagtggttttgtgggctgggcccagsgcccccttgctgtgtacagcctarggacttggtgctctgtgtcccagctgtcccagctgtggctgaaaggggccaatgtagagctagggccgtggcttcagagtgtgcaaacctcaagccttggcagcttccatgtggtattgagcctgctagtgtacagaagtcaagaaytggggcttgggaacctccgcctagatttcagaggatgtatggaaatgcctagatgttccaggcagtagttttttgcagggcagggctctcatggagaacttctgctagggcagtgcagaagggaaatgtggggttggagcccccacacagagtccctaytggggcaccgcctagtggagctgtgmgaagagggccactgccctccaaacctcagaatggtagatccactgacagcttgcatgatatgcctggaaaagccacagacactcaatgccagcccatgaaagcagccaggagggaggctgtatcctgcaaagccacaggggtggagctgcccaagaccatgggaacccagctcttgcatcagtgtgacctggatgtgagacatgtagtcaaaggagatcattttggagctttaagatttgactgccctgctggattttggacttgcatggggtctgtagcccctttgttttgaccgatttctcccatttggaatagctatatttacccaatgcctgtacccccattgtatctaggaagtaactaacttgcttttgattttacaggctcataggcagaagggacttgccttatcttggatgagactttggactgtggacttttgaattaatgctgaaaagagttaagactgttggaaaggcatgattggttttgaaatgtgaggacatgagatttgggagggaccaggggcagaatgatatggtctagccatgtcccctcctatccagacctcatcttgaattcccacgggttgtgggagggacccagtggtaggtaattgaatcttgggggcaggtctttcccatgctgttctcctgacagtgaataagactcacaatatctgacagttttataaggggaggggggttccctgcacaagctctctgcctgacgccatccatgtaagatgtgacttgttcctcgttgccttctgccaggattgtgaggcttccccagccattgtggaactgtaagttcattaaaccctttttcctgtataaattacccagtttcaggtatgtctttatcagcagcatgaaaatggactaatacaattggttacatagttgaagacacaaaactgtggcagtgtacctcagtctgcaatggctgatgtttatgggtgctgaaaattcatctttacccctgccctgccccgctaccttttttttttctgtaggaaaatrtctcaagttttaaattatgtaaagctttcagcactagcatctttkgtataaaaaaagatgatkggatttagattatcttccctccccaccacatcatttaacatgccgtctgtkgtttttkgacttaataatatcctttttttttttttttttttgagacgtagtttygctctttttgcccaggctggaatgcaatggcacgatctcggctcattgcaacctctgcctccctggttcaagtgattctcctgccttagcctcctgagtagctgggattacaggtgtctaccaccacgcccacctaatttttaaaatatttttagcagagacggggtttcaccatgttgggcaggctggtttcgaactcctgacctcaagtgatccgcctgccttggcctcccaaagtgctagaattacaggtgtgagccactacgccttggccaacagctaatgccctttctgattggtgtgagatggtatctcattgtggttttgatttgcrtttctctgatgattagtgatgtggagcatttttttcatgtttgttggctgcttgtatggctttttttgagaagtgtctgttcatgtcctttgcctatttttttaatgaggttgttttttgcttattgatttaagttccctatagattctggatattagacctttgttagatgcatagttggtgaatattttctcccactctgtaggttgtctgtttactttgttgatagttttttttgctgtctagaagctctttgtttaattagatcccacttaccaatttttgcttttgttgcaattgcttttggagacttagccaaaaatcctttgccaatccaatgtctagaagagtatttccttgattgtcttttttatagtttgaggtcttaaatttaaatctttgatccattttgggttaatttttgtrtatggtgaaaggtagggagtccaagttcagacttctgcctatggctagccaggcatcccagcaccattattgaatacggagtctcttaaaaagagtaagtgctgtccgggcgcgttggctcatgcctgtaatcctggcactttgggaggccaaggcaggcagatcacttgaggtcaggagtttgagactagcctggccaacatggtgaagccccatctctactaaaaatacaaaaattagccaggtgtggtggcatacacctgtagtcccagctacttgggaggctgaggcaccagaatcacttgaatctgggaggcggaggttgcagtgagctgagattgtgcctctgtactccaccctgggtgactgagcaagactgtctcaaaaaaaaaagaaaatatatgtgtgtgtgtgtgtgtgtatatatatatatacgtatatatatatatatatacacgtatatatatatatatacgtatatatatatatatacgtatatatatatatatatatacacgtatatatatatatatatatttgcagaacaacctctgagctgcctcactctgggcacactgcctatgggatagctgtgctccacaaggagtcctacttctgctgctgctgtatgctgctgcttcaatgaaagttgctatttaacacgaccgacccgccctgaatcgtttcctgggcaaagctaagaaccttcctgggctaagccccaattttggggcctgtctaccctgcatcaattctatatgaattttagaatagtttttttataattctgtgaaaaatgatgttggtagtttgataggaatagtgttgaatctgtaaattgctttgggcagtattatttgcttatttttctgatgaggtattgtttatttttataggttagcaaaagctctttaaatgtcctatttgataaaaattgtgaagatgaaaattttaaacatttatttaaatggcttccaactgctattttacatgaagttacatattctcaaaatagtgtaaaatgctttttgcataaataatttgtgtggattgctttatattaatttcttctaaattaaaacataagtattatgatcttaatacttgaaagtattcttttaagtttttaaaagtatttttttcttcatcacttgtgactatatattacagtacagtttttttaaaccgcaggtgacaactattacaaggtcatgaaatcaatttagtcactcccaactagcattttaaagaaatcaaaaagaacatataaaaacatatcatcttttgcaagggtattatcttaggaaatgtttatttagctattttacaagtatatatgtactgggtcatgatgtaaaatgaaattcgtactgtgagtcacagttaaataaagttttttctgaaartcattggttggaatggaagaatgtcctgcctgggcttctttcccagctgtatccctttttcagctttgtgaccttgggttgggtatctaacctactcataactcatcttttcatctgtaaagcagggataatattaatatctacctcataaagttgctgtaaagatcaaatgagtaaatccaagcaagtcctaaataaatattagctaatattgttaacatagrtattaatacagattcattgttcattatagcaaattttaaaaatacatttaaaaagaatttaacacttcatatcatcacacagagataagcactgaaataatcttttttccgaatacccaagaaatatagaaaatttaatgtaaatttaaaaattctgctggtatcatagaaattcgcgtattcagactcagaagaaaagctttaaagatcaagtatcctgacatgtccacaaatctttgtatttaaagataagcttgagataagtaagctaaactagattcaccaaagacagagttaagcctaagcttctttctagaataaagatgagagaaatgaaatcaggaagggtgcaatgttatcattataaagaagagcttattaccacaacattatgggggcagctgtttcattaattcctaaggctgaatgcaggagcccatctaaacactgcatttgtcataagtcatacagatgaacaccgtactccaaacatggctgaccgaagtacttagtttctttacagtttctccctgggtgatctcatccgttctgtgaccttaaatcctttctagatattgatraactcttaaatttacatccttagctcagacctctcctctgagccctgatttacagatctaacttcttgctttacatcacttcttggaaatctaacatatttaaaacagcttttgccttttttcctcctgatgaaacctgtccttcctcgagtctttcctacctcagtaatgagcaccacccggctgctcgaacctgaaaccgtagagcaccattccttcctctttcttcccaacctgacatccagtccatcggcacctcctgccagttgtgcccccaagattcgcctccagcatgtcctgttggctccatccctacagtcggcacgaggggctggccagccactgggcgcctggagctgtgctaacctgcttctgctctggagtttaacagccaggtaatttgtcctaacagaaatcagacatgtcagtcccctgattaaaagccatgagtgggccaggcacagtggctgacgcctgtaatccctgcactttgggaggcctaggtgggcagatcacaaggtcacgagtttgagaccagcctgggcaacatggtgaaaacccgtctctactaaaaatacaaaaattagccaggtgtggtggcgtgcacctgtaatttcagctacttggggaggccaaggcaggagaattgctttaacccaggagtcagaggttgcagtgagctgagattgcaccattgcactccagcctgggttacagactaagactccatcttggaaaaaaaaaaaaaaaaccgagatgggcggatcacgaggtcaagagatygagaccatcctggccaacataatgaaaccccgtctctactaaaaatacaaaaaaaaaaaaaaaaaaaaaaaaaaaaacccagctgggcatggtggtgcatkcctgtaatcccagctacttgggaggctgaggcaggaraattcctcgaaccagggagtcggaggttgcagtgagccgagattgcaccactgtactccagtctggcagcaaagtgagactccttcaaacaaacaaacaaaaaaccatgagtgtcttcctttgcacataggataaaatctgtattcccagccgtaaaaggctctgcattatctggccccatctgccactcttcctcttttttgtttttttctcattgttytttgtctcactttggtgatactggccttttctcaagagcttgaactcacccaaaattcctacctttgagactttgtatatactttaccctctccctgagacacatccctctctctcccatccccaaaatttagcttttcatctatcaaatctcaatttatgtacttccttagcgaggctttgcccagccacccagtccaaagtagtggttctcytgttaccctgaacccattattctctttctcagcatcttgttcacttgttttatagtatttgtcacagtttagtaattatgtatttcttgtgtatctttcccaatagactgygatgagggataaagtcattcctgtttaattcctcattgtatacgaaatgaagtaataagtgaacacatgaataaaaagggacagtcataaattttggaaacagttcaaacttataaacattctcattgccaacttttatattaatatagatcttttggatgatgcaggtacctgttttcagagtgtatcataatattctgtcactagggggcagttacacacctgagattcaacttacctagtttactctcaagacatttttttcttcaatattacctgttttcttcatgtgtctgttttgagggaaattatacaaattggaagatcctgattgtgtttgtataagtttatttgtattcccctcatgcttgagtcyctattgatataatgtatttctgactatgctagatcaatctttaatctagaaaattagattttatatttacacataatttccatttctaatatataatattcccacacagccatcctctagatttttgtttgggaaaggggttaggtgtcggggcaggcaattgtattgtcagcatcgtagtagataatacaaaatgatcttaatatgagatgcacacacacaaaatgtcttttcccgttggcaaacactcaagttacatgaaaggaaaggagcagagcagtctgcagagatctgactttctctaggaattaatttcacagctacaacttctgaggatttgcccaagtacttactatcattattcctgttttaaaaaaacaaaacttggttcatgagttcaccaaccttgaaattagtaagcatgctttactattcttcatgtcattttatatgcatatatttgaaattgtgcagattaacagtattgagattcttactctagcaaaatcagaagcattgcagaaaccaaaactgttgtcaggaatcctgtaattttaagctggcaggctgtgtgagttgtaaattttacatttgttactgcagctaaagatggaccattttagctaataaacaaatccctgccatcctttgtcagcaccatgtgaaccatgctgtttatagacatctgaatatctgtatgattttcttgactatggtgatgatattttaaactgtggttataatttaaaatcatttttaaagcctgtatcagtttcagccaagcattaagtgctaatactgaaaaatgtatctgaaaatgagttattttggaatagaggttagatataacaaaatgttaggaagaaagccaaaaacctgtcatgatacatactactgttaatttaggagaaagcactctgaattgttagccagtatgtaaacaaaatcaaagcagtactaaaatgtatatacttttaagttcatgaaaattgttgtataaccaagccaggatggtggctaaaatgctagcaccaggggctaatatcagtgttgctgtaaggtgttcctaaatcaggttattatctgtgctaaggcatgaagtatgttattattattaattttaattgacagatcataattgtatttatggggtaggtacagtgtgatgttttgatacatgtatacaatgtggaatgattaacttaagctaataaacatatccttcacctcacttattttttgtgatgagacatctgaaatttactgttagtaacttttgaaatacacaatacattattattaactgcagtcaccatgctgttgctatagattttttaaaattaattttttataatattttgagacagagtcttactctgtcactcaggctggagtgcagtggcatgatgttggctcactgcagcctccacctcctgggttgaagtgattcttgtgtctcagccttcctaatagctgggattataggtgagcaccaccacacccagctaatttttgtatttttagtaaagatggggtttcaccatgttggccaggctggtctcgaatacctgacctcaaacagtttgcctgcctcggcctcccaaagtactgggattacaggcatgagccactgtgctcggcctgtgctagagatcttaaacacaaattcctcctaactgaaactttgtagcctttgaacagcacatgctcatttcatttccttacccccactcccatctgctggtaactaccgttgtattttctaaggcagtggcccccaacctttttggcactagggactggttttgtggaagacaaattttccatgggcaaggttggggtggggatggatttgggatgattcaagtgcattacatttattgtgcactttatttctattattattacactgtatcatataatgaaataattatacaactcatcataaggtagaatcagtgggaagccctgagtttgttttcctgcaactagatctaggtcccatctggaggtgatgggagacagtaacagatcatcaggcattagattctcataaggagggtgcaccctagatcccccacatgcacagttcacagtagggttctcatcctatgagaatctaatgcagctgctgatctgacagaggtggagctcagacggtaatgtgagcaatggggagcagttgtaaatacagatgaagcttccctcacttgccctctgctcacctgctgtgtggcctgtggctcgggactgctgtaagacatgatgtatttttggttatttgaaaggtggacatagtaatgaaaagaattttacatcaaacatttgttctacttaagtatattttaaaacaaaaatgtttgaggattttagatttttaaactttaggaatccacttttctattttgtttctttgagaaaataattcttgaaatatgagacttgtacaatttccaaaatctttgagaatgcatttctcataaaacatcactttgtgtttacatatatgtgtatatccatgtatatatatacatgtacatacatgtatacacatagacatacacattttccctgttcatttacttttatatagccaaccacttataaagacactaaaagctgacagccaccaatattactctggggctgtgtatataataagttatataacttttgcacctcattccttcatatacatcatatattagtatacccatattgtgatcagctgcaagttttagccttgtagttgttgtttgttacttttatatcctttattcttttatagttttataggttatcttccactgtttattttgtagggttctctgtgtatatgaaaagccaaaaaaaaaaaagctccccattttgtgaatagcttttgtttccataatctattttcaggtcagctgcttgttatttggaatttgttttcccataaaaaataatgttggctaaatttttgagccaacacacagaacctatttcttcacaactgacttaatcaccatttatagcttgttttttgggataaaatgcattgcaccttctaactcttgtaattgtagctgctgctgcttttcttctacttttttaaagagacagggtctcatgccagtcagaatggtgattattaaaaagtcaagaaacaacagatgtggtgaggttacagagaaatatgaacacttttacactgttggtgggaatgaaaattagttcaaccattgtggaagacagtgtggtgattcctccaagatttagaactggaaatacaatttgacccagcaatctcattactgggtatatacccaaaggaatataaatcattctgttataaaaatacgtgcaygtatatgttcattgtagcactattcacaatagcaaagacatagaatcaacccaaatgccaatcaatgataggctggataaagaaaatgtacatatacaccatggaatactgtgcagccgtagaaggaacaagatcatgtcctttgcagggacatggatggagctggaagccattatcctcagcaaactaatgcaggaacagaaaaccaaataccacatgttctcacttacgtataccacattttctttatctctttatcacttgagagatatttgggttgtttccacctcttggcaatggccaattggtttttgacaaaggtgcaaagcaattagtgaagaaagggtattcttttcaacaaatgatgttgaatcaattggatattcatgtgggaaaaaaaaggtgcatcaacctaaacctcacatcttataaaaacatgaatgcaaaattgacttagatctaaatgtagaacttagaactgtaaactcctaaaagaaagaacaagaaaaaatctttaggacctgtgggtaggtaggcagagaattcttagacatgactggaaaagaatttatatataaattcttatatataagaaaaataaattagagttcatcaaaattaaaaacttttgttcttccaaagacactgttaagggactgaaaagccaaactacagactgggagaaaatacttgtaaatcacatatccartgaaaggacttgtatcccggctatgtaaaaagctctccaaacttaacagtaagaaaacaacacaattaaaaaaatgggcaaaagatatgaacagacacttcaccaaggagaatttagagatggcaaataagctcataaaaagattgaggggcatctggacctgaacttgtatgtgtgaatgagtttgtgttgtttagagtttctcctagaggcacaagagactaatggtgatgtcatactcccaagtggctttgggaaaaaaatgaggcaaagttaaaaaaaaaaaaagatattttacacctttaatttcttggagaaaatgtgaatgaaagtcacaatgtgacaccaccagatacctactagaaacaaaccatgggacattcaaacagtggaatgcttcttagcaatgaaagggagcaaactatagatacatgcaacacattggatgaatctcaaaggcattgtgttgagtgaaagaagccagtttcagtcaaacactgtatgattctatttatatgaacattctggaaaagactaaaccacagtgatagagaacagatcagtggttaccaggggttagggatgaggtagactgtgacaacaaagcaacagcaaaagggaattaaaagttttaggctgaggaagctgctctgtaccctcagtgtggtggtggttacacaagtctatacatacattaaaactcataraactggccaggtgcggtggctcacgcctgtaacctcagcactttgggaggctgaggcaggcagatcacctgaggtcaggagtttgagaccagcctggacaacatggtgaaaccccgtctctgctaaaaatacaaaaattagccaggcatggtggctcatgcctgtaatctcagctactccaggaggctgaggcaggagaatcacttgaacccgggaggcggaggttgccgtgagccgagatcgcaccattacactccagtccaggcaacaagagtaagactgtctgaaaaaacaaacaaacacaacaaaacaaaaagcctcatagaactgaacactgaaagagacaactagtaattggaggacatagctctcatgaaattggcaatattttatgagataaagaaaacagaaaaggagtaactttttttttttttcttaaatagcctcttgttcttcttacagttttaggctcttttttatacccaaatatttaccttatttttgcaggtttttttttttcctcctaaataccctttttggttaggtgtctccaatattctctaaaattctttaatttttaataaaccgtataggttaaatctcaaaacaaactctaraaaactactcatctgtcttcttatggatttttgaaagattgaaagtttctttttacttttctattttttaaatttttctttgagccctgaccatggcaaggacagaatagttcataagtgctatccatagggtcttggaaacccttggtacagatcgtttctgtagtgatagttgttctaacacagtctgaccgttagctttctctggtttagtgttagctctctcacataggctggtttcattctgagtcttatagtttctattatatttgaacttcttcctagtacaaagaataacaaaggataaattgttggcaagtttttttggcagaaaaggttcgaaaaggaccataaaatagtgagggatcatgaatgtgatgtgttcatttaaagaataaatacgggactagaatgtataatgggaacttagtgtgtaggcaccaaaagttaatctgaaaatattcagcatttttcaaattcttattagaatagtctcttcagcgctgagcttagcaacttaagcaagatgtggaaataattgccaaggttcctgagaagagccatgaaaatttaaataagagaatagaataatacctttaagagaaggttaaaagaactgaagcttcctagggaagagggggagaatttgaagcctatgaacagctagaacaggttggtaactcttcctttcgactggctactggtacaaaaagcaatgtcctttgtttttcaggagggatttgttggcatatgagccttttatctccatttaatgtataagtaaggcaacttacattattgtatggcggtacaataattattagttgcctacagcattgggaaacttaagtcaaagtcataactcatctctaactagtggtatgaccttagtccatttctttaacttctggggcttaattcttaattcctcttatgtttacaaataaagttgaattactctaagagtttctgtaactttggataataataataatgtttaccaacacttacatagtacatactatctgccagtcatggttgccagtatatatattcatatatattaagtatacagtcatgtgtaattcttggaactactatgtgaggttagtatagttactcttgaggaaactgagacatggaaggtaaagtagcccaaggtgacagggttagtaaaaaggaaagctgtggttgaagggaggaagtctggctaacagcccatgcccctaactctgaacttcactatatggtctccctctcccataattctactgttgctttgaattggatttaataaaaatgaagatttagagaaacttcacgatggtgtttttttgtttttgttttgttttgttttgagatggagtctcactctgtcgcccaggctggagtgcagtggggcaatctcggctcactgcatcctctgcttcccaggttcaagtgattcttctgcctcagcctcccgagtagctgggattacaggtgtgcaccactacacccagctagtttttgtatttttagtagagacagggtttcactacgttagccaggctggtctcgaacctcacgtgatccatctgcctcggcctcccgaagtgctgggattacaggtgtgagccaccgtgcccggcctgttttttttttccttacggtaaaatataaataataaatgcttaaattataaggaaggaacaactctagttaaaatgatccattcagaggaaaattaagaaggttactagttgttaacagtggttgtgtatatttcatataatatttagtgaccaaaagagaatataaatcaaactgaagttactctgaggactctatattctttgaaattgtacagtggctttaaaaaaactgtaaaaacaaacccgaatcactgtttttaaagtcagatttaagcagactgtgattctgcacgcctctgttgtcaggtcctcccctgggatactaatgtgttctggatgccatattttaagaaaagcccaactggcctgagggatgggatttagaactgtgttatgtaagaaacagtggaaggacctagtggaaggacctggggatgctcagctgggagaaggaagaatgatctcaaataaatgaaaagctatcctttagaaggattaaactccatgggatagcrttggaccagtaggtgctagttacagagtggcagactttagcttggtagaagccagccgaatgcaaaattggctgacttatgtggtgtcggtttctttgtcaggagattttcaagtgaaggctgagtaataccaggaaagggatgttacagagcagattcgtcctggtttagttggacaaggtggtgttttagttctctcatcacagtgtctggcgtacgatatgtattcagtaaaccactgttaaattaatgacttaaaaaatggaacaggataaatattctgattatttaagaccatagtgacttattttaaaatgacttgattctgtccaaattacaaggagagattgagagggaagaacatttaacttaatttagctataggtttgattgctttctagttcctcttatataccataactttcatcgctattatgtcagtaattactatgtaagtttaaaattgcacaaatttttatatgtatgcatgtctcagcttattaacttgtaagctctctattaggactatattttcataggtattccttcacagcaccaagccagaacctttgtgaaataatataacgtgagggatttcaaactcatgcgtgtgtgtgcatgcgtgtgcatgtggcaggagatggaggcttgttgcccctgttctgttcattttcacctttcatttatgtattctttttttttttttttttttttttgagacagagtcttactctgtcaccccggctagagtgtaacctcagctcactgtaacctccgcctcccgggttcaagtatttcttctgcctcagcttccctagtagctgggactacaagtgtgtgccaccatgcctggctaatttttgtcttaattttagtaaagacgggatttcactatattggccatgctggtcacgaactctgacctcaagtgatctgcctgctttggcctcctaaagtgctgggattacaggtgtgagccactgtgcccggcctcacttatgtattctaatgctgattctaacatttagaagcctttactgaaccaggtatgaatcgtctgatgtagaagggactatgttcagtgtttgttgcttttgtcaggtgcatgtgagggaaccctggcttgttcaacctgtcacctcatctttgaagatcacatatatgagaagttagatgcaatcactgatgaggagaatgacatgctcgatctggcatatggactaacagacaggtaagatttttggactgcttcaattgtaataataatctgggaacatagatgttgtattatgttgtctatgtaagaccagacccataaatgtaatagtgttctaccaggttaaataacagtcacagattttgagtatcagatatgtggcatttctctttgttttcactgttctacagtttagaccttatgaaattttacaaaagtaaaaaaaattaattggaagtataagttctagatcctaacacctcttctttagtctctttttactccaggaactaatatgtatcacaactgaatggaggggttaaatctaatgcttttatatttgataattgaacacaattataatggaaagtttcacctattagaacagaatttttaaagaaacttaatatataatagtaattatgttaaaatgaatagctctttttctaagtgtaccttaaagtaatcagagcttattcttgttattaattaatagttactcttaaaagtggtgagatttacagtagcaagtgacatcaagtgatatcttattttttaaaaaaattatctagtcttttgattggagtcaatgaaggtagctagctgatatactatttcaaggggtaagataatgagggcatattacttaattaaggttggctttgtttaactctagtttggtgaccttaatgacaaataattttttaaaaattaaagatagtaataatagttttatttcatgtgtattatatagctacaattttgttatacacttttaatataaactacctcatttaatcctcacaaacattttcaggtcatttgtatttatttagagaagaagaatcattttgttccttttatagttcatttccctcttggtggatgtgagactgataaccctgggaagagaaactggtgaaatagtatctctttggacaccaaagcagagtggattgtggctactgtctgcctgtcctctcacatcttcagtgccgtgttctctatgagcacctcctttcttccccttaacacagaaactaaatccaatgactgtattagtttggttctgagaattgtgtctcttaataagagagttaaatcatagcyaactgcttgctcttttatacagttacaatttgtagatgcctgtaatagataatattctaattgaaaagaaagggaaaagggagagctacagttagatacaaaaggtctataataaatgtaagctagcaagagtattgatgataaaatttccaagttttacagctacacaatagagagcaaggaatagcttttatggtgttttatagctggtattcttaagtacacagcattttagtagaaatactttgtgggaaagagtataatgggtttcacaggtagcatttacaaaacacattgacatatttggaatggaaagaattttgctcaaagctagtaaccacatgtaaacttatttttagggtatcagaaagtttcagaaaaagaaataaggaaattcagccttttagttcatatacttactttaaatactatgtaaatgtttttaatttttaagcaaaaacaccatcgtttctttttttttttgaggcagagtcttgctttgtcacccttgctggagtgcagtgacatgatcttggctcactgcaacctctgcctcccgggttcaagcaattatcctgcctcagcctcccgagtagctgggattacaggtgcctgccaccatgccccgctaatttttgtattttgagtagagacggggtttcaccatgttggccaggctgtctcgaactcctgacctcatgatctgcccaccttggcctcccaaagtgctgggattacaggcgtgagccaccgtgcctggcttcaatgttttattggttgtccttaaccttgattgttgatggatggatggatgatacatggacagcctcattgtttttttcatactggttacctatctcccttttcccattaaaggagcagccatgtcttattttaccattgtatctctaatgccagattcacagtagaggtcaccaactgcttgcggaattaatagttgatggaaagggagattcaggaattacctgtgagtttacattggatgattgtaattgctccctgccaccrgtttgcatgggtaatctacacagaggcctcagattccttatatgtraggtgaggataataatagtacctacctcacagtattgctgtgtggagttaatgaggaaatatatgtgaagctctcagaacagtgcttggtggagaaagcattcattaaatggtagttgttagcattgtaactaccatcatatcgacttatctattgggaacttactgtaatgcctaggcacttaagtattatttctaaccttcagggttaggcagtactatcaccatgttgtaggtggggaaacaaggtttagttatcrcggatttgcttaaggctgcacagctagtgggtaacacccctgatttaaatccagctgtgttgggccccaaagcctttagtcttttactatttcaagctgcttctctgagttgaaaaccaaaccctagaactaaagtaaacctaatacccagtatattttcaccatcagggatatgtggcaagagtaactggagaaaataccttccaggtttgcagaagtgtcaaaatgttgtgggactcaaagtgtgaaatcaggggagccttgttgtttgtctccttctctagaagtatgagacaccatctatactggtggatcttggagccagagatctttaaggaggtagaagaagtaggagagtgagaaactagccacagagcgccactgccttattctctagactgagcaggagctttttgttccgtctctttctgtgttcccataacagatttattgttcttctatcaccacacttgtggtaccctgccatgtttcactgataactgtttccatctctgtttcccttactaaagtaaccgttccttgaagaccagcatcatcttgctatctgtgtatgaataccaagagtaaccaacagactctctagagctcactgctgtcttaacgaatttgtccaaattggcttgccactttttctctcttgcagacagagcttaatgcataattgagtattgtgaaggctgtttccaattctacaaataaagaactcttgatagaggggattttttttctattagtaatcagtatttctcatggttaagcacactcctttactccaaaacttcctggtggttcctccttgctcaccagtgaaacacaggccccttaactgatattcacagctgcctgtggctctggccgcttttctggcccatcattccccttgtccttgtttacgctgtgcagcaaccaagctaaaacacccatcttgctttaaatgtgacttgagcttctttgcattgtgttgcctttgcctcacatacttttctcctttatcttgtactaaatagtaaatcctacctatcctccaaagcccattgtggacaacaccttctgtggccagaagtaagggctttcttcttagacctctcagagccatttggctttctccctcggtggcatttgccacagtctcacatgttaactatctgaatgtgtctcatctcatccctttgattgaaagtttactcattaatgctggcattagcaaccaatcctcacagcagtcctgtgaggaaktctcctgctcatcttgaagattaggttaggaaactaccatttggtgaggttaagcaagttgcctgtgaacatggtatattaagtgctggattctgcactgctggtctctttggctgtaactctgatgctgtctctttagtgcatcccaatgcccagaaaataagaagtgttcagtaagaaagtgtggagttgatttgctcttcctcattgacatttagtgttgtgcctttaggtgctcaataaatgcttcatgagtacattaataaaaccaagacctgaatatcagatttcatcaaattgaagacatgtcaattgtaagattaacatttctttttatatgccactaaggaagataaaagcactgctaattcaaatatggcacagtcttatcacttaacatattttctgaatattgaaagagttatttagacttatctagacatagatttgaattatatatcactgctaagaaaagaaaatggctgagtgcggtggctcatacctgttatcccaacactttgggaggctgaggcggatagatcacttgagcccaggaggttgagaccagcctaagcaacatggtgaaaccttgtctctacaaaaaatacaaaaattattcaagcatggtggtgcatgcctgtagtccccgctacttaggaggctgaggtgggaggatcaccagggcctgggaggtggaggttaacagtgagctgaaatcatgccagtgcactccagcctgggtgacagagccagaccctgtcttaaaaaaaaaaaaaaaaaaaagaaggaaaataaacacaaaataaaattagtagtaattctgcaaaaaaaaaaggaaattagtcattcttaaaatgacaaatatttattaattccaaatttacaccctgctttctttctgtattcttcttcattttcattttgtaatctttttagactattttgaaaagtaggtaaattcgacatgtgtacttacatactttgcataactaagttgaagagacccctgtatgaatattgtcaccaaatctgtagctgtgacatgaccattacctgacagtgtagcagtgattgtaagattccattgattttaagatgcttcttgatttccagagatggtaaaaatttgaraaaaaatatgctcttataattgatgacttaagtctatgtatttattccagatttcttcttttaaaggctttaaaaagtgtagctttcttttatagtctgtgtggttttaattatctaggaattgattaatcattttcttggccttgctaataacctcagttctccaccattgtgccttctgattgtttccttgcttgtcagctctttgaccaaaaagtagtggtctggtgaaacagttaatagataataggaaccaaaggctaaaatgaagctttggtacaccaagtttattgtattcatatttaccttttgttattctctagttgatagggttggttatatctgttttgacataaaggaaatttaaaaggttaataagttccctgactgctttgggtaagaaaatataaagactatcttaaacaactgcattgccttgtgaatatatatacgtaatactaaaccataccttcccccttttccatacagatcacggttgggctgccaaatctgtttgacaaaatctatggacaatatgactgttcgagtgcctgaaacagtggctgatgccagacaatccattgatgtgggcaagacctcctgaactagaacaaataggaatattttcatggaattttacctatttttataattattatttcttaaagtgattaaatgagaacatggatgagtggacttcatattatgactagctttactattttaattcaccttgcataactactgaattttgtcattcttgaaagtatgcaatttttattttggttatattacaaaaatgtcaatcaaatattaaaaaatagttartgtgatagaaaaaccttacatatttttttcttatgtttgtttagcgactttagcaaaatgttttcatataatctcatctgtttacctagaagataggttaaggaaatatattattattcctgtttgatgtgggtgaaggcagagatctaacctggcttgtttagggccataccactaattagaaaatctgtrctagaacctgtgtcttattcctataagctatgtgttcagactgaaactggagaaattatgactattttatttatagtagtagttaaatctgaatgtgtatggayaaaaatatttaattgctsagtaaactgcttaacttcaaagatagttattrmccttataaataaatatttcaaaattttgattcggaagactaagtctggacgtagacattataatgctatcaaagaagtttgatctctgttttgactaaactagaggaaaaatgattggatgtgtttattcttttctaagcagaatggtttaactttgtactctttgaaaaataatgctgatttataaatctctgcctataacagaatggaaaccttatgaatgaattgtgtttctctgtcctgagctggagaagggaatgagcaggctgacacgttgcacagccccaggtggcgccattctctcacgcaaggatggggctgcagggtgagcagcgtgggctgcagtgtgtcagtcccaggagtgagggagtggcaagcaccacagattaccacgtatgtgtggaagacattcgtacycttatctttactataaataaattcataaaagttaacaaaggggtacacagtatggtctttggaaatataataaaacatcaactaacttggactaattgtgaggaagagcagaacaaattagtagaaagaggttataagacaattgagttagcttcatgtgtattattgcagcttgatcatttatataaatatttgtctagtacaatgcttgacatacagcattgtgttatgcccattggggacacagaggtgaacaagacaaggaatgccatcagggaattcaccttttattaggaaaatataaaatatgtatgtatgtgcagataatttgcttgaactaaactgactagttctgctaaataagattttaaactaattcatatgtaaaaagtgattaggaagaacttgaagtatcatttgatgcttaataactattgagtagttttttttttttttttttggtggggggagcgggggacagggtcttactctgtcactcaggccagagtacaatagtatgatctcggctcactgcaacttctgcctcccagtttcaagggattctcgtgcctcagcctcccaggtagctggtactacaggcacggaccaccacgcctggctaatttttgtattttttctagggacagggttttaccacgttgcccaggctggtcttgaacttttgagctcgagtgatccacccacctcagcctcccaaaatgctgggattacagatgtgagccaccgtgcttggccataactattgaatgctttctatgtggagagtgcttgtcttaattttctgttgctataatagaataacacagactgggtaatttataaagaaaagagatttatttggatcatggttctggaggctgggaggtccaagagcatggtaccagcatctgcttggcatctggtgacagctttcttgctgcatcattacatggtggaagggcaagagaatgcgagtgagagcaagagggcaaaatgattatccttttatcaggagcccacttctgacataactaacccacacctgagataacggcattaatccattcatgaggtctctgctcttaaaggagatcacctcttaaaggacccacctttcaatgccattacactggcaatttaatttcaagatgagttttggaggggacattcaaaccatagcagtgctataattttaaagtacttcaaagccaatttattctcttaattagcttcattattcttgtctttgtgtgtggattacctaaactctccttccagagctactttaatgattatattcaaccaaagcactctaaaatttagagtataaattgtcttatatttcaaattagaaaagttcaaatgaagtttaattgtgttattttataaaaccttctaaaattattaaatggaggatataatctataattggtttgtataaaggtgatttttcagtttgaaaaaatccttctgtatttgatatatgtgtgttgtaggtaaatgtgttggtttatctattgctgcaaaacaaattaccccaaaacttagtagcttaaaacaagaatcttgtattatttcagacagttcctgtgagtcaagaatttagagtacggagcagggatagcttgtctctgctccacaatgtattaggtcttaagctagatgactcaaaggccaggttctggaatcatcttcaggcatattcttcatatgactggtgtctgctgttggcatcagctggggggtctaggagaagatactggctggaacacccacacgtggcttctctgtgtggcctggacttcctcacaacctggcgcctgggttccaagggcaggcatcctcagaagagcatgcatgccaggcagaactggatcctctttatgagctagttgtggaagtgacacagtatcactcccaactattcttttcattagaagtgaagcactaagtctggcccatcatcagaagggaggggtttccaagtatttggagatatcagagtaactgttaacttattggccccttatctcctgtgaatattggccttttaactaacagtgttctaaacttaagaggagctagctttttctcttacatttgaaagattcttgtgtctgctttattatgatggctcacttgttttattctataactcccaacattttgcttcttgactattgatttaaatgaaaggaaaaaatagcgggctctctttcaatgctgtgtaatttttttttttttttaccttttgtagtcatttttccaccaagaaaggcatcttcctttggtatagagttctatgtaattattggttatgtgctaatacttaatattgtatttggctttcacagataaaaccaacctataattaagtaattcagaaccactgaatttcttaagtgagctgttctaaggaattctaaaccttttgcctttaactgtgaaaatactgtctaatttttctgtctcaaaggacagctttccaattttcttactagctatttaagtatcatatgatgatccatgtggtcactgtagtggtcattcaacagttactagaatgattatatttacttgaaaagttgttttctaggagagacttcgactattcatatgtttccccatcttttctttttcttctttttcacaaatcttttaattgtttttccttccttaaactacctgaaattttgtggtaagccacattttggatcagaatttgttagatggctttatttatagcacaacttattgttctattacccaaaaaaataggaataatgtattttacattactaaaactttataaagtaaataaaccatagtaagacattcaaacattacatataaactttgttttctattagagaaatattgaagagtagaaatgtgatcttggttaggcaatgacaggattcttttaatgtgtcagtatgtcacatgatatcaagttatttttatcagatttttttctgtttataatttctagaatctgaaaaattagaaaaccagctggcaggaggaaggcatgatcagtagcaggcacaaatacatgtggctataatagaacagaaatggggagttaaaggataatttaaatctaccagtagcagcttccaaggggagttgatagaaaggatctcacggtgaggggcatcactgcctcagtgactgttagtagtaaactatctaatagaggtctctttcctttttcctttgactcccatttgcttattatctaagatattatttgtcatgtaatttttagacttgatttgatagtaatacaaaattaagcaagcagagccttttgcctttctggctcccttgcttactagtcatttctgaaatcatcagcactcagcttggtttacctcagtggcctttatcactgtcttgtctgtcccattactctgcttcagggcgccctttagagcatttactacatatggcatatgtagcatgtactccatgtagcagttagcacatcagcagttttcatcatcagtttttccctgatagaatagcatctacttttttttttttttgagacagagtcttgctctcttgcccaggctagagtgcagtggtgtgatctgtgctcactgcaacctctgccccacttgtttcaagcaattcttgggcctcagcctcccaagtagctgggactacaggcgaataccaccaagcctgggtaattttttgtatttttagtagagacggggtttcaccatgttggccaggctggtctcgaactcctgacctcaagtgatccacccgcctcagcctcccagagtgctgggattacaggcctaagccaccgtgcctggccagcgcttactctttttacgaataaggacttggttggtgttcaattttataactgcaatgtctatcatagtatttagcccacagtaggtatatagtaagtgtttgaattaatcaaatcctgatcttacaaggaatctgcttctagcatttggctctggcagtcacttgttatggatgggactacgtaagctcaatacagaccaatatactgagcttgcatcctaactaaacaggagtcaggtattacataggaatgtttttttaaaaaatgaggtaatttccactgcattgaaaaggacagtgttcaattcatcaactttttttttttttttaacatatcttggaggaaaccgccttcaaatgagctgaatacaggtccctctgctagttttgatcttgtaggtcagtggttctgaggcatgagtgctaaaggtcctataggtggcacatggactccaccttcctgcatcacgtgtttccgttgtgatcattcctccagatgagtgctcttccatcactgggaagcacctggcctcatgcatttctgataggccttggtgatgtcttaccagtcttaggcttcccatggattctaatgaggattcctcaaggtatgggaaagggataggtggtccacagaatattctccccaagcaagcaagccaaagactgagaattacagaaaaacacttttcttagtatttttaaattttaatctttttctttcatacagctttatttgtttcttatctgaactctaaggactgaatgagactgagagagacagcaaagtcagctctcttacgtagtaggggaaaagcatcaaatttatcatttaaagacctggatactgtttaaaaattatctgaaaattggaaatgaagaactgcatgtctcttcaaagttgtatatagaggattgtctaactgggtcactgaaggatgacttgatgttttattaggatgggggttaacaaactgtgtcgtaatacagttgtatgggaacacaaccatgctcattcattccttactgtgaatagttgctttcatactacagcagcaatgttgaagagttgtgacaatgaccacatggcctataaggcctggaatatttgctgtctggctctacgcagtttaagtttgctgacccctgtgcaaacttcgtcaaaggtaactttgacttagtgcgtactcttgattagtacccaaactctctaaagttagatattaacttagaaaaaattgataagtttcaaaaaaaaatttctctttggtagggaaggtaactccaagagttaacggttttcttgccttgaagggcgttatccagttttgtatctatctctgcagtcttatttcccattgacattcttttttccattgactgcatgtgtcagtttctcatgtcctgctttgagccacccattgtcattctgcaggtcccttcattaatgaattaaataaatcttagacacacgctcactatatattccaatgagagtgtttattgtatggagaattatatgttgtctccttgaggcttggcagtgcctcttgaatgtagtcatttaaccctcttgggcctcaggtaacttctctgttaagtggaaataattatccccagtaccttagccaaattactgtctcacccaaataataattggacatagttttgtaatttaagttaaaagatgttatgtttatgaaagagttttgttagctgcaaagcgctatttgttggatattgcttcttgaaaaaatacagatcttaggtattaaagaataggtagaagcctgttaggtatgaattatgaacagatattcgattctttgacttctccattcagaatagttatttttaaaaagcaaatatgtaaagatctttctgctcttaagcctaaccactcatctgatgagtgtactgaaaatagaagtggtttattgcaatatgtcagagaagtattctactgataaccacccatacatgaaatcttaaagaagtagttatgagttggaaatttctaggttgtaatcagaagagggagcaaatgacagaatacagctgtgcattgtttggaagtgggctggaaagaattcattgcctctttaattgaagaaaagcaaagagtgacactaatcaaagtaaaagaagggaagtactcatagctgaaaatggaactataaattgtttgctttttagagcaacatcagttctttgaaac

SEQ ID NO: 95777 - DNA, 39888 bp, Homo sapiens
taattagaaactgccagaaacagggaaccattgaaagtttttgcagtgacatatgaaagcatatttccataatatcaatctaatggtgtcttgataaatctactggaaagactcaagttggcgaaactaggcaagagaggacaaattaggaggctgcttccctggtagaaattctgtatttgatggaatttggtgaaatgcattctgtggggtcatggaagaggaatagcattgctattaggatatggattctgcagtcaaactgtcttggttcaaatcccaactccaccactttacacttgattgaatcctgtcttgcattacttggtaattgcttgatttatattgtatcagactaactactatttattgaatgtgtactgtgcatcaggcatgttatagcgcatacttattacacactttagacctcatacaaacccattaggcaagtattactagacctatcttatagatggaagaaaaggaatctcagacaggcttaaaaatttgcctaagaccccacagtaaatgaacagcagagccagggtctaaatctagatttttctggatttgattcgtggcccatgtttgtcccacaaccaaacatcatgctgcctcccaatgggggtgcaattttgactccttggctaggcgcagtagctcatgcacatgtaatcacagcactttgggaggccaagtaaggaggaaagcctgaggccaggagttcaagaccagcctgggcaacatggcaaaacctcgtctctccaaaaaatacaaaaaagtagctgggtgtcatggcgtccgcctgtagtcccagctacccaggaggctgaagcggaaagatcgcatgagcccaggagatgcaggctatagtgagcctagaacgggccactgcactccagcatgggtgacagagcaacaccttgtctcaaaacaaactatctatctatctatctatctatctatctatctatctgtctatctatctgtcctttacccagactgagggcaagggtagggggattttccttataccttttttttttttttttttattttttttttgagacaaagtcttgctctgtcgcccaggctggagtgcagtggtgctatcttggctcactgcaacctctgcctcctgggttcaagcaattctcctgtctcagcctctcgagtagctgggattacaggtgcccgccaccacacccggctaatttttgtatttttagtggagacgggggtttcaccatgttggccaggctggtctcgaactcctgacctcaagtgatccgcccgcctcggcctcccaaagtgctgggattacaggcgtgagccactgctcctggccgattttcctcatacattttaacagacatggaaccatctatcagaacttctgaactattactaatacaatcccagcccaagttaaaaaaataaataaaacaacttgacatcgtagtaactcgttcagtcttataccgcgtaatttccattaggatgtccgatatactaaaaatagatcggggactccattactaatctgaggaccccaagatgggaaccagacccgttattgccctcaacagttcacaggttaagggtctcaggaggcagtggctgagctggtgtgaaagggaagcaaagaaagttctattcgtggccctcctcccttcaaggctcccgtcgccccttagagaccctcttttcgcctcaggaactccccttctcttcccatgaaactttcactctcttggccgacctccccgtcccaatctcaaggaacctcacttcttccctcacggaatcccgcgtctcctcgcaaaaacccgcatctccaccacggaccctccaagtctgcagggaactccccagctcccatggaaccctcgtctcctcccggaatcccttttccattttcaaagaaccgcaattcttccttcacagaacctccatctcctcacccacccctcagcttcccaagggagcccccgactcccccagggagcccccactcttctcctcactgacaccccaggcccgcccgggccgggcctcaccccgcggctcctccacggagcgccggtgcagctcgcggtagcgctgcagcgaggggacgtgcgcggagcggctgacctcgggcggcggagaccaactccgcgcccggcctccggctccagcttcctcctggccccggctcccgctgccgctccggacccgctcctcaggaagccccatcacgtcaagttcctagaaccgcggccgcctttgcggtcgcggcgggtgccgggactgagaaaacaggccgaactagaggcggggcctccgtagaggggcggggcctggtgagtgggggagtggcttagtctggcgggtgggcggtgccagagggggcggggccgtgtctggttggggagggatcgaggttggcaaggacagaaatactataaggaaaagtcgagggataggggtggagctgacttgccggaaggagtgacgccgtcgagtgaaagcagaaggggcggggccgggtgtgacaagggagagggtggaaccgtggagtgccaagggaggggcggggccaggcgggacaggagaggaggtgggcccatggagtgatggggagtaacccggctggttgtgacaggagaggaggcagagccatggagtgaccagagtggggtggggtcttggagtgacagataaggggttgggttaaggcaaggatcgaaagggaaagggatggactaaggagaggagttgagtaaggtccatcgcggagccgccccgtgatctgattgcacagtcctgactatcaccagttccttccaggtgacacccttccctccaggtcccccctctctgagccacacccacattctcgtcctccggaaaaacttctcccatgaccttgagggcatgctctggcgacagcacctcctctctgctcaccctggaaccagctcagattttctccctcttatgaggacatgtcttcaatctccttgccttcacaaatctccatccagatctaaagtacaagactcaataagtgaagactaggagacaccttcaggttttttgtaataagcccacctcctaattgcacaaatggcaaacccaggaaagggaaggaactggtgcacagtcagagagcaaataacgaccaagttagggccaaagctaggttctttgactccagatttggttttacttcctcgtcaggcttgaagctaaggcttgtaaaatatcaaagtctgtgcaaataggaaaaatcattcacattctctttttttgttgttgtttttgttttgagatggagtctctcgctctgtcgcccaggctggagtgcaatggcacaatctcggctgactgcaacctctgcctcctggattcaagcaattctcctgcctcagcctcccgagtagctggaattacaggtgcacaccaccacacccagctaatttttgtatttttagtagagatgggatttcaccatgttgtccaggctggtcttgaactcctgacctcaggtgatctgcccgccttgggctcccaaagtgctaggattacaggcgtgagccaccacacctggcccacattctcttctttccttcacaatctctttactccaccaagggaaacccccaccaccaccaccacaacctgggcttaattacctctagcttctctctagcccctccaccccagaaagaagtcaggcaggaccctcctccatctctcacctgcactcaccacaaagaagtgcccacctcaccatcatttcacagactggctgtcaaggcaggaaggattcttaaatatctaactccaagagtgattctgaggcctgaagcgggcagctcccacctcctgaagcctacacaggccttgtgaccccatctagcccagcctcccttcccagctacttccctgcactttgcccagctgactgtaaaccttgcacaccctaagctgaaaaaaaatctctctatgggagaccgagagtctgcccaatcccaaggagggcgggaatctgagggcccactgaaggagtacagacctcttggggtggacatagaccccaccaaggggtcagatactttcataaaggagatattcactgcaccgaagggacacacacttcactgacagtacatggactccactaagggagcacagatgttgctgggggttctcagatctgactgaagggccctgggccctgctaataggacatgaatggctttgaagggcacttaccctagtgaggagacatggatttcccctaagagatacagaggatatagactttactaaggagacgtggaccctaccagaggactcaaactccagtgaggagctgccaactacactgtgggagtggacatcactgagaaggtgcagacctcatcaagtggggaagggtcccaccagagggattagacctcagggtagtgtaatagaccctacaaacatcactgaggagataagaactctctggggtggggaaaggcacagacaatgggtacactttttggtgatagactgttaccctccctgggcactcttaccacacagctctgagtagccctctccttcctatcctctctcccaagtcctacacccaaaccccagagctgttcccgacacactgcttccccctcctgtctatagttgctactgcagctgctgtgtatatagtagatttttcaagcacttcaggccatccctgagactggtctggggttgggaagagaaaggatgtgtgtatagaggcttcaccagcccccctctcttcctgtggacttcacaatgaaagtttggaacagagacctcgtaaaagaaggaacctccctcatccttggatatggagaagtagtacaagctgtagtgtggttggaattttggagtggagagaggatggatgagtttggagggaatgaatctaccagattaaggcaatgatgatgatgatgatgatgccatttattgagtaggtgccaagccctatactaatcgctttccattctgttacttaatcctcatgacaaccctctaaaatgggtactattattctttccatttcacagatggggaaactgatagagagactaattgtcttgcccaagattacacagtgtttgagcggtggcagaatagaacccagacatccagaatatggagacctattccccaccttgccccactcctgccctaccatcactaccaccactccttctttctcaaagtgtcctttccagaaccacatcaaaaactcttaaaatgatggtaaatattcaggttccaaggacctcatcccagcctactgaatcatgatctctggagtggaatctggggatccgctttcaaagatcctaacacacactaaagtttgagaatgcggttgaaagaggagtcagaagtgtcggggtgcgggaagggatctgaggtcagaggagggatctgttgtccaaagaggcgtctgcagtcaaagaggcctggagatgaagcatgggctggggttttcaaaagggtttgggggtgaagacagagtctgaagtcgaaaaagaggtctaaggtcggaggaggagtctaaaatcggaggaggaggatctcggaattcaaggaggggtctggggtccgaggagtttggggtcagagacaggatctggggtcgagagggatttgcggtcagtgaaagggtctggggcccgaaaaggaagcctgggatttgaggaggacactagctgtattcaggctggaaggaggaaggggtttggtccctgagctgcgtaaagtgcagagccactgaagtctcgcttgccccgcgctctcccctcgaccctgcgctgccttcctggctgtccatctacgcgcacctgtgtgccagctgcaggctgatagcgctgagcagacgggggcgagtcagaccgggacacggccgagggctgggagaggcgccccctcccggctgtcgcgaagatcaggccccgccctccgccctcccactcccccgccgcagccacttccggcaggcgctgcgctgctggggggcgcgggcraggatggcggcggagaacgaggccagccaggagagcgccctgggcgcctactcgccagtggactacatgagcatcaccagcttcccgcggctgcccgaggacgagccggcgcccgcggccccgctgaggggccgcaaggacgaggacgcctttctgggagaccccgacaccggtgaggcccgctgaccccgtccctgccctgccttgggaagtccccggtcttccttcttctgtgtcaagcatccacctccagctscatctccttaattcatccccatcttcttggatctctcccttcttctcccttgtctctgttaattatttggtgaggaagggggtgcatttctgccttggaggcgtaggatgcgacaacggagaggatgctagggactgcagtagaagggattgggcttaccttctgggaagaaccaactaacgatgaaggaatgttgaaggggagatcctaaggaaccrctgtgatcacccagaagagggctttctctagccacagaggacaggataggagaaaccaagtcagagactgcagcaagagggatccaatctgtgccttaagagaagttccccacagccagggattgtgagaagcagagggtctgggagaagcggagaatctcttcatgtctagggaggggtaaagagaatatgattcccctctgttgggtgttgggagacggaggcatggactgcatgacctctcaaaagtccttggggactagaacgccttcactctcctgtggattaccccacccctccctgagccatggatctggccggggtattagtaaggtactctgctccctaggaagcagtctccagaattttactgtgttcccctcagccctctgctggaattgtgagaagtgggggtaagagaaggaggagacagggattggaagagacctgggggcaaagagctctctgtgcattccttccctgctgctcttcctcctagccatgtggcccagcttcatcctcccctccattcttcatccttcatcccccatccctctgtccctgcacgtcacttcctggcattagagcatccttctacctcactctcgcttcctcgcagtgcctgcacttgagccttgtctcttaccagcctggcagatgctgcttttccggcttggcccttccctagctgctcccagcctgaaagccccaaattctctcctcctctacactttctggtcatctggccctgaccagcagcccttgccaacctgactggactgcactctgtatgkggtgggggtgaggagataatgaagatggagtttagaggtttatgggcgtcaaatgtcagggctgcggatcaaaacttattttccaaagggagtggaatcaggaggtagcagggagaggagtgggaagatgtgtcatgatggatatcagcctgaagctaggccttttattcagtagtcaggagtgagacttctggtcctaatacagccctgactcaccaagcgacaayaggcacacctaccctgtcctgggccttagtttcctcttccagctcaacagagaatgcctgtctctcttgacctagagattggaactgcctgacatgttttcttctggccctctgtaaatgtcttagcatttaccaaaatctatgattatttatttgtgcaattatctgattactccctgtctgtaagccccatgagggcagggatcatgattgttttgttcactctcctttctccagcatcaagaccttatccataggccgggcgcggtggctcatgcctgaggtgggtggatcacttgaggtcaggagttcaagacctgcctggccaacatggtgaaaccccatctctactaaaaatacaaaaattagctgggcatggtggtgggtgcctgtaatcctagctactcgggaggctgaggcaggagaatcactcgaactggggaggcagaggttacagtgagccgagatcactccactgcactccagcctgggtgacagagtgagactcagtctcaaaaagaaacaaaaaacaaaaaacaaaacaaaatacactggccggtgtggtggctcacacctgtaatcccagcactttgggatgctgaggcgggtggatcacctgaggtcaggagttcaaaaacagcctggccaacatgacaaaaccccatctctactaaaaatacaaaaaaaaaaaattagccaggcctggtggcaggtgtctgtaaccccagctactcaggaggctgaggcagaggttgcagtgagcgaagatcgcgccattgcactccagcctgggcaacagagtgagactctgtctcaaaaaaacaaacaaacaacaacaacaamaaaaaccctcatctctatttatttattgggcactcaataattgttgaatgaataaatgcatgagagagaagatctcaggatgaaagaatggtaggagagaggatgaaagaatggtaggagagagcaagttccaaaacctcagggagtattttgggaagttcaatacaggctctgccctcacccctgtatggaaatccagcagagatcctagtcatctgagcttctgggagtttataccttatgccaaatttatgtgtcaggtttgtgtgttgccatcatttcagtgtaatcatttgaatgccatatctcccaatcctacttccaagccccaaggcttcctcggttcacctggaccagactacaggctgacatggcctcctgtgttctcaacctggtggtaccatctagtggcacagcaccatcctcttagccaggaccttggttgtgcccagctagcctctagcctgccattccctaaacccaagtgccaggcaccccacatcaggctctgtgggaaagagagctagacagtgatcattccaaggttgggaaatactttctttcttctgagctccaagcccttgtgttcctttctctcccaggcctgtgtctccagatgtcctgcaagtgcctcatctatagcatgttctattttgaactcatcatatcccttccccatgcacctgctcttcctccactgccattctccattaatgacactgccagtcacccagtctcccaataatgaatggcatgctggactcctccttttcttctcatttccaaatggtgatcaagtgctctctgcacccctcctaagtatcttccaaattcctactcatcatccctgtcatcaccactgtagactaagccaccaacctctcttatcaatattatttataggcttctagctactcctcctgcctcctccctcttgcccagtccccaccccaatccatccatcgcttctggtcatgtcactccctggttcagacatctttggtgattctgccgggcatagtggcatacacctgtaatcccagcattttgggaggctaaggtgggcagattgcttgagctcaggaattcagaaccagccggggcaacatggtgaaaccctgtctctagaaaaaatacaaaaattagccaggtgtggtggtgcatgcctgtctgtagtcccagctactcgggaggctgaggtgggcagatggcttgagccctgaaggttgaggctgcagtgagctgagattataccactgtactccagcctgggcaacagagtgagacactgtttcaaaattttatatatatatatatttatttatttatttattttagtgattctccccttaagggaataaacaacaagccagggatgaccctagcctctagccaagatcactctcctaaactctggacttgtataatcaattttgttcaggattattttgttataaacccagtttaactgagctacatccaaaaagagaattttactgggtagcataactgaaaagtccagggatatggggtttcaggcatagctggattaaggtacctaaaaaggaatggacttttctccatcttttgctctgccttcttttggtgggcttcattggcagaaggcctcccattttattaggggcaagatgcccccagcagctacaggcttacatcctaccaacttagcaacttaagtgtaatagaaagaggagcctttctctttcccagtagttccagcaaaataacaaagtttgggtcttattggcctggctttgttcacattgcctgttactgcacagaggtacctgttctgactggccaagtctgagttatatactttggtcagggatgagggagttggctgagagaggagagagaatgttccttaaaagaaaattgaatgagaagtggtatccaagcagataccagggatgagccctgaaggtaaaaattagatatctactaggccaactgcctccagacagcttcttatggtgtcccacaaatttataataaccaaaattgaacttgtcatctttctcccaaaagacttattccttctggttgcaaattaatctttttccagtatcctgctgttgctcttccctatcagtaaaatcaacactgttattgccctagctgttccacagtgcacatagtaggtactcagtaaatatttttattgtataaatcaataactttatgatggactggtggagtagagagtcttgaatagctatgatagggacatgtcacctttacctcctggatccttatatctgactggagaaaacaaattaaaccatacctagggccgggcacagtggctcacgcctgtaatgccaacactttgggaggccaaggcgggcggattgcttgaggccaggagtttgagaccagcctcatggccaacatggtgaagccccatctctactaaaaatacaaaaattagctgggcatggtggtgcatgcctataattccagcttcttgggaggctgaggcatgagaaatgcttgaacccaaaggcggaggttgcagtgagccgagattgcgccactgcattccagcctggcaggaagattatctctcaaaaacaaagcaataagtaccaagaaatagcaacaaaaattagcttgtaaggttggtttctgagggtagaaatggctcttgatgccatgtggagcaatgggaaggaggctttctagttacacagactcttggtcctgccacttattcattttattttattttatattttactttaaattttttgagatagggtttcaccctgtcgcccaggctggtgggcagtggctcactgcagcctcgaactaccaggctgaagtgatgctcttacctcagcctttcgagtagttgggacaacaggtgcacaccaccattcctggctaattaaaaaaatttttttgtagagacaggagtcttgctatgttgcccaggctggtcttgaatacctgggctcaaacaatcctcccacctcggcctcccaaagtgctgagattacagacgtgagccaccaaacctggcccacttactcattttatgacctgagatgggcaatatcacctttcttggtcttagttttctcatctgtaaagtggcgagagtgggacttatttcataaagtcttgggaacacttcaataaaggaatatatgtaaaatgcttaatatgtagtcagcatcaataaatataagttcaaaaccctttcccacacttcttttgaaacttctaatgccgggtgctgtggctcacgcctgtaatcccaacactttgggaggctgaggcgggatgattgtttgagctcaggagtttgagaacagcctggggaacatagcaagaccttgtctctattaacaacaacagcaacagcaacaacaacaacaacaacaacaagacatttctaggggccaaggagagttctgtgcctacagtgggtgtttaacgtctgtttgtttggatgaattccagttttatttacagactctgtgatgctgatgttgagggttagaggcaagcattatgaagtgagggagagtctcagaagataacctttttttgaaaataaagtttaaaaacagcagggtgcggtggcttatgcctgtaatcccaacactttgggaggctgaggcaggcagatcacctgaggtcaggagttcaagaccagactggccaacatggtgagaccctgcctctactaaaaatataaaaaattagctaggcgtggtggcatgtgcctgtaatcccagctactcaggagactgaggcaggagaatcacttgaacctgggagatggaggttgcagtgagccgagattgcgccactgcactccagcctgggcgacagagtgagactctgtctcaaaaacaaaaacaaaaacaaaaattacatgttcatgataaaaaaaaaaaagcaatagtgaggaagaataaaaaagtcccctttcccattcctatctccctgtaatttttccttttcatttcaaaatatatgtgttaattttttttagagacagggtctatctatgttgcccagcctggagtgcagtggctattcatattgcaatcatactgcagctttgaacttctagactcaagtgatctcctgcctcagccttctgaatagctgggcttacaggcatgcacgagcactcccggtttatgtattgatttctaaaaaggaaatagatataagtggtaaaaatttcaaaccaaaaaaactcccaccccatctcattcccatcttcagtatcctttcccaagagtaacttctgtaataatttataaacatttcttgcatatatcatcattttatctatatatttggtttcttatttacacaaaagatgggactgtggatcatgaaggtctttaaacaccacaaggagcttagatgtttattatgttggcatcagtgaaccacgtattttaaacagaacaataaaatggtcagtttttaatattatcacatagacttttaaaggggttatagtcctagtgcatagtagcaggtactaaaaaaattgaatgaataaactttaaaaaacatattgtgagtacagcatgaggtcaaggtaaagtaaagactatttctttactgttcacaaacacctaggacctttaggccatttagggacctgggttcacagctaataacactcagaggagggagctatgggatggaagagggtctcagccctggtcaaggtggaaaaggaatagaaataacttggagtgagtacctacagtgcactgggtgcacatcacctcatggaatccttgtacccctatcccaccagttagggattagttccattactagaatgaggaaggtgaggtgcatgacttgactgacttgtccatagccaccagcaaatagtgagctttcagttctctcctacctccactcttatcgtcctccagtttgtctccagacagtagccagagggatcattttaaaacacaaaacaggccgggcgcagtggctcatgcctgtaatcccagcgctttgggaggctgaggtgagtggatcacttgaggtcaggagtttgagaccagcctgggcaacatggcgaaatcccatctctacaaaaaatacaaaaattagccaggtgtagtggggcatgcctgtagtctcaactactcaggaagctgagctgaggtgggaggatggcttgagcctgggaggcagaggttgcagggaggcagaggtttcagtgagctgagatggtgccactgcactccagctggggtgacagagccasaccctgtctcaaacaacaacaataacacacagaacagatggtttcacattcttgcttaaaactctctagtagtgggctgggtgyggtggctcacacctgtaatcccagcactttgggaggctgaggcaggtagatcacctggggtcaggagttcgagaccagcctggccaatatgctgaaaccctgtttctactaaaaatacaaaattactcaggcatggtggcatgtgcctgtaatcacagctactggagaggctgaggcaagagagtcgcttgaacccaggaagcggagggtgcagtgagccaggattgtgccattgcactccagcctgggcaacaagagcgaaactccatctcaaaaacaaacaaaaatagcctctcgagtagtgacctcccatagtccttagggtaaaacccaagcttctccccaggctagtagagccccacatatcttcctttttttttttttttcttttgagacagagtctcactctgtcacccaggctggagtgctgtggcgcgatctcggctcactgcaacctccaccttgtgggttcaagtgactgtcgtgcctcagcctcccaagtagctggaattagaggcacacatcaccatgcccagctaatttttgtatttttagtggagccggggtttcaccatgttggccaggctggtctcaaactcctgacctcaagtgatccacccgcctcggccccccagagtgctgggattacaagattgagccactgcgctcagtatgtatctggcctagcttccacccttactactctttccccatgcctgctacaccagagccgcccaggccttggttatttttttttctaatgtgccaagctcattcccactttagggcctttgcatccactgttccctctttccagaacattccacacacatactctttgctctacattatagctggctccttctcatcccttagttttcagcttaaaagtcacttcctgagaggccttccctgatttctgcagctaaggaatcctccctcccctaccaccattattctgtcatttcctcctttttcttcatagcacctgccacaacttgtaattatagactcctttgcttattggctttttcttccagggctctatgaaccacatgagggcaggaactatctgttcccgtcccctggcacctagcatagggctctccatatttaaggaatgagtgagctgataactgaagtgaggttggaaggcagggtccctccactctgtttatgtagctgcctccttgcatggaaggctgggccccaactggggcaggatccgatttccactgagggctggaacccccaccccaccccccaggaagtgttctcagccctgggccctgggtgccaggaaatttggcctaggtatcagggaggggcgggaatccagcctccctgctgcccagctggggaggtccctgtctcttcctagccgggcaccgttgccccgcctgtcctggggtgcacgcgaaaatgaggaaaggtgagtagtgctagccagtgcggggattgtgtggcaggggcggggcagggaaagcgctgaatagtcccacctggagggtgggcagggccagataggagatgcccagaccgaccccggctgcctgcccgcagacccggactccttcctgaagtctgcacggctgcagcggctgccatcgtcgtcgtcggagatgggcagccaagacgggtcgccgctacgcgagacgcgcaaagacccgttctccgccgcagcggccgagtgctcctgccgccaggatgggctcacggtcatcgtcacggcctgtctcaccttcgctaccggtgtcaccgtggcgctggtcatgcagatctacttcggggacccccaggtgagggggacaaatggggagggggaggaaactggggagtggggagtggggtaatgtttgaggaactgtggaaactggggaatggctgagtggtagaaggggagagagggtggtgacttgggagaggaaggtcccaaagagaggagctccagggcatgagggagacagaacaaggaagaataaggacagatccattaggaggcacttggggtaatgagggcagagtcaaggcaacaagggggcagggcttcgaccttcatgccgcgtagagttctagggctagtggaggtgccctagggaggtggacagctcctcctgcccccaccaagtcctctttcccctcccagatcttccagcagggtgccgtggtgaccgatgctgcccgctgcacttcactgggcatcgaggtgctcagtaaacagggatcttctgtggacgcagcggtggcagcagccttgtgtttgggtatcgtggctccacacagttctggcctgggcgggtaaggagcagtggaggtcggggtcccccaggcctacttcttgcctccaggtctgtaggcctcatgtgcagcactcctaacttagggagaggggcttttgggccccaactccttgcattttctctttctacaccaaatttcacccccttctccctggatggagtcagaagagcaaagctaccttatggaaaacctgaaagtgttttcagaagctttttttttttttttttaactagaaaaagaaatttgtaaaccataaattaagatgcacaggtggaggtatactgtcatcaattaaggcagagatatttcaacttctaggatcataaatccctatgggtctgatgaaaagccttgcaccctctgtcctccaaaaatacaccctgcactaagaactcttagaagttacaagctggccacccatgggcaacacccagcacacagactggtttggtttagacactgaactgtcttaaaattttgtttgcttttgttaaaaagttgagaattttcataaaaatccagatttccaacatctcttgaacaatcgggaaatccgataacaacttgggcccgcattctcacatggctgaagttacctggcgtggaatagaagctgcttcccatgatgggcatgcactgtccagtttgccgtagtttctaccacttcctcttctctgtcctgcttgccttagtttgtcatttggctgtgggcatttaagtttgcagcccccatcttagacgtaaataagctacagaaaaggaacaagctgacaaagttcctatcttggctcctgtaagaccagctctccaagccgtaccaaagaaattcctcttttggttttgcgtgttctatccttacataatccagtcctggcggaggggcaagggacataccaagtagacaggtgcaggaagctggcaggggtccagctctggtccagggtgggggcatggggcagaacatcctgttctgccagtctctgggcttttcctaatcagggattaaagtctccagtgacaggatagaagaggtccatggaccctgggtctccaaccctcttggttttgctcccatcctcttaggtggctgagtctgtgaatccatgctggggagggagctcagacacctgaccccaaatgaaaaactgagcctacagctctcaccactgggggtggaggggcagcagattcattgtacagaggggtagcatgttatcatcacacttccccttctgtgtctctcccagtgggggcgtgatgctggtacatgacatccgacgaaatgagagccacctaattgatttccgggagtccgcaccaggggccctcagggaagagaccctgcaaagatcctgggagaccaaggtggggaccctggtgagaagagagagttcaggggagtctctcttcattgcccttctgctaacccaagcattaatttgctaagtatttaccaggggagtgggaaaaagagttgagcaggattctcttaggctatgagagagtcaggcagcccccaagataaaataatgaactagaaaatctggaaccttacttctctgggaatcttacctatctggcacgtgggaaggaagaaaaaaggctactgagtaccctgaaatgtcacgaagttgatgcaatgaaactcacacatctcactctgagccagttgactataactttcccagcccttgatatattggaagattagaggggaattgccagaagtaaaccaactgtctgctgaaagaaaaagaagatatcgaataacttggaaaaatgggtacttagtgcggtggcaaaagccaaacacacccctgagtcttcagagctcagagtaatggtggggtgaaactgaataggttaaatgaaggtcctttgtccaccgttttaaaaggtagggttgcctgggcacagtggctcacacctgtaatcccaacactctgggaagccaaggcaggaggattgcttgaggccaggagtttgagaccagcctgagtgacatagtgagactttgtctctacaaaaaatgctttgaaattagccaggcacagtagcatgcaccaaggatcgcttgacttgagcccaggagttggaggccacagtgagctatgacyatgccactgtactccagcctgggtaacaggaaaaaaaaaaaaaaaaaaaaaaaaaggcaggggttggtgaaatccaatgtagacaggtgtctttctacactggttatgtcctggctcttaaaagagttttgcttaatttataaatcccccaactacggcagctaaaagaggcctttctgcatttgctgataggaagtcagggagatgggaggggtgcctgcttgggaaagcttgtccctcccctgggatacttggcctgtgtctctcccctgtgccagccatccctggcttggggctctgcggagttcagcccagcaccccccttccagtgacctggtctcctctctccctcgcctacccgccttgcccagcctgggctcttggtgggggttcccggaatggtgaaggggctacatgaagctcaccagctctatggcaggtaacaaccctccccctggggaccagggacccccgtttgcatctctccttgggtggccttctcctacttccctggattcttcctttcccaactccccctcctaatatccccttcccttgccaggactctccttcccaggaayccccctccccccggacccctcctcattcccccaggacctcctccaccccctgctctccggcccccccaggctgccatggtcccaagtcctggcctttgcagcagctgtggcccaagatggcttcaacgtgactcatgatctaggtcagtggggcctggggatttgggagagacatgaggttgatggagaagggtagaatctttgagatttggagcccaagccagagaggccctctcttccagtttgctcctcagaccccctccccaccttatcccaccctcacctggaggcggcctcaaacgagggggtctgggaagggcccttagacatccctgcctcgcacttaacaggctcctgggggtcagggcacttagggtgggccactcagcccccatctaccccatctattgcgcgtctcatccggtccagtcctggcgtcccgccctgcccagcctcccgtccctgcccctagcccgtgccctggctgaacagctgccacccaacatgtccgagcgcttccgggagacgttcctgccatcgggccgcccgccactacctggctcgttgctgcatcggcccgacctggctgaggtgctggatgtacttggcacctccggcccggctgccttctacgcaggtggcaacctcacactggagatggtggccgaggtaagtgctcgtgttgtgcgggtgggggcatgccccaaggtccctattgcaggacatccgcgtccgcattttttccttccttccctccctccctccctttctttctatattatttactgtggattatgttcatttgaaattctagaatagtcaaaactaacctctagtgacagaaatcagatcagtggttggtggggctgggaggagctgactgggatatgacatgaaaaacctcctgggatgatggaagtgttgtcttttttttttttttatgagacggagtcctgctgtgtcaccctggctggagtgcagtggtgcgatcttggctcactgcaacctccgcctcccaggttcaagtgagtctcctgcctcagcctcccgagtaactgggattacaggtgtgcaccaccacacccagctaattttgtatttttagtagagatgaggtttcaccatgttggccaggctggtctcgaactcctgacctcaagagatccacctgtcctggcctcccaaagtgctgggattacaggtgtgagcccccatgcctagccagaagtgttctgtcttgattcagaggtacctttgggcttctcaggggtgatgccagcctgtgcaggggcttgtcatgtccctcccaggcctggtggagacccagtatcggcctcagcttccctaagctcacaatccttccctgcttttgggttttctagggactgagggaagcacctctttcattgttgagtatcaagactggggagattgacacagaagtttaccatccaatcccaaagagtcccagtctcaggcagtaacagatgtgagaactgtcattaatagtgcaaaagtcctaatggaaaattaagttcatggtaaggatgcatagaccaactcagtggttctctcatctgagcaatggggatgattatatctgtctctgccatacagttgtgggaattaaataggtctgttattcattcaacattcacagagtgcctgctctgtgccaagccctatgctgggcactggatgtggcgatagactcaaacagacttaactggaaagtccaggagattactggctttagattcttctgtgtccagattatcaatccactgtgttaggatttgctctccctctttctctttctctctctctcaactctactttcctttgtttggattcactctcagatcctttccacctgctccccaccagcccatatcaggccatccttccagcaagctatcccagagaaagagcatttttccttcccagtagttccagcaaaagcctccaggttgtgtcttattagctcatcataggtttcatgactattcccaaatcaatcactgtggcacagaagggaatgccccaattggccaggcctgggttgtgtgccctttcctggaggtggcaaagggaatgcaggagattgtaacaaagaccatcagatctttgataaaaagaaacccaaagttgagtttattaacttgccagaaaaaggaactcaagaattcaaatgggccaggccatggtggctcatgcctgtaatccccactttgggaggccaagatgggtggatcacttgagctcaggagtttgagaccagcctgggcaacatagtgagaccccatctctacaaaacatacaaacattagccaggtgtggtggcatgtgcctgtagtcccagctactcaggaggctgaggcaggaggatcatctgagcctgggaaggttgaggctacagtgagccatgatcgtgccactgcattccagcctgggcgacagaatgagaccctgcctcaaaaaaaaaaaaaaaaaaaatcaatgtgtaattctctgaagatagataactcaagggtttcaagtactataaggtacaaaaaaggaaaggattcagagtggttatgctaatttagggttgacagcacactggataggatggaatgagcccattggtttgtacaagattggttcattggtcaataatgagggcttggttatgtccaataagggtcagtccttctaggatcactcaaagtcatggttttctagtggctttagttggttgtggtgagatgcagcattcagttttggtatctcctaggcaagtgtgccataagtagaaaaccttccttttacataggcagagagagcagcaggtacaaagacacgaaggcatgagttcaggaactgcaggtcactctgcagctgcatagagctcactggggaacagcaggacatgaggtgggaggggtaggctggggccagatcacaaaaagtcttgaatggcaagctaaggaggtcattcatggaatgtacccagtgtgatgcctggcacatgataggtgctcaatgttagtgcttttcccccttcctttttcctgaggtgtctagggataatggggtctctaaaggccacgatgggggttgcagaaggcacagaagttataaacagctgatctgtctgtgatccaaacgtgttataggccaaaaccaccatgtcacagtggtgggaggtcattccctcattctcttccctccaggctcagcacgcagggggtgtcataaccgaagaggacttcagcaattacagygcccttgtggagaagcctgtgtgtggcgtgtacagaggtgacctctcccccggctcccagggtcccccctcaggagaagcctcccagtccatggccacatcgttttggcctagagactcctctccatttcacaggagagaaactaaggcagtgagctacctgggcagtcaactgttgaagcaaaccagagtcagcccaccttctgaaaagtagctgtggggtcagttaccccaagtatttaggatattggggggtggacctggtcaaagggtccaacctggaagttggggttctggccataggttttcttgatttgggctctgtgttgcctctgccctttccccagcagcgctgtcactgccctgtacttcctaagaatttttaagacaaagtccatccaagcttcacagtagaatgaacctttcaagacagtcatagacccagctcctcatagtgccaaaaagaaattgaggcccgaggagggaatataacaactggccaaactcaagaaaaccaacagggaacccagaaaaccaagcttatgacatgggtggggtccatgtttactgaacccaaggtggtaggtgctggatttctcagaagattctcaggttctttcccttctaggagagccagatcacatcaagccccaggaaagggtttctctgagttcaactttccaggcctcaatctccaacctgattcctctgccagaggcagtggaatatgaagcaatggaaagagcctatcagctgggtgcagtggctcaggcctataacyccagcacattgggaggctgaggcaggaggatcacttgagcccaggagttcatgaccagcctgggcaacatagtgagacaccgtctctataaaaaatttaaaaattacccaggcgtggtggtgtacctatagtcctagctactcaggaggttgagatgggaggattgcttgagcctgggaggtcaaggctgcagtaagcatgattgtgccactgcactacagcctgggtgacagagtgagaccattatcacacacacacacacacacacacacagaaaagaaaaaagaacaagcgtagcgttggagctaggaagacctgggtttgagtaccaactgtgccatttaccttgaacaagctacttcccactctgagccttggttccctccttaaaatggaaataataatagtgcctacatcttaggatgcccataaggatttgatgagatgatgtaggaagttgccctgatcagagcatgcactgaatatagattttccatttccccttcccagcctgggttgtctcaacaatgctagtaccttgagtgctctggattccccttgtctctctgtaccacagtttctggacctatcaaatatgtgtgataacagtagccacagtgaggactaaatgagttaatgttagtgttatgcatcagctattattcctttgatgtccaaacatctagtaacagaataggaagagaaggttgctgctgccaagaagtttggggctggatgagaccatcaggagtcatggataatatcctggcctatgggagagctaaaaggagacacatgacaggccaggaatatgaacatctggtcacctgtttctgctgtgctctgctgatagcctgcagtgtgactctgggcaagccacagccctcttgagccttagttttctcaaatggcagaggaaactgaagaccagtgttctgagttsaagtcctggccctgcccttgacttgccatgtgaacttgaatgagtctctttgcctctcaatgtttcagtttccccatctggtgagggagttcagcgcagtggtctcagtgtgtgatggtggaatgtggagatgggatgtgggatgtgaaggtgccttgacccctaccctgccatcagtcacttcctgtcctttcaggccacctggttcttagtcccccacctccgcacacgggccctgccctcatcagtgctctcaacatcctggagggcttcaatctcaccagcctggtatcccgagaacaggctcttcactgggtggcagaggtaaggctgacccgtctgcctttccctggatttaaggatattaggagtggggagattgggtactgccatagggcaggactaaatcccctccaagttttctcacacacgaaagtccactgggtgtgggttctgggaggggcctggcagcctcttccatatccctgctgtattttcagaccctgaagattgcattagccctggccagcagactgggagatcccgtctatgattctaccatcactgagagcatggatgacatgctcaggtgggtcttgggcaggacctgggggctacagaggcagcrgtgggtgtggggaaagggtcaggagaaaagcagctggtatagcaataaaggcctgaaatcctaagtcaatttcagctcaaccccaactcacaacgtgacactgggtgcctctccctgcacctcacctttcctatcagcacaatgagttggcttactkcatgtggctcttaaatttttttgaggctagcatagcacctatataagcccatctgctcctccttttgagtaggaaaagaaagctcaataccaaacaaaagccaggcacggtggctcacgcctgtaatcccagtactttgggaggccaaggcgggtggatcacctgaggtcaagagtttgagaccagcctgaccaacatagtgaaaccctgcctctactaaaaatacaaaaattagccgggcgtggtggcgcgtgcctgtagtcccagctagtcaggaggctgaggcaggagaatcacttgaacccgggaagcagaggttgcagtgagcygagatcatgccactgcactccagcctgggtgacagagtgagactttgtctccaaaaacaaacaaacaaacagtctccaagcaaatactgaaggtggtggtaatacagcttcattagcaacataacatagtagtagcttgtgggctctggtgagactgccttcattcaaattccagcttgacccttcgctagctgtgcagccttgggcaagtggtttaaactctctaaatctgtttctacaagggggcttgacaataatggtatcaaccttgtaaggttgtggtaaggactaaacaaaatcatacatgtaaagctttgtttggttgaaaattgaataaatgtcttcaagtaatctttggtaacttattctctaatcagctatggataatccaacacatagttattaggtaagaaaccctcagttgaattttttttttttttttttgagatggagtctcgctctgtcgcccaggctggagtgcagtgtcatgatcttggctcactgtaacctctgcctcccaggttcaagcaattctcctgcttcagcctcccgcctcagttgaatttttaaaagtctggagcattacatattgtttctaaggtcaatgcaaactttgctctaaaacacacacacacacacacacacacacacacacacacacacacctatatgaaatctattcaaccagttcatccagtaaatagttattgagcacttactctgtgccttgggaaaaaactctaaaagaaagtaaagatcctgactggatgtggtggctcatgcctgtaatcccagcactttgggaggccgaggtgagtggatcatttgaggtcaggagttcaagaccggcctggccaacatggtgaaaccccgtctctactaaaaaaaattagctaggtgtggtggcaggtgcctgtaatcccagataatcgggaggctgaggcaggagaatcacttgaacctgggaggcagaggttgcagtgagctgagacagcgtcactgcactccagcctgtgtgacagagaaaaactctatctcattaggaagaaaaaaaaaatcctcatatacaaaatcctcccccaactaaactcttaataaaactttagactacaaacattagtttaaatgaatccagtttgttaattcaaagcaaatattttctgatccattatgcaccaggcactttcatagaaaggattaagaagtcagataactaaaaggctcttgatttaaacattaaataaaagttggttccagaaaagaatctaaataatacctaaatacattcaacagctattttctgggtatttcttatgtgcaattaatgagcttctgcactcatagacctagtagtccagtgagggaggtagatttcatcaaataattacacaaacaccacaaaagtgaggtaggtggggtgtattgagagcctgttgtttgctcatctcccaccccttgtcttttcagcaaggtggaggccgcctacctccggggccatatcaatgactcccaggcagcccctgccccactcctgcctgtctatgaactagacggagctcccacggctgcccaggtgctgatcatgggacctgatgacttcattgtggccatggttaggtatgccagctcagactcagaacctggaacaagggatcctctgaaccaagagggggtgggggctgggtagaggtgaggatgggccagggctcacccaaccccacctcggcccccagctccctgaaccagccctttggcagcggccttatcaccccctcggggatcctgctcaacagccagatgctggacttctcctggcccaaccggacagctaaccactctgcacccagcctggtaggatttgcttccctgctttcctggggaccctgaggcctataggtaggaggtgcaatggcatggctgcccctttctccctactttctccagaatcttctagtataaggaagcctaaagaagaggttcacctcatccctagccctgctaagtctgggacatggagcctggtgggtctgaagaacccttgtcccattctgtcactgtcttactgtgtgaccttgtgaagatcttgccctctctgggcaatttcttcacctgtacaatgagggttttggctcctatttgatgttttgggcattttccagcactagcggtctgtgactatgtgagcttgagctgatggggctcagccctatggttgggcaccaaagagggacccaaggaggaaggatttaataatttttatctagttaaaaatcagcactcttacaccccgccatctggggccccagcagggcaaagacacatagagatgatcagggtggggttatcctgttcttccccattgccatctttcttggcttggtcctttctcctgtgacccgtagcagcctcatagctcagtggatgtacttatcactcccccatccaccccacccatccaggcaccctacccatttcacagatagcaaactgttgtctgggaagggaccagtctcccaggaaaactgggcctgtggaagatgtagaagagggagagcagttggaagggttgtggaggggccctttcccggtcttgtcccaccccacctgccccttgtggtctctgtcctctaacaacaggagaattcagtgcagccagggaagcggccactctctttcctgctgcccacagtggtccgacccgcggaggggctctgtggaacctacctcgctctgggggccaatggagctgcgcrgggcctcagcggcctgacacaggtgaggtttacgccatggttggcctttttcagccgggagccaagctgtggcctagactgcagatgcctgtcatatctgtggcttgtttccattcctcatgcggcaaacatgggctgaggctgttttgygccaggcgcatcctgggcaatgtggacatgggctgcgctgagtttcttagtgaaaatggagccctgatgctccctgtctttcccggttgcaggggaaatggcagggtcagtagattgaaaagtggggttagcatctgggtggcctgggttctgttaacctcaagtcccattatacctctacccagcatctgaatagacaaccagccctctttagggtgggatttgaaaggaagggcctgcttttctccagaacacctcagaatggctccatgaatgtcttgagaacctgatatatatgccaggcacctattttggcaggtggtgagttaacgatcttaagttctggaatcagacactcctgggttccggcccaagtgctaccaatttgtaactgtgtgatgctggagcattcacttaacagctctgaacctcagtctcttcatctttaaaatggaaataataacaatagctaacatttaaagagttcgtactaagtgctgggcactgtgttatgtgtgttaaccattttaaccttcccagttctggagagaatccttatttctattttatagataaggaaaccgaagcccagagaggttaagactttaggtcaagtaccttcagctagaaagagcagggaggcagtttggttccagagcctacgcacactcctaaccactaagttaaaagcacccacattgtgccctagaccactcctagctattaaccttgccctatccagagagaaaagaagggagccccgggctagattaaagagacttggttctagtggtgtatcttccctggcttcctctaaactctggagtaagtcattttccttgctggacttcactttccctctctgtgaaatggaaacagtcatcacaggcctgcctgtcttccagggctgttaggaggctcagatgacacccggtgtaagaattctcaagactaaggagcctggaccaagggtgagagctgaggaatcctggaccatcacccctgggacagccctgatttttctgtaccttggctaccacaggttctgctgaatgtcctgaccttgaaccggaacctgagtgacagcctggcccgcggccgcctacacccggacctgcagtccaacctcctgcaggtggacagtgagtgcagagcagagacctcgtggggcgggcacagggacaggtagagaaaggactcctcccaagggtgcccatgcctcaaccagcaccaactgccagtgaagtttggttttatttggcaaatttctattggagcagtgaaygatctggggattggaaccagtcttgccatttcctggttgtgtggccttgggaaatccatgtctcaactctgagcctcagttttctcatttgtaaaataagacacagttgttcattcttcaaactttcatttactcaacagtttgtattgaacacgtacgtgttccaggcatcatcctaggtgctggggattctgcatttacaggcaaacaagaaaataagtcatcaaagaaatatgagacaaataaatgctctgccaactgtcaaagcagggtgatataataggacggactcaatgatcaaggaagacttctctttggtggcatttaagctgagatctaaagagtgagaaagaaactgggtgcaatggctcagacctataatcccaggctgaggtgagaggatcgcttgaggccaagagttcaagagcagcctcagtaacatagtgagacccccctccacccccccgtctctataaaaaaatttttttaaattagccaggcatggcacgtgcctgtggttctagctactcgggaggctgaggcaggagaattgcttgaaccagggaggcagaggttacagtgagccaagatcacgccactgccctacagcctgggtaacagagtgagatcctatctcctaaaaaaaaaaaaaaaaagtaagagagagcccactatacaaagaattggtgcagagctttgtaggtcaggggagcaagtacaaagaactcagggcaggagtgggtttggtgagtttgaggactaaaaaggwgaccaaggtaagcaaggatgaaattagatcagagaggcaggcaggcgccggatcgtggaccttagggtgaggagacggactttcctctaagaaaagggcttaattttggcacagctgaattttataaacaggaaagtatctgcacctttgaggagtttttattataacagacaatgtattaatatgacacgagtccaaaagaatacagaattgattgagacacagtccttgcctgttcaatattattatccccattctatagaggaagaaactgaggctcacagaagttataaactagtcaaagatcaaccactaagtggcagaacttcaattaggacacacacctggctgataccaaagactctattctttactgcacagctcttgatatctcctggactgaatcacattagaagcagagaccgcgatcttcaacaatcacatcctgtggttggccagcgacacttggatcccagctgatagatgacaaggccacatccttgaaattgaattttgttcaacaaatatctgctggtctctgttgaatgtgaggctctgtgctaagttatttgggctcagcccagtcctgccttcagggccttagtgtaagatggaggtacaaggagtgggggcttggtgaagggaaagttcatctacctgaggccctggggaggctttatggaggaggtgacaagtagcttggctttgaagtatgagtaggaatttggtatgtggaggtaaaggacattctggacaggaggaacagcctaggcaaaaaccagaatgaatggctcagagagcagccaggaggctagctgttgtttcctagagttctcaatttacccagcacctttgtgacttttgccacatttgcacaccatctaaaccaatatgtacataacatgtctctctaaatgaacttcctttttagcctaaatgtattttattatttttttgagatagagtctcactctgtcrcccaggctggagtgcagtggtgcgatctcagctcacttcaacctccrcctcctgggttcaagtgattctcgtgcctcagcctcccgagtagctgagaatacaggtgcacatgccaccacacccagctaatttttgcatttttgtagagacagggtttcaccatgctggccaggctagtctcaaactcctgacctcaagtaatccgcctgcctcggcctcccgaagtgctggatttacaggcgtgagccaccatgcccggccctaaatgtattttaaaaatagaccttatatcataatcacaaatggaaaaatgacatcatttgccacaaatagatgacaaatagctatcatctatttgttagctatacaaatagatatgtgtagtttttagttaaatattgttgcccatggaaggctctgagactgctttctccattaaagaaggagattaggaagcgttagagagcagactgaaacttgttccttgccataatcaaaaggattgaaagtgaaccacaaaggaaatagattttcgattaagtgatttaatgctattcaagattgggtcttcatctcaagagctaccaaaagtcttcctattagggaaagaagaagactagatctttattgagaagcggtaggatgtggagttacagggcttctcacagaggtcagccttaagattatccagttgggaaggggagacacatgacctgatttgtcttatttaggggaggtagattgaggggaggagaatttaagtcagggaaatatgagaagcagctgggatatggcccaggcaagagatgatgagggtctgaacttatccaatgggatggggatttgttcatctatgtagtaagtatctgctcaatatttactatgtactgaccctgtcactggagatcaatagcaaacaagacaacgttcctaacttcaaaaagcttataatctagtggagggagacacagtaaataaataaacaaatacaggtagcagtaagtactttggaagaaaaccaaacaaggtaaagatggtagggactgctgttttaggtaatggtggaggaaattcttgaagaggtgccaaagactggatagcagtaagggggccagcagtgtgactttctaggagagcattccaggcagaaagaacagtaagtgcaaaggcactgaagtagaaacatgtttggccttctaaagggacagcaaggaggtcaatgtggctggaatacagttaagcaaggtgagaaatagaaggaaatgaggggaggaatttagagaagtagcaaggtcccaagcaatgttgggcttagaggcaccttggtaaggactttggattttattctaaattccgttgaagctgttggagggctttgagcaggggaggtgacaaggtctgactaatggtttaaaaggatccccttggctgctgtttgaacaggctataagaaaggcagggggccaggcgcggtggctcacgcctgtaatcctagcactttgggaggctgaggtgggcagatcacctgaggtcaggagttcgagaccagcctgaccaacatggataaacccccacctctacaaaaaaaaaaaatagaaaattagccgggtgtggtggcgcaagcctgttatcccagctactggggaggctgaggcaggagaatcgcttgaacctgggaggcagaggttgaggtgagccaaaatcgtgccattgcactccagcctgggcaacaagagtgagactccgcctcaaaaaaaagaaagaaagaaagaaaggaagggagggagggagggagggctggaagcagggagaccagtaaggaaggaaggaagggagggctggaagcagggagaccagttagtggattatgcagaaatcctggcaagtaatgatggcagcttgactttggcaggtggagatgaagacccacaaagcccctttttcttttttctgcctccctccctccctcccttccttccttccattttctttcttttctttttttggagacagggttttgctcttttgcccagactggagtgcagtggtgcaatctcagcttactttactgcaacttgtgcctcccagggtcaagcgatcctcctaccttagcctcctgagtatctgggactacaggcatgtaccaccacgctcagctaatttttaaattttctgtagagatggggtctccctatattgcccaagctagtctcaaactcctgggctcaagtgatcctcccaccttagcctcccaaagtgctgggattacaggcatgagccactgcacccggcctgtcctgttttcaatattaagaatgactgcatattattgatcacttactgtatgcaaggttcagtgctgtgtgtgcattatctcctttagtccctgcaacttcatgttctcatataatccctatttatgcatgaggaaactgaggctcagcaaggtaaagtgatttgtccaaggtcatacagctctgtggtggagcagccaggatgaggactcaggtctgactgtaggactcttgaactagtgctctgtacattctgaatgtgtatatgtcggggatggttttcaggtgagttcacagaggaagagattgagttcctggaagccaggggtcaccacgtggagaaagtagatgtcttatcctgggtccatggcagccgaaggaccaacaacttcatcatcgctgttaaggaccctcggagcccagatgcagctggagccaccatcctgtagagcagcggggtggggcggggtctctgctcccccactttgcatgttcccagagtccctccttctcccaggtttggtctcagggggaccccagggatgccccagatcaggggccagaggggatgcttagcaaacccaatcccagagtaactggaaaattctccatcaggaggcctgtggtggtggtggtggtggtggtggtggtggtggtggtggtgagtgtcagcatctacagtacagccaggcaggcaggaccttgaggaatcagactatctgtctgtgtgtcacctctcctccttcagccatgctggccccgagcttagggatgtgcttgcaaacccttctcaagggtctcacaaccccaacatcttcagactggcctgacctgggccttgtcttccagttcctttctcccattcccagcctcatttcttaaatgactaggaattttttaatggaccatcatagggagggggtgctcctcttttcccaccaggttgaggtgggggccttgcatcgggggtccccagggtatggggtaggggtgggggtgggcaccagctcaggggcttccatttgcaaagggaaattaaagaaagaatgttgcttaaccatggctctggtttaatttatatttaactgggttgagagtgggagtgggagaggagacctcggctcaccctgtcccagtaaccgattcaagagtaacctggagtcaacgttgaaggactcataataatatctgtccagctaagacatgcaccaataataataattcataacaccaataactataatatatagcatctaatctttattacaagcctcatgaagtaggtactaatattattgccattttacagatgggaaacaggccaaaagaggttaagggacttgtctaaggttcttcatctattaaatggaagaactggggttcatctcagcatgtccaactctggaatttgtgctcttaaccaattccacacctattagttgaactctttgttataaagtatacgtcatatagtatatatcagacaataaataccttttatagataatatcattcatgcatacattcttctatccattacattccaggtactttgttaggcactagagattcagcactgaacaagacaggcttttcttttcttttttttttttttttgagacagttttgctcttgtcacccaggctggagtgcaatgacgtgatctcagctcaccgcaacctccacctccccagttcaagcgattctcctgcctcagcttcctgagtagctgggattacaggcgtgcaccaccacacctggctaattttgtatttttagtagagacagggtttctccatattggtcaggctggtcttgaactcccgacctcaggtgatccgcccacctcagcctcccaaagtgctgggattacaggcatgagccaccgcgcctagccaagacagactttttaatgggtttgcagtctatcggggcagtcaaatgttaaagaaataagagcacagataattcgggtaattgccatcacaataaactctatgagggatactaagagaatgtatatcaagaaagttaatctagtttgaggatccgcaaaagcttccctgagaaggtcatgagaatgaataggattgacaggaaaggattagatatgggatgtgggaatgtcattctaggcaaagggaacagtatgttcaaaggtattgtggtgagaaggaatgtgtcatgttttaggaggtgaaagaaggcctatatattcttcctagagcaggggttggcagagttttcctacaaaggaccagagagtaaatatttcagattttgtaggtcatatggttcctgtagtaattactcaactttgttgctgaagtgcaaaagcagccatagacaatgtgtaagacaacatcctgatggctgtggatgtgttccaatagaactttcttttctttttttttttttttttttttttgagacagagtctcgctctgttgcccaggctggagtgcagtggcgcgatctgcaagctctgcctgcaagtggagctcactgcaagctccgcctcccaggttcacgccattctcctgcctcagcctcccgagtagctgggactacaggagcccaccacgcccagctaatttttttttttgtatttttttttaatagagacagggtttcaccgtgtagccaggatggtcttcatattctgacctcgtgatccgcccacctcggcctcccaaaatgctgggactacaggcgtgagccaccgcgccccgccagaactttattttctgaaaacagaccccttcacgcctgtaatcccagcactttgggaggcacgaggcgggcggatcacgaggtcaggagatcgagaccatcctggctaacacagtgaaaccctgtctctactaaaagtacaaaaatttagccgggcgtggcggcgggcgcctgtagtcccagctattcgggaggctgaggcaggagaatggcgtgaacccgggaggcggagcttgcagtgagccgagattgcgccactgcactccagcctgggtgacagagcgagactccgtctcaagaacaaacaaacaaacaaacaaaaaccagacccttactgctataagggcagtagtgtgctgacccctacactagagcaccccgaggggatgatgagatgagatgaaactggtgagataggtagctcattcttatgaggctggtattaattcccccattttattgatgagaaaattgagagacccgaagcaacttaccagagatcacccagctggtagttggcagatgcataattcaaaagcaatctgtttgactccatagactatgtctctttctttctttctttttcttttcctttccttccttcctacctttctcttttcttcttttctcccttccttcccctcctttcacagatccatgattcaaaagccatctgttcgactccatagactatgtttcccttcccttccctctcctcccctcctctcccctctccttgctctctccttcccctctccttcccctccccttcccttcccctctgtctcactgtctctcttttgctttccttctttctctttcttccttccttccctccctttctttccccttctttcccttcccttccctccccttcgtttctttatctttttttttagagatagggtcttactctgccatccaggctggagtgcagtgttgcaatccctgttcactgtagcctcaactttcctggtcaagcaatcctcctgcctcggactcccaagtagctgggactacaggcgcataccaccacacctggctaatttttcatttttttgtagaaacaagagtctcactatgttgcccaggctgatcttgaactcctggcctcaagtgattctcctgccttggcctcccaaagtgctgggattacaggcttcagccactgtgcctggccacttctttaaaaatttttaaattattttattggattgcagatataacagtttttcaaatatcaaatactttatagatatataatgtatatctgtaatccaccccttcaaaatccaaaccctccaaaaatctcattgtcaataatttaatacacattcctccaacttttttctgtacactaacatatattctgtttaaaaagtaaaaatgggactatattttcacactgtctacaacttccttttttttttaacttaccaatagagcgtgggcattttcccctgttaatatatatggatccacttcattatttataataatgcatcgtagttcactgaagggtttaaccagtttccttttgatggatgtttgggtgatccttgccctgatatctttaggtgcctgagccatgcctgtagtcatacctactctcccaggctgtctttcaagtgacagagtgtcttagttcatttgggctgccataccaaaatatcataaactgggtagattggagcagagattagtgaaatagagaatagaaaaacaatagagaaaatcaataaaaccaaatcctggctctttgaaaaaatcaacaaaattgacaaacctgtcccagattgatcaagaaaaaaagaagactcgaaattactagaatcagaaattaaagatgggacagtacttacaatcttacagaaataaaaaaggatcacaaagaaatactatgaacaactgtatgttaataaatcagataacttagatgaaacataaaatttcctagaaagacacataccaaaactgactcaagaagaaatagacaatctgaggagatacataacaaataaagagattagtaatatatactaaaaagcaaactacttacaaagaaaagcccaggtctcagacggcctcactagtgatttctacaaaacattgaaaaaaattaataccaattctataaaaaaagctttcaataaatagaagaggaagaaacgctttctagtttattctgtgaggctagttttaccttgaaattaaaatccaacaaaataagacctaataagaaaactacagaccaatattcttttatgaacatggatgtaacatactcaacaaaatactagccaacaacatataaaaagaagtatacactgcctcagtgggatacattccaggaattcaagcttggtttactttcaaaaatcaagtattgcattatatttttttggtagaataaaaaacaacacatgatcatctcaatagatgcagaaaaggcatctgacaaaatcctaccaccccttcatgataacaaacaaacaaaaaacactcagcaaaccaggaatagaagggaacttcttcaacatgataaaaggcaaatataaaaaaccctcagttaacatcatacttaatagttaaagattggatgctttcccactaagattagagcatacccattcttgctacttctattcaatattgtattggatgttctagtcagggcaattaggcaagatacagaagtaaaaggcctccagattggaaagtaaaaagtaaaactatttttatttgcagatggcatgatcttgtatacaaaaaatcctaagaaatcaatgaaaacaatgacagctaacaaaggagttcagcaagattgctaatacaagatcagtataaagtttctgtacacttgcaataaacaacctgtaaatgaaattaagaaaacaattctggccaggcacagtggctcccacctggaattgcaacactttgggagactgaggctggaggattgctggagcctaggagttggagaccagcctgggcaacatggtgaaactttgtctctacaaaaattaactgacagtggtggtgtgtgcctatagtcccagctcctcgggaggctgaggtgggagaatagcttgaggccagaaggtggattgatggcgccgctgcactccagcctaggtgatagagtgagacccttaaaaaaaaaaaaaagaaaagaaaaagaaaaaagaaagaaaacaattccatttactgaagcatcagaaagaataaaatacttaggaataaattttataaaagaagtataaaaattaaaactataaaacattgtcgaaagaaatgaaagaagacctaaataaatgtaaagacattctgtgtttatgaatcgaaagatttaattttgttaagatgacaatacttcccaattgatctacagattcaatgcaatctgtatggaaattccagcagcactttattgcagaaatgaatatggatgatcctaaaattcatatggaattaattgcaagggactcagaatagccaaaacaatcttgaaaaagaacaatgttggaggacacacatttcccgattttaaaacttactacaaagtaatcaaaacagtgtggtaggtataaggataaacatatcaatggaacataattgatagtccagaaataaatcaatatatctatggccaattgatctcaactagggtgccaagatcattcaatgaagaaggaatattctctttaacatattcacatacacaaaatgaagtttgaaccttgcctcacaccacatacaaaaagtaactcaaaatggatcaaagacacaaatataagagctaaaactataaaactcttagaaggaaacataggggtaaatcctcataccttggatttggcaaatggtttcttagatgtggcaccgaaagcacagcaacaaaagcaaacatagataattggatgtcattgaaattaaaaagttttgtacataaaaggacaatcttgagtgaaaagacagtccaaaaaatgtgaaaagtatttgcaatcttatatctgatctgagtactttatatagtacccagaatat

SEQ ID NO: 95778 - DNA, 63390 bp, Homo sapiens
  misc_feature (1)...(63390): n = A,T,C or G
acctctgcctcagcctcctgagtagctggggttacagacacctgccaccaggcctggctaattttttttttttgtatttttagtagagatggggttttgtcatgttggccaggctgtttttgaactcctgacctcaggtgatccacccgcctcagcatcccaaagtgctgggattacaggtgtgagccaccacaccggccagtgtattttgttttgttttttgttttttgtttctttttgagactgagtctcactctgtcacccaggctggagtgcagtggagtgatctcggctcactgtaacctctgcctccccagttcgagtgattctcctgcctcagcctcccgagtagctaggattacaggcacccaccaccatgcccagctaatttttgtatttttagtagagatggggtttcaccatgttggccaggcaggtcttgaactcctgacctcaagtgatccacccacctcaggcatgagccaccgcgcccggcctatggataaggtcttgatgctggagaaaggagagtgaacaaaacaatcatgatccctgccctcatggggcttacagacagggagtaatcagataattgcacaaataaataatcatagattttggtaaatgctaagacatttacagagggccagaagaaaacatgtcaggcagttccaatctctaggtcaagagagacaggcattctctgttgagctggaagaggaaactaaggcccaggacagggtaggtgtgcctgttgtcgcttggtgagtcagggctgtattaggaccagaagtctcactcctgactactgaataaaaggcctagcttcaggctgatatccatcatgacacatcttcccactcctctccctgctacctcctgattccactccctttggaaaataagttttgatccgcagccctgacatttgacgcccataaacctctaaactccatcttcattatctcctcacccccaccmcatacagagtgcagtccagtcaggttggcaagggctgctggtcagggccagatgaccagaaagtgtagaggaggagagaatttggggctttcaggctgggagcagctagggaagggccaagccggaaaagcagcatctgccaggctggtaagagacaaggctcaagtgcaggcactgcgaggaagcgagagtgaggtagaaggatgctctaatgccaggaagtgacgtgcagggacagagggatgggggatgaaggatgaagaatggaggggaggatgaagctgggccacatggctaggaggaagagcagcagggaaggaatgcacagagagctctttgcccccaggtctcttccaatccctgtctcctccttctcttacccccacttctcacaattccagcagagggctgaggggaacacagtaaaattctggagactgcttcctagggagcagagtaccttactaataccccggccagatccatggctcagggaggggtggggtaatccacaggagagtgaaggcgttctagtccccaaggacttttgagaggtcatgcagtccatgcctccgtctcccaacacccaacagaggggaatcatattctctttacccctccctagacatgaagagattctccgcttctcccagaccctctgcttctcacaatccctggctgtggggaacttctcttaaggcacagattggatccctcttgctgcagtctctgacttggtttctcctatcctgtcctctgtggctagagaaagccctcttctgggtgatcacagyggttccttaggatctccccttcaacattccttcatcgttagttggttcttcccagaaggtaagcccaatcccttctactgcagtccctagcatcctctccgttgtcgcatcctacgcctccaaggcagaaatgcacccccttcctcaccaaataattaacagagacaagggagaagaagggagagatccaagaagatggggatgaattaaggagatgsagctggaggtggatgcttgacacagaagaaggaagaccggggacttcccaaggcagggcagggacggggtcagcgggcctcaccggtgtcggggtctcccagaaaggcgtcctcgtccttgcggcccctcagcggggccgcgggcgccggctcgtcctcgggcagccgcgggaagctggtgatgctcatgtagtccactggcgagtaggcgcccagggcgctctcctggctggcctcgttctccgccgccatcctygcccgcgccccccagcagcgcagcgcctgccggaagtggctgcggcgggggagtgggagggcggagggcggggcctgatcttcgcgacagccgggagggggcgcctctcccagccctcggccgtgtcccggtctgactcgcccccgtctgctcagcgctatcagcctgcagctggcacacaggtgcgygtagatggacagccaggaaggcagcgcagggtcgaggggagagcgcggggcaagcgagacttcagtggctctgcactttacgcagctcagggaccaaaccccttcctccttccagcctgaatacagctagtgtcctcctcaaatcccaggcttccttttcgggccccagaccctttcactgaccgcaaatccctctcgaccccagatcctgtctctgaccccaaactcctcggaccccagacccctccttgaattccgagatcctcctcctccgattttagactcctcctccgaccttagacctctttttcgacttcagactctgtcttcacccccaaacccttttgaaaaccccagcccatgcttcatctccaggcctctttgactgcagacgcctctttggacaacagatccctcctctgacctcagatcccttcccgcaccccgacacttctgactcctctttcaaccgcattctcaaactttagtgtgtgttaggatctttgaaagcggatccccagattccactccagagatcatgattcagtaggctgggatgaggtccttggaacctgaatatttaccatcattttaagagtttttgatgtggttctggaaaggacactttgagaaagaaggagtggtggtagtgatggtagggcaggagtggggcaaggtggggaataggtctccatattctggatgtctgggttctattctgccaccgctcaaacactgtgtaatcttgggcaagacaattagtctctctatcagtttccccatctgtgaaatggaaagaataatagtacccattttagagggttgtcatgaggattaagtaacagaatggaaagcgattagtatagggcttggcacctactcaataaatggcatcatcatcatcatcatcattgccttaatctggtagattcattccctccaaactcatccatcctctctccactccaaaattccaaccacactacagcttgtactacttctccatatccaaggatgagggaggttccttcttttacgaggtctctgttccaaactttcattgtgaagtccacaggaagagaggggggctggtgaagcctctatacacacatcctttctcttcccaaccccagaccagtctcagggatggcctgaagtgcttgaaaaatctactatatacacagcagctgcagtagcaactatagacaggagggggaagcagtgtgtcgggaacagctctggggtttgggtgtaggacttgggagagaggataggaaggagagggctactcagagctgtgtggtaagagtgcccagggagggtaacagtctatcaccaaaaagtgtacccattgtctgtgcctttccccaccccagagagttcttatctcctcagtgatgtttgtagggtctattacactaccctgaggtctaatccctctggtgggacccttccccacttgatgaggtctgcaccttctcagtgatgtccactcccacagtgtagttggcagctcctcactggagtttgagtcctctggtagggtccacgtctccttagtaaagtctatatcctctgtatctcttaggggaaatccatgtctcctcactagggtaagtgcccttcaaagccattcatgtcctattagcagggcccagggcccttcagtcagatctgagaacccccagcaacatctgtgctcccttagtggagtccatgtactgtcagtgaagtgtgtgtcccttcggtgcagtgaatatctcctttatgaaagtatctgaccccttggtggggtctatgtccaccccaagaggtctgtactccttcagtgggccctcagattcccgccctccttgggattgggcagactctcggtctcccatagagagattttttttcagcttagggtgtgcaaggtttacagtcagctgggcaaagtgcagggaagtagctgggaagggaggctgggctagatggggtcacaaggcctgtgtaggcttcaggaggtgggagctgcccgcttcaggcctcagaatcactcttggagttagatatttaagaatccttcctgccttgacagccagtctgtgaaatgatggtgaggtgggcacttctttgtggtgagtgcaggtgagagatggaggagggtcctgcctgacttctttctggggtggaggggctagagagaagctagaggtaattaagcccaggttgtggtggtggtggtgggggtttcccttggtggagtaaagagattgtgaaggaaagaagagaatgtgggccaggtgtggtggctcacgcctgtaatcctagcactttgggagcccaaggcgggcagatcacctgaggtcaggagttcaagaccagcctggacaacatggtgaaatcccatctctactaaaaatacaaaaattagctgggtgtggtggtgtgcacctgtaattccagctactcgggaggctgaggcaggagaattgcttgaatccaggaggcagaggttgcagtcagccgagattgtgccattgcactccagcctgggcgacagagcgagagactccatctcaaaacaaaaacaacaacaaaaaaagagaatgtgaatgatttttcctatttgcacagactttgatattttacaagccttagcttcaagcctgacgaggaagtaaaaccaaatctggagtcaaagaacctagctttggccctaacttggtcgttatttgctctctgactgtgcaccagttccttccctttcctgggtttgccatttgtgcaattaggaggtgggcttattacaaaaaacctgaaggtgtctcctagtcttcacttattgagtcttgtactttagatctggatggagatttgtgaaggcaaggagattgaagacatgtcctcataagagggagaaaatctgagctggttccagggtgagcagagaggaggtgctgtcgccagagcatgccctcaaggtcatgggagaagtttttccggaggacgagaatgtgggtgtggctcagagaggggggacctggagggaagggtgtcacctggaaggaactggtgatagtcaggactgtgcaatcagatcacggggcggctccgcgatggaccttactcaactcctctccttagtccatccctttccctttcgatccttgccttaacccaaccccttatctgtcactccaagaccccaccccactctggtcactccatggctctgcctcctctcctgtcacaaccagccgggttactccccatcactccatgggcccacctcctctcctgtcccgcctggccccgcccctcccttggcactccacggttccaccctctcccttgtcacacccggccccgccccttctgctttcactcgacggcgtcactccttccggcaagtcagctccacccctatccctcgacttttccttatagtatttctgtccttgccaacctcgatccctccccaaccagacacggccccgccccctctggcaccgcccacccgccagactaagccactcccccactcaccaggccccgcccctctacggaggccccgcctctagttcggcctgttttctcagtcccggcacccgccgcgaccgcaaaggcggccgcggttctaggaacttgacgtgatggggcttcctgaggagcgggtccggagcggcagcgggagccggggccaggaggaagctggagccggaggccgggcgcggagttggtctccgccgcccgaggtcagccgctccgcgcacgtcccctcgctgcagcgctaccgcgagctgcaccggcgctccgtggaggagccgcggggtgaggcccggcccgggcgggcctggggtgtcagtgaggagaagagtgggggctccctgggggagtcgggggctcccttgggargctgaggggtgggtgaggagatggaggttctgtgaaggaagaattgcggttctttgaaaatggaaaagggattccgggaggagacgagggttccatgggagctggggagttccctgcagacttggagggtccgtggtggagatgcgggtttttgcgaggagacgcgggattccgtgagggaagaagtgaggttccttgagattgggacggggaggtcggccaagagagtgaaagtttcatgggaagagaaggggagttcctgaggcgaaaagagggtctctaaggggcgacgggagccttgaagggaggagggccacgaatagaactttctttgcttccctttcacaccagctcagccactgcctcctgagacccttaacctgtgaactgttgagggcaataacgggtctggttcccatcttggggtcctcagattagtaatggagtccccgatctatttttagtatatcggacatcctaatggaaattacgcggtataagactgaacgagttactacgatgtcaagttgttttatttatttttttaacttgggctgggattgtattagtaatagttcmgaagttctgatagatggttccatgtctgttaaaatgtatgaggaaaatcggccaggagcagtggctcacgcctgtaatcccagcactttgggaggccgaggcgggcggatcacttgaggtcaggagttcgagaccagcctggccaacatggtgaaacccccgtctccactaaaaatacaaaaattagccgggtgtggtggcgggcacctgtaatcccagctactcgagaggctgagacaggagaattgcttgaacccaggaggcagaggttgcagtgagccaagatagcaccactgcactccagcctgggcgacagagcaagactttgtctcaaaaaaaaaataaaaaaaaaaaaaaaaaaggtataaggaaaatccccctacccttgccctcagtctgggtaaaggacagatagatagacagatagatagatagatagatagatagatagatagatagtttgttttgagacaaggtgttgctctgtcacccatgctggagtgcagtggcccgttctaggctcactatagcctgcatctcctgggctcatgcgatctttccgcttcagcctcctgggtagctgggactacaggcggacgccatgacacccagctacttttttgtattttttggagagacgaggttttgccatgttgcccaggctggtcttgaactcctggcctcaggctttcctccttacttggcctcccaaagtgctgtgattacatgtgcatgagctactgcgcctagccaaggagtcaaaattgcacccccattgggaggcagcatgatgtttggttgtgggacaaacatgggccacgaatcaaatccagaaaaatctagatttagaccctggctctgctgttcatttactgtggggtcttaggcaaatttttaagcctgtctgagattccttttcttccatctataagataggtctagtaatacttgcctaatgggtttgtatgaggtctaaagtgtgtaataagtatgcgctataacatgcctgatgcacagtacacattcaataaatagtagttagtctgatacaatataaatcaagcaattaccaagtaatgcaagacaggattcaatcaagtgtaaagtggtggagttgggatttgaaccaagacagtttgactgcagaatccatatcctaatagcaatgctattcctcttccatgaccccacagaatgcatttcaccaaattccrtcaaatacagaatttctaccagggaagcagcctcctaatttgtcctctcttgcctagtttcgccaacttgagtctttccagtagatttatcaagacaccattagattgatattatggaaatatgctttcatatgtcactgcaaaaactttcaatggttccctgtttctggcagtttctaattaaaattctgcttttcttttttttttttttttcttttttttttgagacggagtctcgctctgtcgcccaggctggagtgcagtggcgcgatctcggctcactgcaagctccgcctcccgggttcacgccattctcctgcctcagcctcccgagtagctgggactacaggcgcccgctaccacgcccggctaattttttgtatttttagtagagacgggctttcaccgtgttagccaggatggtctcgatctcctgacctcgtgatccgcccgcctcggcctcccaaagtgctgggattacaggcgtgagccaccgcgcccggcctctgcttttcttttaagacctccagataatctagctccaccctgcctctctattcttatctcccactacttgctaccactcccctcattctagatagatcattctccttgatatcctggatacacatttattcccaccttcttgcctttgttcatttccttctgcttctctctacctagtcaaactccaccacttccaatagagcattcactgatcatcccaatttatgctcacctttttcctcttctgaatatctttagtacttagaaactatgccactcatccagattctgacacacacacacacacacacacacacacacacccctaccccccccaaaaaaacccagaaaaactaagtgtgcataaaattcagttttgtagccaaacatggtgacgcacgtctgtaatcctgctactcaggaggctaaggcacgagaattgcttgaacccgggagacggagattgcagtgagccaagattgtgccactgcactccagcctgggcgacacagcgataccctgtctcaaaacaaaaacaaaaacacctcagctttcttcattctttgttgatggacataaatgtggtttataaatagttttatatactatatgcctactattatcacttgaaaatatttttgagtatttgtactctcgttattagctgcgtggtccttggcagagtttcctgtgcttcctgagcttcagytttctcatctataaaattaggataattaatgtatactttgtaagaccataatgtcataaagattaaatgagattagtccagtccctgatacatgaatggcatttactaaatactagctctcatttgctttctctttaatggccatttattattctatggtattactacttgtattactagttttcatcagtttgttattgttgggctattgggttgtttccagtttcactattatagtgttgctataaacatctctttactaatcactttttttctttgtgattattttcttgaagtctattccctatagttgagatagcagagaaaagggtataaaaagttttatgggctgggcgtggtggcccacacctataatcccagcatcctttgggagggcaaggtgggctcccaaagcttgagcttaggagtttaagaacagcctgggtaatatggccaaaccctgtttctacaaaacaaacaaacaatgtgcgcctgtagttccagctactggtgggggagggggtacagctgagatggggggatcacttgagccagggagatggaggttacagtgagctgagatcatgcyactgcactccagcctgggtgacaaagagcgagacaccgagctaaaaaaataataataatagaaattaaaaaaaaaaagttttatggctcttgtcatgcattgccttgcaatctaataagactgcgccaatttcttacaatgccattattgtgtaagagtatctgttttcccagggccacccagacattgggcttaataatttttttaaatttttactagttttctaggtatataatggcaccttggggttgatttaatttggatttctttaatacattacaacgttgtacactatgtgatttagctttcaattatattctgtcttgtacattaaaaaatatttcatgtgttaatcttatctctccaactagattgtataagctctaaattgtgtaacctgaaacaaatgacttagcttctatgaattttatttcttatgaaatgaaatgagggggtgataatctgtaaggttacttccattgttacrgttctaattgcttctctttcctccaaattttttttttttttttttttttttttgagatagagtcttgttctgttgcctaggctggagtacagtggtgcaatctcaactcactgcaacctccacctcccaggttcaggcgattctcctgcctcacgctcctgagtagctaggaatacaagcacccgctaccacacctggcaattttttttttttttttgtatttttagtagagacaggatttcaccatgttggtcaggctggtctcgaactcctgatttcaggtgatccgcccgccttggcctcccaaagtgctaggattacaggagtgagccacagtgcctggcatcctctaactcttgattcagtactcagactatcctaaattctctgcattcatatgttttacctgttgagtacattttctgcagaatagccaggcagatattttaagaatgtaaatttgatcatgttacttgcttaaaacccttcaatgaattttcattgctcttgggatatataccaaattccttattatacacagaattgcatgatttgcccagtttatgcatcaattcctgctattctttcccttattctcagtgtttcagcctcaaggagttcctcctaacatatgcccttggtctctttttttcatatgggagtggagaaaaacttctattcatctttcagattttagcaaaaatgtctcaaggaagtttagatcttgacttagtaattgtgtaaccttagacaagttatttaacctctctgagccttgattttcaagtttataaaatgagaaaagcctcccttctagagttgtggtaaggattaaatgagataatacatatgaaaagcttaaagaaacatttggcacatagtgaataacacttatataagtagaagctggagaaggagatgctcaatatataattgctgagagagaatgcacgaattaagagaagaaagagttggtcatggaaggttctgtgggtgaagaattttttctttttactaattacttcattaaaaaatttactttctagttagacagatggtgaaaaaaattgtacctgatttcagcagaactcggtgtgtacctataatcccagcttcttgggaggctgaggcaggaggacagctgagtccaggagtttaagacaagcctgggcaacagcaacaaaaaattactgattgcctattttgtgctaggcattgtgctagtactaggtggctctgattttaatagatggtaaaaagtgagtaggcagtcttgaggacaggaggaagaatttgagtcaagattcagcccaagagaatagaagatgggttagaagagtgttggctgctggccgggcgcggtggctcaagcctgtaatcccagcactttgggagtccgaggcgggcggatcacgaggtcaggagttcgagaccagcctggccaacatagtgaaaccccgtctctactaaaaatacaaaaattagccaggcgtggtggcacgcgcctgtagtcccagctactcgggaggctgaggcaggagaattgcttcaaccggggaggcagaggttgtggtgagccgagatcatgccactgcactccagcctaggtgtcacagtgagcctccatctccaaaaaaaaaaaagtggtgggtgctaagattagacaggtaaagaagggacccaggtggtgggtcctagggcaaggaagttataatttggtcctgtgtatagactggtaagccttctgaggctaaatatgtctcagaagattaatgatatctgggcttccatttctgttgcagaattctggggagacattgccaaggaattttactggaagactccatgccctggcccattccttcggtacaactttgatgtgactaaagggaaaatcttyattgagtggatgaaaggagcaactaccaacatctgctacaatgtactggatcgaaatgtccatgagaaaaagcttggagataaagttgctttttactggtaaaaatatctatcttatacttggtggcagataaaaacactcatttgatacttacaacaacccagtagagtaagcaaagtgtcatcaacttaatgcctcaggtgaggaaaaatacctcaaggaagctacatgacttccttcagatcacataactagtatgtgacagagctgacattcaaagccaagtgtcctgacttctagtctagtgttcttggctttgtagttgaagagggagaaagggcattggcaaatggaagagaacaagactgagtagctttcttcctcattcttgctttggaagacaaatagtattgggtttttcaccaccactactaccactaccattatcattatcttttacagagctgtgtgccagaaactatgcttaagtgcttaacaaatactatctcctttgatgcttataataattatgaaagcactatttgttttcctcattttacataggtgaaaactgaaattctgagaagtcaagtgacatatctgaagtgaaacaactagctagaagcaaggctgagattcaaacctaggcagtataattacagagcttacacacaaccatgacactctattattcctctaattccttaccttggcctctcaacaggtttgtaaaataggaattcttagtttcattttataggtgaacaaatgaagcattgaagggttatgtagtgaataaggtcatagagtgaataagtggtagagccaggattcaaattcaagtctgcctgactccttgcttgtaccactaggccatgcagcctccccagcaggaaatttctaagactgcttctcccaggaatttagctgtctaggagatactactataccgaatccaaataggacttagaaattccaataattggggtgttgcttctgccacaatctatgagcactcagagttgatctattgtttttgtattgttttgttttgttttgtttttttggagacaggatcttgctctgttgcccagcctggagagcagcggcatgatcttggcttactgcaacctctgccctgcctcccctgctcaagcaatcctgccacctcagcctcctgagtaggtgggactacagacatgcaccaccacgtttggctaatttttgtattttgtatttagtattttttgtaatgatggggtttcaccatgttgcccaggctgttctcaaactcctgaactcaagcgatccacctgtcttggcctcccaaagtgctgggattagtgtgagccaccatgtctggcctgattaattatttaagctagccaataggagcagcttggatgcttcatgggagagttaaattgaaactcactcaatatctttgcccagtttgtgtgatatattgagaagagccttaacctgagagacaagaaatttaggttctcctttcaactctgccattaacatgttatataaccacagacaaggcatttaactaagagtcagtttcctcttccataaaatggggataataattctatccttgtttttctctctagattgttgtaagaatcaaatgagataacgttgtaaaagcacttatttgtttattggaaaacactgtataggtgtgagtggtctattattatactaccattgcttagttgggggccagtttgtcactgaaattcactgtccattgtgtctgttgagactctctttagcttctgctctagagctttatgcttgagctccagccaacacttgggctcatttcccaggctctttaaagatcagaaaacctttaaagatcttcaaaggaggccgggcatggtggctcatgcctgtaatcccagcactttgggaggctgaggcaagagggttgcttgagcttaggagtttgagaccagcctgggcaacacagtgagacccccatctctatttcacaaaaaagaaagaaataggctgggcatggtgcctcatgcctgtaatcccagcactttgggagaccaaggcaggtggattgcttgagctcaagagttcgagaccagcctgggcaacatggcaaaactccctctctacataaaagacaaaaattagctgggcatggtggtgcacgcctgtagtcccacctacttgaaaggctgtggtgggaggattgcttgagcccaggaggcggaggttgcagtgagcacagatcacaccactgtactccagcctgggcaacagagcaagaccctgtctcaaaaagtaatagtaataaaaataaaataagaaaaataaaaagaggaaaaaaaagatcataaaaggaaatgcttgtatctgaatttgttccctggtttgaaagaactcaggtgcctaatggaaaacagaatacacaggccagagttttcaatcactggagagttttccagaatcctgaggccctttctttctagagacaccagttcccctaccacccttacctgaacaggctctggagagcctctctttccccatctgtaaaatgagaggagtagactagatcagcattttccaaagaatgcttcaggaactgctaattactggagatattagtagggggcttcttaattcataaaatgattgagtctgagaaacactacataataaattgcctttgtgtgagattcccaatgtgtattagcatagtaaaatctccaagatgtcctatattagagatacctgattaattttgtttaacataggatttcctgaatttattgaagccccaaacactttttgccagcatgctattgatatcacaagaagcagtattccatggaacacccactggggaagcactggattaaataatctctaaatttacttccagtgcaaaattctgtaactcaaaaacaagacatcctcactccatttttacattggtcactccctcaacaagaattgttaaagatattggatactcagggctgcattaggcattatggatatgggggtaaaaaggcaggagacaagtaccatataggcaattactatttaattattttatgtttatagtaaagcaaaagcaaaatacaaataaattgcattttattataagaaagtaaagtgcaaatatgccggatatgtggttacatccctttgttgcctctatatttttaaatgatatgcttatactgctatttttcatcatttttaaagaaagtattgatttcttactacgatagataagaatttagttcttatatacctctctaacttccttctctcttcttctcaatataattatagctgttttctagttaatttaaaatcagtttacataagaatagcatactgtggttatatttccttttatgtacggatttttatttactctgaagttaataattgcttactgggctgggtgcagtggcttatacctgtaatcccaacactttgggaagcagaggcgggcagatcacctgaggtcaggagttctagacaagcctggccaaaatagtgaaacctcatctctactaaaaatacaaaaaaaaaattagctgggcatggtagtgcacacctgcagtcccagctacttgggaggctgaggcagaagaatcgcgtgaacctgggaggcagaggttgcagtgagccaagatcacaccactgccctccagcctgggtgacagagcaagactctgtctcaaaaaacaataaaagtaataataataattgcttacygtttttctttttgtactatttaagcctttatcatatatttaatattttccaatctcactatcatatgaaatcctccttttcctcccaaagttctccctcttggagctcacttctttctgttctaattcttactaatgcttttaaaaatgacatcttttctgtgattcgctccaattgatatacttcttatagaaacacattatggctttcttcttaactttatgtcatttagacagctatggtggcattaacaagccacatttgtagctagtttcttgttttggaacatacattgtgtagtcattgaaattatccacaaaggaaatggtgctcttaggaaagtactcccattatccaaaatagaaccatattaaggaataatttggccttttacttttggcttgacacattgcaaatgttcacggaatagtagtatttttagaacttgaagtgaccgttagagtccatctaggccaactctcttcaaagattggtagattaagggacaaagaagctaagtgatttgcctaagggtcatacacctgtttgaagacagaactgagactaatctccagatactctcactcctagtcaactattttttttcactcrtgacactacctcattattctagtagtccagcacttggctgtgacagataaaaagagaaattagccacattagccaaactgatttaaattaactttaaaataccagataaaatgtgttattaggtttaaatgtcccagaccctagtctcatggaatttacattctatttggaaagaccaaatagattggccgggcacaatggctcatgcctgtaatcccagcactttgggaagccaaggcaggtggatcacctgaggtcaggagttcgagaccagcctggccaacatggtgaaaccctgtctctactaaaaaatacaaaaatcagctggatgtggtggcaggtgcctgtaattgcagctacttgggaggctgaggcaggagaatggcttgaacccaggaggcagaggttgtagtgagccgagatcgtgccattgcactccaccctgggcgacaagagcgaaactccatctcaaaaacaaaataaaacaaaacaaatagatctacataaaaacagcctgggccaggcatagtggctcacgcctgtaatcccaacactttgggaggctgaggcgggcggatcaccttaggtcaggagttcaagatcagcctggccaacaagacgaaaccccatctctactaaaaatacaaaaatagccaggtgtggtggcgcactcctgtaatcccagctacttgggaggctgagacaggagaattgcttgaacccaggagacagaggttgcagtgagccgagatcaagccaatgtactccagcctgggcaacagagcaagactccatcaaaaaaaaaaaaaaaaaaaaaagcctgaaaagaattatgggccaaactgcaaagagctacttacacaaatagttcacagaaaggaaaaagccttatagggaggcaggataatataaagattaggagaatgggtgttttggtgtcagactaacccagtttgagtcctatttttgccactaattagctgtctgatcttgggcaagttacttaacctctttgagcctcagttttctcaactgttaaacgtggataaaaatagcttttatctcatggagttgtcagttttgtaagattgaataggataaaaaaaaacatgtcaaattcctggcacattgaatgcacttaaatattagccaccacaattatttatattggaacagtgagaagaccaagcatgtttagagtaaaaggtttatgcagggaacaatttattcattcaataaatgcttactaagaacttattaagtgccaggcactattctaaacaaagttcttgccctcatggaggttatagtccagcttgaggagacagacaataaacatagaaaccagtaagtatatgacaggtagtgatgagtactatagaaaaatatagagcagagtsaggggaaagggaagtgacagtgcagagtgggagctgataaggaaagaaccttttgataaatatgacatttgagcagagatctgaaggaaagtatggagtgtgccacgcagatagttggggtagggaggggaaatgttccaggtaggtggagaacaaatgtgctgctgcctggtgtgtttgaagactagctaggaagttagtgtagctaaaatgtgtgagctagggaagagagagtagtattgacaccagcaggatattagatcatgtcacatcttgaaagccaatgtagactctggccttttattcatggtaaaatgggaaaccactagacaatctttttttttttttttttgagacagagtctcgctctgttgcccaggctggaatgcagtggtacgatctcggctcactgcacccgccatcatgcctggctaatttttatatttttgtattttattttatttttttttgagatggagtctcgctctgttgcccaggctggagtgcagtggcacaatcttcgctcactgcaagctctgcctcctgggttcacaccattctcctgcctcagcttcccgagcagctggtactacaggcgcccgccaccatgcccggctaattttttgtatttttagtagagatggggtttcaccattttagccaggatggtctctatctcttgacctcgtgatccactctcctcggcctcccaaagtgctgggattacaggcgtgtgccactgcgcctggccaatttttgtatttttagtagagacaggttttcaccatgttggccaggctggtctcaaactcctgaccttgtgacccgcccgcctcggcctcccaaagtgctgggattacaggtgtgagccaccatgcccacccacaccactagacaatcttaagcacagacgtgataatgatttggcttctatttaggctctatcttttatattaagaagagactgtagaaggggaaaagtagaagcagggtaaccaattaggaggctattgtagaaatccaggtgatagattgtggtgatttagaccatagtagtagtcatgaagatggttagatgtggtcaaattctggatctattttgaatgaagaacctatggaatttgctgacttggattgggtctggggagtgaaagaggagttacggttgtcatcaacagcggatgaggtccaggtatgggagatcttgactatttttggagatctgtgaaaggattgcatgcagcggaagtcgcagcagaggttaagaggattcatctggatacatatggaaatgggaatgtgaagccagagaactgagagtttgttattcagtcctgaactaggatgctgctggtgggaatggaatggaacaatgacattttagagtgatttgataattttacagtaatttaatctgtataaagggcttagtgcttggcagaaagtgtattagctatttttttcattatggaaagaaaccagcacaggtaactaggtgtgtagatggtggagagacagggagaaagtgaaaggaaagagtcaaggattctcctagtctatataaacactgcctcttttgaaggcacacgttcatctgctccaagggctaaattttccctgcaaaatacagactttggttccaactttctcatgctgtcttccccctggtgtggcagataaatatgttagtgggggtgcatgtgtatatgtatgggaaaatgatcagtgacaaggtattgggatagtcmttcagggagagagagtcagtgagggtgttagaggtagctgaaggagtggaagggagttagctagttgaaggaacactggaggactgtcggggatttgggggattaagtaaaaggtttataaggagagggtggaaagagtggttgatggctgatattctgrtcatttatactagctactcagtctctactttttctagaagtccccagtaaccaaagcccaacacatttggtatcgttgattccttccattgtttgctttgctttgggttgcctaaggctgtggttatctctgagccacctaaattctcaccctcagctgaaatcactactgtctcttcatggctctcagtatatttcaatccttcttcaggaactggagcttttgagaataaggcaactttaggattgaccctaggacagaagctctgctctcaggatccttgtatgctcctgawtaygaattccatagtatgatatttggagctccccagatccttgtaggcatatgtgtgtgtgtgtatttgaggccaaaaaaaaaaaaaaaaagtccctacctccccatgtcactgaagtgaactccagaatatggacctagataatttagagtccctggacatgaatgataggacaatatactctagggctctgattttccatatcaccttgacaaatctccttgacaaaacatgggcttgcctcaccttctcaaccatccccaccttctcaaatacacacactacatctatatctttactagtttcacaacagcatatctattgattaagatatatttggtaaagaaaaacactcattttgagaaagatgacttcagaccattctcttcctctctctgggccttctctttgtgggcatgatgggaaatgaactacagatactctgcaaggtccctttcatctctaatcttccagaattctatgactgtttctgaagagaggaagcagtttttagaagttctgttgcaacctgtagtgactctgtggtgactcagtaggcgggttgaatttctgttgagatggtaagaaagagggaggattttgtttatttatttatttatttaatttattttctataatgatgttgacaccataaagcaagaattttagaaggtttggaatgaaggggctgaggaaggagtctgttcctcttgcctgagggttgtttgtggctggtagcataaatactcaaagctaatgggagatacawgggaaatacctgttgttgggaacagtctttctccacttgaatsaggtgagcagattgtggaggtgagctggaggatttcatgtttaaggtggatttctaacctgcttctctcatttctccctgagttttatgacccttgacactttacagaacacctccctaaagtggtgaaaatgagacaagtaggctgtactttccgagtcactttttttggaagtaggtggcatatgaataataaatgtattgctctgaagactctgtcttgaggcctgtttcagtgtcctgagcttcatatcagctacctgagtttgtgtctgggccaacttcttatactggcatgttcagtaaacatttaatgaaaagaatggctttagttaatgcccttttctaagccttctttttcccacttataaactgttagggatgtacaagactcttttttaagttacttctggcactgaccttcagaatttctgtcacaaatgcagggaactgcctggataaattctctacatttctgggagaagttaggggagaggaggaactggcctcctctcctttgaagatactaggtggtcagatgggagcaggggttcttgccttatggcagccccacatttataacaattaactcagaaggcgtggagttgaggatgggccttcccccacttcctggatttggtttgggagaggttgggcactggtaatgatccccggtgtctcacatcttgaacctctgagaattcaagactctcagtttcagtccttagaggtcatttggtccaattcccacacaaatcaggaattgtagtaccaatatcccaatccctaacaatccccataagttatcattctgattctgggtcattctcattcaattcctacatctctaccttaatacttactagttgggcaagttacctcacctctttaaacctcaattttcatgtctgtaaaatggaaataataagtcctgtgacatagattgttgtaaggaagaattggaataatctatataaagggcttagtgcttggcaaaaagtgtattagctatttttattattatgccaaaaccctatacctaaaacaggtaacagcggtgctgatctggttggagcatggatgggaggcctagagccacattctgtaggcttctccaccctgttactgtgttccctgtgaggtgtgtgtctggaatccctagggatttgcaaagctcagtttgaaaacccctgatctagtccagtgttcttgttttataaatgaagtgatactgagtccacagtctcaggttcctcatatgatgtggcttcctaaacaaccatgtcggtctcccctggatatactttagttggccaatatctctcattaagtattccagctatggtctgacttgaacagggtactattaccattctttcactttacatatctaagattatattagcctcattgacagccacactctccastcagtttataatctctcataatacttaagattttccttttctttctctctttctctctccttttcctttttcctctttctcctttcatttccttccctttccttcccttgtttgtctcactctgttgctcaggctggagtgcagtggtgcagttgtggcccactgtagcctcaaactccaaggtccaagtgatcctcccacctcagcctcctgagtagctaggagcacagtcatgcaccaacacaatcagcgaattttatttttatttttattttgagacagaattttgctcttgttgcccaggctggagtgcaatggtgtgatcttggctcgctgtaacctctgcctcctgggttcaagcaattctcctgcttcagcctcctgagtagctgggattacaggcacacaccaccatgcccagctaatttttttttttttttttttgkatttttagtggagacgtggttttgccatgttggccaggctggtctcaacttcctgacctcaggtgagcttcctgcctcagcctcccaaagtgctgggatcacagacgtgagccgttgtgcctggccagcttggaattttgaattagagaaggtacaagagaagactgcaaaatctcagatataggagggccttggactacctattatctctttttgggatataaagtttttagaacagccctcttctagggttctaaggtctggtctacttatggttttactatcatggtttattatcatggttaccttatggttttaccatcttggagcatcattattttatttaaataaaataaatacaaccctgaaactattcaccctggaatactttacacacagagttgcccgtacagaaaacatctctagagcatatgaacacctgcatttctaagtgtgatttttttgaccagagactaatttttgaaaccaacgtttgcttctttttgaccatgatattttaatacatgaaaatctatccaaaggagcagtcacagagggttcttgttgaactttagtttctgagctgcttttgaggatggttacttgaggtgtcctccaaactgccacatatagtgagttagagaatctgccaggcacagtggctcatgcctgtaatyccagaactttgggagactgaggagggaggatcactgaactcaggagtttgagatcagcctgggcaacacaggtagaccccatctctataaaaaattttaaaattaggccaggcgtggtggctcacacctgtaatcccagctactcgggtggctgaggcaggaaaatcgattgaacctgggaggcagaggttgaagtgagccaagatcatgccactgcactccggcctgggtgacagagtgagactctgtctcaaaaaataataataataaataaaaaattagctgggtatggtcatgcatgcctgtggtcccagatatttgggaggctgaggtgggaggatttcttgagcctgggaggttgaggctgcagtgagcggtgatcgtgctactgcactccagcctgggtgagaccctgtctcaaaaaagaagttagggagtcctaatacaacatctggatttgttaaaaatctgtctagttgttttcatatgatgggaaacaaactgacagaaatctaattttatttatatggatagccatgctgtacttgctaagaccacaagaataggctcagagagaggggaaagtttgtgtaaattatacattgaattaggggtaaacaatctagtctgatgactccatattcagagccagggtttcccaattttagtttatgtaaataattacctgaggatgtcgttagaaatccagatttctggaccctatcccagactattgagttagaatctccagaggataagacctctgacttgtatttttgtaacctcctcagacaattctgatgttggggggagggacaaagtaccattgaaaaattatttagattaataaccttaaactcttaaaattatatacctaaaagaattttgaaaaattatgtaactcttgacataatgttcatatctaaaaattttatcataagatttaaaaattgcaaaaaatcgaatttccaaaacattttacatattatatacacacatatatatatatgcacatataggttatacctctttcaaaacattggcactgcaaatttagctcatataatttatagaagacatctaccatacaacctgttttgcatagccagttatcacccaacataatcagccaaatcagatctactktgttagaaattgcctaacttctttcttaagataaatatgttaatatatgactctgtgataactgtttcacttctgagttgtaattctaagagatataaggcaagtagtcttgccatgagtttgttacgtggatgaattaagatgccaattctttcaatactgatttctcagagaagctctcattgatttgctttcttggggctctccctcagaagttatacattctcaaattgtccctttgtttaacactttgttcataccctgtcattgtaccataataaagtttgagataagagagagctatgacattcttgtttaacgtgggagaagggtaattgtaaaagagagtgagaaagaagaaccaactcagacagatcattgttaggaaatattacatatggaagttgaggatctagacatttattctcttcatatttttctgtgcaggtactcacaggaatagagtaccgtagattgaggactaatgatttaaactgcctttgacctagataatagagaaccattgtaatgaatatttttgcatgtgtctattatacttgagagacttgatgtacacataaaatgatgcccctggattttctttccactttctgtttctgctctaggcatattcctcttttgggctgcattccaaatgctctgccctcattcacttgttataggtaaggccagcatgggacacaggatggtaggaacaagtgtgtgattcccctcctgtaagtaggcatgtaggcagtgagaaaagagaagaggtacacaatccatcgggcaccaaagccactttggccaaggggaacatgcaaaaggtatttggatcaaggcctgaaaatagctggcaagaggacagggtacaataatagcccagactgcagggcaggagtcccatactctgaacctcagctccagggttctcttccagcctcttcacagagtcccagactgagcccactgtaggatctcaagaaacacttcttgacatgattccaaaatccattccacaaattccactcttgtctttcctctgcctgtccagcatctatcttgtttatctgtatcctatcttatcccctctccttccatactttctctctttgatcatcttggatccagctggtcatataagcagagataagtttgttcatttatttattcattcttttatctattcattttacaattatgtattaagtgctcactgtgtattggcctttgtggtaagcactaaggagaaaacatataaaaagatatcctgtctgccattaaggaactcataatccagtgagggaaacagatgtctacataggactctagtgctagaaaaaaataagtgcccaagtkttgtctttagaaataaacaggctgggcgtggtggctcacgcctgcaatcctagcactttgggaggccaaggcgggcggatcacttgaggtcaagagcctggccaacatggtgaaaccctgtctctactaaaaatataaaaattagcctgtggtggcgggggcctgtagtcccagctactcgggaggctgagacataagaattgcttgaacccgggaggcggaggttgcagtgagccgagatagcaccactgcactccagcctgggcaacagagctagactgtctcaaaaaaaggaaaaaaaaaaatagaaagaggcaagaatgaatgaatgaatagtgcttaatctttctaatgaatgaatagttacaacctttctggaaaggaaggtttgtaaagatgtctgtattttccaaattaatctgtacatttattgcaattccaatcaaaattgcaattatattttttattgagatataatttataccatataattcacccatttaaagtatacaattcatatttttaatatatttgcaaaggtgtacaactttcaattttagaaaattttcatcacccccaaaagaagtgcaatactcattagcagtcatttttcattttcccccaacttcttcycctccagctctaggcaaccactaatctactttctgtctctaaggctctgccttattctggatgtttcatataaatggaatcatataacacgtggccctttgtgtctggtttctttcactaagcataatgttttcaaggttcatccatgttataggccggatgcagtggctcatgtctgtaatcccagcactttgggaggctgaggtgggtggatcacctgaggttggtggatcacctgagcttggcagtttgagaccagcctggccaacatggtgaaaccccatctctactaaaaatataaaaattagccggccatggtggtgcatgcttgtaattccaggtacttgggaggctgaggcaggagaattgcttgaacccaggagacggaggttgcagtgagccaagatcatgccaccacactccagcctgggcaacaaagtgagactgtcttaaaaaaaaaaaagttcatccatgttataccatatatcagtacttcatccttttacattgctgaataatgttgcattgtataactgtatcacattgtgtccggaattggtgggttcttggtctcactgacttcaagaatgaagccgtggaccctcacggtgagtgttacagctcttaaggtggcacgtctggagtttgttccttctgatgttcggatgtgttcggagtttcttccttctggtgggtttgtggtctcgctggctcaggagtgaacctgcagaccttcacagtgagtgttacagctcataaargcagtgtggacccaaagagtgagcagcagcaagatttattgcaaagagcaaaagaacaaagcttccacagtgtggaaggggacctgagcgggttaccactgctggctsrggcagcctgcttttattctcttatctggccccacccacatcctgctgattggtagagccaagtggtctgttttgacagggtgccgattggtgcgtttacaatccctgagctagacacaaaggttctccacatctccaccagattagctagatacagagtgccaacacaaaggttctccaagtccccaccagagtagctagatacagagtgtcaattggtgcattcacaaaccctgagctagacacagggtgctgattggtgtgttcacaaaccttgagctagatacagagtgccgattggtgtatttacaatccctgagctagacataaaggttctccaaggccccaccagagtagctagatacagagtgtccattggtgcattcacaaaccctgagctagacagagggtgcagattggtgtatttacaatcccttagctagacttagaggttctccacttccccaccagactcaggagcccagctggcttcacccagtggatcccgcactggggctgcaggtggagctgcctgccagtcctgcgccrtgtgcctgcactcctcagcccttgggtggccgatgggactgggtgccgtgagcagggggcggtgctcgtcgggggggctcgggccgcacaggagcccacggtgggggtgggggaggctcaggcatggcgggctgcaggtcccgagccctgccccgcgggaaggcagctaaggcctggcgagaaatggagcgcagtgctggtgggctggcactgctggggtacccagtacaccctccgcagctgctggcccgggtgctaagcccctcattgcccggggccggcagggccggccggctgctccgagtgcggggcctgccaagcccacgcccactcggaactccagctggcccgcaagctccgtgcgcagccccggttcccgctcgggcctctccctccgcacctccctgcaagctgagggagccagctccggccttggccagcccagaaaggggctcccacagtgcagcggtgggctgaagggctcctcaagtgccgccaaagtgggagcccaggcagaggaggcgccgagagcgagcaagggctgtgaggactgccagcacgctgtcacctctcaacgttatcacatttttttctttctttctttctttccttctttctttctttctttctttctctttcyttccttccttccttccttccttccttccttccttccttcctttctctttcttttctttcttttttgtttttttttgagatggagtcttgctcttgtcgcccaggctggagtgcaatggcatgatctcggctcactgcaacctccgcctcccgggttcaagcgattctcccacctcagcctcccgagcagctgaggtacaggcactggccaccacgcccggctaatttttgtatttttagtagagacggggtttcaccatgttggccaggctggtcttgaacacctgaccttgtgatccacccgccccagcctcccaaagtgctgggattacaggcatgagtcaccacacctggccccacatttttctttattcattcctcaattggtggacatttgggttgtttacactttctgatgtcatgaataacgctactacaaacctttgggtacatgtttttgtgtagatgtatgttttcaattctcttgggtatatagctaggagtttaattgctgagtcatatggtaagtctatatttaacctattgaggaactgccagactgttttccaaagtagctgaaccattttatattcccggcaatgtatgaggtttccaatttctgcacatgcttgtcagcacttgttactgtctgtttgtttgattatggccatcttagtgagtgtgaagtgggatctgattgttattttgatttgtatctccttgaccatgcctgaccttttttttttttttttttttttgagactgagtctcgctctgtcrcccaggctggagtgcagtggcacaattttggctgattacgacctctgcctcccaggttcaagagattctcatgtgcagcctcccaagtagctgcgactacaggtgcgtgccaccatgcccggctaaatttttttttttttttttagtagagatggggtttggccatgttggccaggctggtgtcgaacttctgacctcaggtgatcctcccaccttggcctcccaaaatgttgggattacaggcatgtgctactgcacctggcccattaactgccttttgaagactggccggtacagtcctggctccctcaataggtgaggaatcaatgtttagggagaaatttcataaatagtccactgattgaggctatttactctagtttcatcagttttgagttggtgaaaagcccgtccaaatttgggtgataggatgacagttgattccagtttttgaatcaggagctgagtgaggctgcattagggtctacaagttagatatcatttgaaaccagaaatctgtggtgttttcaaaaggaactttttctaaggaactaagggaaaaccaaacagaatgatgaatttctgttaagtacactaaaattccatccttggtagttgtcaacctcacagttctcagagttcctacatttttatttttttccttatgctaattctgaatttggaaacaataccccccttttggaggccatgtcatttaggaggagaaggccctgaactagacatttagactcaagaaytgtgctatccaacatggaagccactagctacatgtaactattgatatttatagtaattaaaattaagtaaaataaataatccagttcttccgccacatttctagtgtttgatagctatatgtggctagtgactaccattttggacaacagtgctttagaatagtgttgctactaatttgtaagtaaccttgaggtcatcactttctatttctgtgccataggtttctcaatggtaaataagagtggtgagtctcaaaagtaccatcctcttctggaattctttctttttctcttttcttttctttctttttttgacaggatcttgctttgttgtccagtctagtctctaactcctagcttcaagtgatcctcccacctcggcccctaaagtgttgggattacaggcatgagccaccatatctggccctcctctggcattctgagtaatctgtggttcagtttttggggtgtgcctccatctacctcctccttcagcccttcttgatacttactgcagctagggcagaagcacccagagggaacattaggctgctaattagtcaaggtacattgctcccattccctggtgaaagggaaattgacttgtgggtatacttatatcttgagtgctccacaattgtgcagtgctttatggatcacagaactctttcacattgttttttcattttatagaatcaaagaatctcaaagttggaagggctgtaaaggtcatctcaaacttcaataaccatgaattatatggggagcttatgcaatgaaaatttcaaggccccactccctggagaataatctagtagaagtaggtgtcagggttaccctggcccaacctgaacaatcctgtgctgcatgggaacttggtactgcattattaacactatctgaccactctttgagaaacactggtcttgcttggtccccagccatattgtggaggctgctctttggtatcgctacaaatcccagattcaacatgatatctccagggtcaggaaactcctgaaggagtgccttccatctttggacatctctaacagaaaggttttttttttaatatggagctctcccaattgatgtagattttccatttatagttatactacattagtctacttttccccataatgatcctttagattcatgcattcattcagcaaaaatttactgaacacctattatatacaaggttctgtacgagacaatgagggattcagcagtgaacaagaccaacttggcctctgccttcagaaactgtcttctgtctagtagggaagataggaaattagcaaaaataataataagtaaacaagtaatattaattctattaataatattaacaataacaataagtaaacaaataacaaaagaagtatagtttgagaaaaatgctgtgaagaaaataagcagtgttatgatgaataacaagaagagctgatctacttagggtggtcagggaaagcttcactaggaagtgacatttaagctgagatttgaaacacaagaagagttggggaaagatagttaaagaatatggcatgttctatcagtcagaaggccagcatgtttggagcctagtaggcagaataggagaatggcacaagatgaagttggggaggatacaaggcatagcaggagtgcggattttcttctatatgcagtggaagctgttaaagggttttaagcaggaggtgatatgatctgatttgtggtttgttttattgttgtttaattaattaattaattaattaattaattttgagacaaggtctggctctattgccctggctggagtgcagtggcaacatctcagctcactgtaatctccacctcctgggctcaagtgatcctcccacctcagcctcctgagtagctgaaactataggcatgtgccaccacacctggctatttttttttttttttttttttagtagagagagcatttcgctatgttgcccagtctggtctcgaactcttgggctcaagcaatcctcccaccttggcttcccaaaatgctgggattacaggcatgagccaccatgcctggccaatttatgtttttaatagatcattctgtggccgggtgcagtggctcatgcttgtaatcccagcactttgggagccaaggcaggcaaatcacttgaggtcaggagttcgagaccagactggctaacatggtaaaacttcatctctactaaaaatacaaaaattagccaggcatggtggcatgcacctgtggtcccagctacttgggaggctgaggcaggagaatcatttgaacccggcaggcagaggttgcagtaagtcaagatcacaccactgcattccagcctgggtgacagactgagactctctcaaaaaaaaaaaaaaaaaagatcacagatcatgctgggtgatgtgtggactggaagggaacaagagtgaagtgggaaaccagttaggtgggcattgtggtcatccaggcaagagatgaaggtagcttgaccggggtggagacaatgaagatacagatttttgagacttgctatcacatctctcaatatcttctcttccacaaaataaacagttcagtgttcctctcatctcctctcataacaggtttggtgtctcttctcacctgggtgtttctcctcctgtttctcctccatctgattcctctgtaaagaactcagtctttccctcagctgtttcttcctatcctgtgccttgcttgtagttctagggaattaaaatcttcaattcaatgactatcgttctcatataaagaggggagctgggtgcagtggtgcatgcctgtagtcccaactactctggaggctgaggtgggagaatcatttgagcccgagagtttaagaccagcctgggcaacatagtgagacattgtctcaaaaaaaaaaaaaaaaaaaaaagttgkggggtagcaccagtcttccctgtcattagtcaattaccagtctttcaattattcaaccatgaccctcgaatacctattgtgccaattgtgcttggaggagacagagaagaagacatgatctctgccctccaagagctcagggtataatgggaaagataaggcccaaataaatataataaaagctagaaaaacagatcacaaagaaagtgagataaagggctttgggaggaagaaagaacttttagcttttgggtaggtgagaaaaagagaaactaacaaaaatttcatggaaaatgttaattcagagaacctggggctggagaggagcgcagggagtatttttttttttttaatgtggtgatcaaagataaccttactgagaagccaacatttgagcaacgactcaaagatagggaataagtcatgtggctatctagggaaagaacattccaagtagagggcaaaggctctgaggttaaatgttcttggtgcttttgccaaacactggggaggccgtttggctggagcagagggaaagggagaggaagagagaatagttgtatgtgaggacagagaggaaatgagggactagatcatgtaggccattgtgaggactttgacttttactcaaaatgaaatgggaagtgatctgagcattctgagcagaagggtgacataatctgaactacctaatggtagttttggactaggatggtagaaatagatgtgaagagaggtagtctaattctaaatggattttgaatcaataatgggttaaagtaaatttcgagagtgtgagaatgaagtagttggagaagactcyttggaggaggttccctaggggaagaagatgagaaggactagtgactgtgtaccatgggttgtcacaccaaccatatggcctccaggtgaaggaaaagtagtttggtttataccaagggttccccatgttatcccaccagctaaatttctcattaatagttttgtttgattcacagtgtttaaaccttttttttttttttttttttttggtaggcaggggcgagacagggtctctgttgctaggctagagtatagtagcatcaacgtggctcactgcagccttgacctcccgggcttatgtgatcctcctattttagcctctcgagtagctgggaccataggcattagctaccatgcttggctaattataaaattttttgtagagacaagttctcaccatgttgcccaggccagtcttgaactcctgtcctcaaacagtcctcctgctttgccctcccagagtgctggtattatggcatgaaccactgcaactggccttaaagctttaaaaaaattagtggtcaacacatataaattcagaagttttttttttttttttgagacggagtctcgctcggtcgcccaggctggagtgcagagtgcagtgcagtagtgtgatcttggctcactgcaagctccacctcctgggttcacgccatcctcctgcctcagcctcccgagtagctgggactacaggcgcccgccaccacccccggctaattttttgtatttttagtagagatggggtttcaccgtcctctcgatctcctgacctcatgatccgcccgcctcagcctcccagagtgctgggattacaggcgtgagccaccgtgcctggccaattcaaaagttttgacaaaaatagattccaggctgctattgaaaaatcgaaaaaattgacaacattgagccctgattcctagcaagcaaaagctgacaggaaccaagtttaggtactagatgcctccttttgccagagcatgcatttgccagttttcctgtccttccccttccctattgttcccctgaaactgaggctaaggtttattatacatgtgctgctgttttcttatagggaagtggaaagggaactatttcttatctttatcatatattttctttcatgtggtccacttatttacattccgtgcctagatcctgccaatttttgagcttgcagctcctggtgtagaggaaagaggcctggaccttaagtcgtggtccctgctctgctgtggtaacccaccctgtgatgccaagcatagctaatagcctctttggatctcagagttaagagactaaattggatgttcttttaagagttctgatatcctggccgggcgcggtggctcacrcctgtaatcccagcactttgggaggccgaggcgggtggatcacaaggtcaagagattgagaccatcctggctaacacggtgaaaccccgtctctactaaatatacaaaaaattagctgagcgtggtggcaggcgcctgtggtcccagctactcgggaggctgaggcaggagaatggcgtgaacctaggaagcacagcttgcagtgagccgagactgcggcactgcactccagcctgggtaacagagcaagactccgtctcaaaaaaaaaaaaaaaaaagagttctgatatcctagagggcttgggattttgcagtaggccaataccctgcccctcacctttcccaaccagccaggggccccagcctggtgtgtatgtcagagaaagaagacactggaatgagtaaggtgcttatatcaataatgtataacttgagcccatagccaaggagaggaatgcacactgtggtgtgtgtgtgtgtgtgtgtttcacggttggaagtgggctcaaataagttgtacttgcataggttgtgcttatttcttcttgtgcactctctatgtactaggctgtacttgaggtgctagggatgtagcagtgaagaaaacaaataagatctctgctgtcagctgggtgcagtggctcacgcctgtaatcccagcactttgggaggccgaggcaggcggatcacctgaggtcaggggtgtgagaccagcctggccaacatcttgaaaccccgtctctactaaaaatacaaaaattagccaggtgtgatggtgggtgcctgtaatcccaactacctgggaggctgaggcagggagaattgcttgaaccctggaggcggaggttgcagtgagccgagatcgcactattgcactccagcctgggtgacagagcgagactccatctcaaaaaaaaaaaaaaaaaaaaagatctctgctatcatggagcttatattccagtgaagaaaacagataatatataagtaattaacatacatgagataatttcaaataatggaacgtttcatgaaaaaaataaaacagaatgtgttttttttttttgagacagtcttgccctgtcacccagggtggagtgcaatggcgcaatctcagctcactgcaacctccatctcctgggctcaggtgatcctcccaccacagcctcctgagtagctgggtttacaggcatgcgccaccatgcccggctaatttttgtctttttagtagagttggggcttcgccatgttggccaggccggtctcaaactcctggcctcaagtgatctacccacctcagcctcccaaagtgtgggattacatgtgtggcacctggcaaaacagaatgatttgatagagagtttctgaaggggcacactgtgcacataggtggctacatgtatatggtggttgtacttgcagatacagataagtccatgtttgaatcctgggtgcatatatttatccttgtttgtgcctatgtgtgcagatgggcagcttttatgcctagaatgtttgtatatttatatgtgattttatacaagtgagcgcacataggtgagttggtatgtggtttgcatatggggacacatgtgcttgggtatgtatatgttggcattcagccataaccggagatgttctgaagttcctgtggcacttgtcagtgagccagttaaggaaatggcttttctgcctctggcattcagggccgtttgccagcttcctctctccctgttctttcccactttagtaagctccctgtgtttggcttctctcatccctaggagggttaaagcctactgactcatcgagccaggaactggaaaaaggctgataatcttctgtgtgacctctgttagtaagaaaaggcctggcttccctgccagtccctgtccttcacactatgagggagagtcctgacttgaaatcagaagacctgagcatctattcttggctctgccacttattattgtgtgaccaataatctctctaggtttcagttacctccttcataagtgctctgtgcagtaaggaaggagaggggaagcaatggtctgtggtgctaagggagagccagatggtgctggtgtctgaaggaggagggagaatattctgagcaggggcaatgatgtggccaaaagcgtggaggtggacctgaacttgccaagggaaaccagggatccacttacagtaaaattcaaacttcttactattgcctacaaggctctacgtgatttggctgctgcctacctctcattcttacccaacttcttgctcactgaaatctagccataytgtctttctttctttctttgaaaaggtctcagtgccttttcacttgatgctccttttccccagaatactcttcccaagaattagtatgattgcctacctctcattattcaggtcttggctcaaatatcacctctccagagagaggccttccaggaccatcttatttaaagtagttgttccctaatatttatcaatatttaaaatgcacacatcagccaggcacggtggctcacgcctgtaatcccagtactttgggaggccagggcaggtggatcacctgacgtcaggagttcaagaccaayctgaccaacatggtgaaaccccatctctactaaaatgcaaaaattagccaggtgtggtggtgcacgcctgtaatcccagctactcaggagtctgaggcagaagaattgcctgaacccaggaggcggaggttgcagtgagccaagatcgcgccattttactccagcctgggcaacaggagcaaaactccatcttgggaaaaaaaaaaaaaaaaagcacacatctcttgaaccaacaggtccacttctggtaattcatcctacagatatacttgcaggtgagtaaagtgacataaaaataaaaatattcattgaagcatttatttgttaaataaattacagtacatacaaatagtggaatattttgcagctgagaaagataatgaaatagctctttaagcttggcaccgtggctcacacctgtaatcccaacactttggaaggaaggctgaggcaggaggattggaggatcacttgaggccaggagttccagactagcctgagcaacatagtaggatcctgtctttgcaaaaaaaaaaaaaaaaaaaaaaaggtagccagacatggtgactctggcctgtagtcccaactgctcaagaggcagaggtgggaggatcacttgagtctgggaggttgaggctgtagtgagctgtgatggtgccactgcaccccagcctgagtgacagagtgagaccctgtctcaaaaacaacaacaacaacaaataaaaaagagaaatagttctttaagtcttggtgaagaatgatatcaaggtatattgttaaatttgaaaaatcaagatgatcaatttctacacataagatttgtgcattttattgaatgcatataataattaacaaaagatacagaatagtgtgtattgtatgccatcatttgtgtagaaaaaatgagactatgtaaacaaatgcatgtagtatatatgcttgtctgacagacctgtcccttaagtagagcagttcttcctacccctgttaccctgtgcttgactggggactatgaggtgttcatctcttttctgaacaacattaaaatccttttttttttttttttgagacaaagtcttactctgtttcccaggctggagtgcagtggtgtgatcgccgctcgctgtagccttcaccttctgggttcaaatgatcctcccgccttagcctcccaagtagctgggactacaggcgtgcaccaccatgcccggctaatttttgtatttttagtagagatggggttttgccatgttggccaggctggtctcaaactcctgaccccaggtgatctgcctgccttggcctcccaaagtgctgggaatacaggtgtgagcctctgtgcctggccaaatttttttttttttttttttttaaacagagtttcactcttgtcgcctaggctggagtgcgatggcacggtctcagcttgctgcaacctccatttcccggattcaagcgattctcctgcttcagcctcctgtaaaattcagttttttaacattcaattttcaaattttggtcttcaatgatatctcaagggtcttattaaagatcataatgatacagacttcttgcaaagtaattattttggtcattccacactagttgaattaccctagccctgtgtcctacaaagaatggtcctgtctgaatattgattgtttctggaaagtcacacagaatattggtaactgttttgccctgggcatggtggctcacgcctgtaatcccagcactttgagaggctgaagcagttttgcttgaggccaggagtttggagaccaccctggacaatatatcgagactctgcctctatgaaaaattttaaaataaaaaaattagccaggtgtggtagcatgtgcccgtagtcccagctactcaggaggctgaagtaagaggattgcttgagcccaggagttggaggctgcagtgagctatgattgtgcctctgtactccagcctatcaatagagtgagaccctgtctctaaaaaacaaatcacaaaacccaaactgtggtttgccagtaggcagggtgattgggagataggagtggggagaacacttctcattatgtatctttttatgtagtcccacttgtatgtattacttattcaaaaaaatcataaaattggaaaaaaaccactaagggaaacatttatttatttattttttgagacagggactcactctgttgtccaggctggagttcagtgacatgattacagctcactgcaggcttgacctccagggtacaagcgatcttcctgcctcaacctcctgagtagctgagactacaggtgtgcaccaccatgctcagctaattgaaaacgatttttttttttttagcaatgaggttttgctgtgttgctcagattggtcttgaactcctggtctcaggtgatcctcctgccttggcctcccaaagtgttgggattacaggcatgagccaagagatcttcccatctcatctttctgagtggctgggactataggtgcatgacaccacactcagctaaaattttttttttttttttttgagacagagtttcattcttgttgcccaggctggagtacagtggcrcaatcttggcccactgcaacttccgcctcccagattcaagtgattctcctgcctcagcctcccgagtagctggcattacaagcatgcactaccacacccagctgatttttgtatttttagtagagacggggtttctccatgttggtcaggctggtcttgagctcctgacctcacgtgatccacctgcctcggcctcccaaagtgctgggattacaggtatgagccaccgtgcccagccggatccagctcaatgtttttagagatgcggtcttgctatgttgccaggctggtcttgaactcttggcctcaatagatgggcccactttggcctcctaaagtgttagaattacaggtgtgagccaccgtgcctgacccaagatagtatattttttaaaagtatttctccctagtcactcatttttatatcattctgctctatttataatgcttatcataatctgaaattatcctggttatatttgttatttgtttattacccacactatcattggaatataagctccatgatatcaggtatcttacttatgttgttcattggtgccttatttcttcttttttttgtttgtttgagacggagtcttactctgtcgcccaggctggagtgcagtggcgtgatcttggctcaccacaacctccacctcccttcaagctattctcctgcctcagcctcccaagtagctgggattacaggcgtgtgccaccacacccagctaatttttgtatttttagtagaggcatggtttcaccacattggccaggctggtctcaaactcctgacttcaggtcatctacctgcctcagtctcctagtgtgttgggattacaggaaagagccaccacgccccgcccattggtgccttatttctatacatgtagatagcacatagtagttgttgaataagcaaatgaatgcatgaaggaatgactgaagtaaaccaggctaaagcctaggaaggagtgggaggcaaggctgaggaggtagacagaaatcacctgataaaggatggcgattctcaaactttatttatttattcaagatggaaactcactctgtcatccagactggagtgcagtagtgtgatctcagctcactgcaacctctgcctcctgggttcaagggattctcgtgcctcagcctccccagtagctgggattacaggcacacaccaccamacccagctaatttttgtatttttagtagagacgcggtttcaccatgttggccaggctggtctcaaactcctgacctttgatctgtccaccttggccttccaaagtgctgggattacaggcgtgagccaccgcrcctggccaattctcaagaatcccctactaattccttgtaccatcttgtaataaagaagcagatccttggaccctgtgattctaattcagtatgtttgagctggggcccaggaatctacaaatcctctagatgatttaggcacaagtgatctggagaccctactctgaataatgcagtcttgatgcctcatcagaaggaatcacatctgtgatttcacttctccttaatacattactaggatggaagagaaggggccgtcactccatttcatcaaggatcagagatggacagtgcattttctaatgacatacaacatgtgtataaaatatcttgaatggccaaagtatctgacccgtcagctcaagattggtgatggcaagattgatggtgggcagatagctcatcctcatagaacagttccaggccttagtgtcactgaatggattttatgactctgcctgtttcttgtttggggaagaagttatacccctaatcactggttctttctggtatgtctcagggagggcaatgagccaggggagaccactcagatcacataccatcagcttctggtccaagtgtgtcagttcagcaatgttctccgaaaacagggtgagtgtgggggtgtgggaaaggactgggggtctggccttggggtatctgagtatctgagacttatggggagagggcaagggatggaaagaatttggtaacagaggaagagaacaggtcagctgggagggaggccagctggatgggagggagcaagtagcagcaagaagggttcatggttcatattctgtgcttttacctgcaggcattcagaagggggaccgagtggccatctacatgcctatgatcccagagcttgtggtggccatgctggcatgtgcccgcattggggctttgcactccattgtggtaggagtttgggctggtgaaaaggggcaggcgggggggtggggctctggagaagtaggttgggcctagatgatggagggtcttaaataacaaactaaggagcttagaaggtttgtgtcatagrtccatattagttattcagtttcttctagraccctggcttagagatcctgaaagttccatgagcaacccctttcttcattcactcaatccctggggctttcttctctccctcagactttcttcccttccctagtttgcaggcttctcttcagagtctctatgtgaacggatcttggattccagctgcagtcttctcatcactacaggtgactaattctctcacctcttctccagaaccccccatacctcaagccttggtctccaatcagctcattggtatttggggctactcagcatagagggtagagactgcctgccttttctctcctggtcccacctcagctgaccctctgtcagctcraatcagctggaagagccagagttaagaggcctactcaggaagggccctatggacattgtgcccactaggcagcatggggcttactaaggcctggaatgtctgttgctccccaaagatgccttctacaggggggaaaagcttgtgaacctgaaggagctggctgacgaggccctgcagaagtgtcaggagaagtaagtgtgtttggctactgtctgagttgactgagcctttccccagtgccaggttccctttgtcccctctaccctaaatggacatgggtgggtcttgccaagttccctttgagccaacaaggctaccactttaggcttttctcttctccaggggtttcccagtaagatgctgcattgtggtcaagcacctggggcgggcagagctcggcatgggtgactccaccagccagtcccccccaattaaraggtcatgcccagatgtgcaggtgagtctggcactgctatgcctttctccaggctcaaattccttcacttttcctgcctagaaaattcttgatgtccttctttgcctgctcatcagtatactgaggatccaggagcaattctaggaatgcctcctctagcagggctaggtgggaactggaagactttgaccttgactgtgggtagagaggcccttgtaccttgagaacatagcacaagcgattgtaagggagactcctatgctggttggggtatccttgtgggcacaggggatcctcagggcctaggcttgtgttagaaatgtctaacttgagtgacaatatatagtcatctccattactaggctgtgatgtggggtgggctatctttgtggcctaagggatgcccaccttggaaggaccagagtccagccctcacaatatggcctttgttagctttggacccccaggcttctggtgggaatggtagaaatgcccagtgatggcctccaggctgagcagcatgagggatcaaagttctggggttgagtaagagtctgtgacttgaggctccctgaggggtcttagggctagagaggctgtagtctagtttagggaagttggaaagcccaatcagtgttaggggttttacatatataggggctggaatcaggatcaggaaaatggaagctgggaggaccagtgagaagggagtttggggtttatgacacactgaccctttcctcccactccctgtatacttggaccctcctcactacccttttcatcctgggctcttaacagggtaaactgaaagagaaatccaagcgtgttcagccccaggtatccatttctgcactgccgtgggcaccgcttctctgtttgcttgtctgtgtgctcatctgccctttgcctgtttgccccattgaggtggctgccagacctaacctccttccccttgcccctgggcaacttgacatctaagccactgaagggtggtgaaattaaatgtccgttactgcctctgtgaattggtatagagtatggatcttagagaggtaacagcagaacacattttatcctgatactcaggacctttgtgggagaggggacaaggtaacctgtcagaaaacatttactgtgcaggtagctggagcagagccgagagacaggaggaggaggaggtggaggaggttcagaccctgactttgggaattcactgtcaagttggggagttagacatgtattattaatacaaaggaaaatctaagttttatacaggacagcagaggagattcctaaatacatttatatagtgctttgggatttataaactgcatataactttgtaatatgattaagtgctaaactgaacaaaagtcatattgtaggtggttctaagaagggagatccataagggggtgctcaaagcagattagtatcgaggaaagagtgggcctgaagtccagagaccaatttttagctgtatgaccttgagtaagtcaattctcccctctgggattcagtttccttatcagtaatggagagatgataacacatgttataaaaggaaacagcttcccttcctaaaacaacacataaagctcactattcctctggattttaccatcttcacagggtgtcttactctaaatctgctatgattaacctcttaggccaatggtagatataagccccttttctctattctcattagcatggcggagacagatctgattcctagggcatactgctttccttttaaaactcaggcaggacctacaccctttcttttgaaagaggtgacaaacttagtggcttaaattgtaatctctggagccagattacttgggttcaaatcctggctctgccatctgctgctgtgtaaacttgaacaaattacttaagctctctcgcttgtttctccatctgtaagataaggataataattatacctatgttatcgggttttgtcaatatatgtaaggtgtttggcacatagtaactactcaataaatgttagctgttttttccttccccttaatgcaacagacagattggcatttctaaaacagagaccagaaaagaaataacaaactcttgtaattcttaataccagagaccttcaggccaaaggctactggatttttgtttcttggaggtgaaaataaccagtttccaaaataccaaagagcataaaaataggcttaaaaagtccaggttgttggtctgagaattgcagtcaaagctgcaaaaatctttctgacaatgggccccatatttaaaaattaaaaaatagttttcaaaagagctgcaaaaatcctggcagggctccaaacccctttatccttaaacaatcttccagggagatcctggcagggtttgcagggaccctcctcaaccatatcgtctatgagctccctcatattcctctcccgtacatggcagctgccctccttgagactatcctggtccaaggacaaaggccaactcctcaattcttattttagaaaattcagaccttttcctggtgcagagcctggggcctcataggcacacacctaattcacaatcaaaggttgctttgctaattgagttcactctgcttcctggtgctagttatcagttccacacctggagtactctgacccctccacctctatatacacacccacccacaaaagaaataataagattataagagtgccctcattgcagagccacagttgtaactatgccttgtccttacatgtacttagtgcctgttctgtggcagttcacagtgctgtagaccagcaccatttgtccaaagcagtattgatacttctggttgaataccttagtgcccccatctcaagtgatcatttggcaggaaaaaaagtacccatgtgacaatgtatgtgtagatgcatatggatagaccaaatcaggtgtgttcttatgttttctaaccgtaggcagctttctctctcttcttcctttttctaggcttgtcgtttttatgatgttgataatccagaaatttcaaattctctaccataaggggcaggtggtacagaaagaacggagtggttagagagtcattttctaatttatcaagctatatatctaacactccagaagtttttttaaccaaatatgcacacaacaaattagcatatatccttataatgggagaatggcatttatcttacaccatcatgtctacctgccagccagggccattgaacatacaagaatctaattaatatgaaaggactttgtgacagctaaagcaaaccccaaacagttcctatcatcacactcttaagtttttgtgggttttttttgttgtttttgtttttgtttttgttttttgagatggagtctcactctgtcgctcaggctgaagtacagtggtacgatctcggcttactgcaacttctgcttcctggtttcaagtgattctcctgcctcaccctcccaagtagctgggattacaggtgtctaccaccacgcctggctactttttgtatttttagtagagatgaggtttcaccatgttggccaggctggtcttgaactcactcctcacctcaggtgatctgcccactttggcctcccaaagtgctgggattacaggcgtgagccaccgcgcccagccccacactcttaagtttaactcccagtagtcactgaactaacctctgtctctcctgacattcatcagtcttcctcatcycaccccaacctctacccttggggcaatccaaggcttgatgtttactagataatacttttytcttttggtgtttaccacatcctgtgagtctgttaaggcaagaatgactgtcctcatttgtaaaaggagagacttaaggtaaagtgatttgcccaaggtcatatagctaggaagtggcagaactggtattgaagtacactgaagattttggacaaattcaagggatctaacttcattcagcagatggtagactcaaaattggtgttcaaagaggtgatatagacagaaaagtaaaacagtttcaaaggagaatttagagaagtttcaggatgacagatccagaagtaattatcaaaggcatagggggacatccttctactgggagaagtccaccttggtccttcttcaccaacttgaagcaaagcttcctgctgaatggaacctgtcccctcaagcaaaagtstctatgggaaaccctattggtaccagtggtgtaaaggcaggagcagagctagggtaggaaacmcgcagatgtggattgggtctggacatgtaggcaaaagtgcttggaccaagatctgttgacttattttactactaacagggtcaggtgcccacctcacctgtaagctctgactaattttgcatttctgaattgtgtggtgtccgcatccctgctaatgagcctagtcccataagtacatatgtatgtatgtagacctgtgtgtgcatagtcattcatccaacaaaaattgactgagtgccaggcactttgctaggtgttgggagatatggcaggggtcgggaggaaagacatttcacctccttcatagatgtcgctatctagatggggagacagtaatcaagtagacaactaaacaaaataacaggaaatatgtactgtgtgggaaagaaacatggtgttgtgatcaataataatagcagggttgggggtagcaatctatcagatactgttcaggtaaaggctttccaagaaggtgacatttcagctcagaattgaaggatrggaagggaccagccaagggttcctcctcagcctgaggccaggtgagaggagttctggggtagagatgggggtaggatggcagggtggttggagtactcagtwagcttgggttctgctcctgttctttctgttccattccatccttgaagggccttctctcccttcctgtactcctacctgcctgtcccacctcattccctccaggggcaaggtacgggtgtatcttgtccccatcttgagctgttcacagttcttccctgcccatccctgcagatctcatggaaccaagggattgacttgtggtggcatgagctcatgcaagaggcaggggatgagtgtgagcccgagtggtgtgatgccgaggacccactcttcatcctgtacaccagtggctccacaggcaaacccaaggcaagtgtgtgtgtgtgtgtgtgtgtgtgtgtgtgtgtgtgtgtgkattatgtaggggtaagaagtaagtttctgaggaaacaagtaatgaaattatttttttcctacaaccctgagttttggaaatgtagcattgtcttttctaaatcaaattaagacataaatcctcaatctataggtggtgaggcccagggtgagacagttcaggtggagggttttcatacagctgacatggatgttctttccctatgcacccatggtttggttgaaggagagctattctgttaactcaaggccaagggtgggcacagagatccctctcaggcttctaagaccataactcttagagttcaattccttccacctggcacactattaacatgtagtcctctgccagcacacaccatgggagccggaaacacttaagaaaactgtttcttccattgacttgaaagctatgtcactctaccttctgcccactccacccctaaattatctccatatgctttggaatatccctcaataagtctttagaaacacaattttggcctctctttcatagagatgggggtagggatggaataagcaaagggaattatcttttttttcccactcactctgatggtgtgtaattgagtgtgtgggcacaaatacacaacagagggactattatgagtgtgctatgagtgctcatgtgtgagtgatgtgggtggctctgaaataccatctgagggtgctggtatgaatgatggcctgatagacatatgtgkcatcaggagtgtgataaaggagatgagatgggagcatggagaaaaggagatggaagggagatggatgctgtgaaaagggtgctggcagggctggaatccctgaggaggatcttcctccagctctgcccagcctccatttggtggtcagtaggggtgggcataagaccctaacctgttccccattcttcccacagggtgtggttcacacagttgggggctacatgctctatgtagccacaaccttcaagtatgtgtttgacttccatgcagaggatgtgttctggtgcacggcagacattggttggatcactggtcattcctacgtcacctatgggccactggccaatggtgccaccagtgttttggtgagaagggagccacctggcctagctgggggatggacaagattatcctgggtgactacctcccaaggctgcttgktctagagggagggggacttatacaatcatctgttttctggagaaasagaagtcctgagggggttgcgtatcctgactaggatggtatcttggcttgtctggccagggagtgaagatatggttggtcagaaagggcaaaatactgaacctgagggaatggtagggggatgaatagaaggactattaggaaagactgggaatgaccagccttcatgggtcagtttgaggggattcccacrtatccggacgtgaaccgcctgtggagcattgtggacaaatacaaggtgaccaagttctacacagcacccacagccatccgtctgctcatgaagtttggagatgagcctgtcaccaagtgagacctcttcccagttgctgccctgtgggtatccctcagagctgggtgctggcctttgtacagtctcttcttttccattgtcccaactctctgacctggaatagaggatggggcaagagaaaagcctgggtatgtgtgtcttccagtagtactcagagccttcctctctcccattcccctgccccaggcatagccgggcatccttgcaggtgttaggcacagtgggtgaacccatcaaccctgaggcctggctatggtaccaccgggtggtaggtgcccagcgctgccccatcgtggacaccttctggcaaacagagacagtgagtgaanggtacagaaggctggggcccagggacaatgtgggaagattgactcaaatttctcatctctgacttccccagggtggccacatgttgactccccttcctggtgccacacccatgaaacccggttctgctgtgagtgatgcttccctggctggtcttgggctaggcagggatggtgtcttggggcacttggcctagttagatagtggagaactggactgacatgtgtgaagaatttggggttctggggcnccttgggagttgagtcagagttgcctcattcctcttcttgggttctgtctcccgtttgcttctagactttcccattctttggtgtagctcctgcaatcctgaatgagtccggggaagagttggaaggtgaagctgaaggttatctggtgaggccctggcccttgggagtctttaaggagagagggaaagggtctgccaagggtactttgctttagagttaataacctaatctctcctggtagctgcttaggactgaaacttcatggttggaggtttgctcactgagagaccctggaggggaccctcgatactttgcctgcatctcttccttttgggccataagtctcctaagggcgttttaagagttgctcagattcctgatggtacctttttgggtctggaagactaagtcccatcttcttttgacaaagattctacagaaaggaggctttataacatagtagaaaatcacgtaggatctggagtcaccctgcctgggttcgaatcctagctctgcctcttctgtgacctcagataagttatttaacacctctgaatctacattttctaatttgtaaaatagggttaaagtggtgyctctggccgggcacggtggctcacacctgtaatcctagcactttgggaggctgaggtgggcggatcacctgaggccaggagtgcaagaccagcctggccaacatggtgaaaccccgtctttaccaaaaatacaaaaagtaactgggcgtggtggtggacgtctgtaatcccagctacacgggaggctgagacaggagaatcacttgaaccggggaggtggaggttgtattgagccgaaattgtgccattgcacttcatcctgggcaacaagagcaaaattccgtctcagaaaaaaataatgcctttgtctcctatggttgcttgcttgattgagttagataatccacatgaaggggttagcagagaaactaacaattagtacttgataaacattagctgttgtgattattgtattcatacttgcaggagcctcacctgtcccttcaaccccaccccatttcactttcccaagagcaagttagtaacagggacagggcttacatccaggccttctgactcagcctagaattccatccattccrtcgatctgctgccaaagaatgttactgattgggcaataattatttacttggtgtgtgggcaccactgttttttaaatgagtgttttcatttgtatcaaactggacctgctttcctcaaggattgcccaaaaggagacacaaatttactaaacacttatcaataayagaacaccgtgctaggcaatttccatatactattaatttaatcctcacaataactttggaagacagaaagtattttctctgatttacagatgaggatcctgaagctcagaggggtaaagttacttctctgaggtcacctagctagtaagtggtagagctgggattccaagccaggatcctctgtctccaaagcctgtacttcattcaggacactttcccccacatttagaaaagctgtaattatcttccagtgagacagcatagcaaatgtgatcactgtcccttcctcactccccaggtgttcaagcagccctggccagggatcatgcgcacagtctatgggaaccacgaacgctttgagacaacctactttaagaagtttcctggatactatgttacaggagatggtgagccttagctatccccctcttgcacctcccactaagacatgtaccttccacttccattttcaggaagagttggtgtgttgctataaaataatacctgagactgggtgatttataaagaaaagaggtttattttggatcatcattcttcaggctgtgcaggaagcatggtgctggcatctgcctatggtgaggcctcaggtagcttccaatcacggcagaaagcaaagggaaagccagtgtttgacatggcaagagaggaagcaagggagagagggaggagataccagcctcttttaaacaaccagatcttacatgaactcatagagttactgcaagtacagcaccaagccattcatgagggatctgtcccccccgccccccccacctccccggccttgaccaaaacacctcccaccaggccccacctctaacactggggatcatatttcaacatgagatttggaagggacaaacatccaaactatatcagttggttaggggtaaagaaaattagagaagaatgtgtcctacatgtcagtatctggtttctacgcagagctacaaagactgtaagggcaggaatgagtatagcaggaggggtctcagaatggtgccatccgaactttgatgtatgaggaaagatggacaatgtatgctcctgtgttgaaagagatggggcatgtggcagtgcatgactattatgtcatgtttgtctttatgtctggagtctgtgtttctccatctatccatctaccaatccattcatccataagatctgagcactgtgatcctgtgcccaggcactgatcatgaataatgtagtcaaaatctcctccctcatggggattctagtaaggggagacagacaaacccaacaaacataaataagcttatcttagatagagataaatgctgttaagaaaaataaacagggtagcatgatagtgtgtgcagggatggctactgtacacaggatcgtcggagaagacttctctgaaktgacatttgagcagaggcctgaagggtgagaaggaaacaggcatgggaaaatctagagtaagagtgttttgtgcagagggacacagcttgagatgtctgaagaatggactgaagcctgtgtggctggagcgtagcaagcaaagggaagaatattacatgacgttggagaygtacataatacagggagggtcttgtgggccatggtgaggagtttgaattttattcaaagkacagtgggaaacctttttttkgttgttgttgttgttgtttgtttttttttgagacagaatctcactctgtcacccaggctggagtgcggtggcacgacctcagctcactgcaacctccacctcccgggttcaagcaattctcctgcctcagcttctcaagtagctgggattacaggcgggtgccaccatgcctggctaatttttgtatttttagtagagacggggtttcaccatgttggccatgttggtctcgaactcctgatccacccaccttggcctcccaaagtgctgggattacaggcatgagccaccatgcctggccaccttttggggttttaagcaggggagtgctaagaattgatttactgtttagaaaataactttgctggatttatggagaatagagtttaggtgagtatactattggcatggaacaaattatcccaaaagttggcagcttaaaataacaaatattatctcacacagtttctgaggatcaggagtctgtgaacagtttcactgggtagttctcattctgggtctcttgtgagtttcagtcaagctgttggtagggcctgtagtcatctgaaggtttgagtgagcctggaggacctacgttcatgcttactcgcatggttgttagcaggaatcctcagttcctcacctcaccataggactactcaatacatggcagctagcttaccctacagcaaatgatctgagacaatgcaaccgagacaagctaggtgtcttctacaacctaatctcagaagtgacatcctatcacttctgccaaatcctatgatgacacagactaaccctagtacaatgagaaagaggactgcagggctatgaataccaagaggcagagatcagtggtgccctcttggaggctggctactacagtgggcaagagtggaagcaggaagacttgttagaaggctattgcagaaggtgtagcagtttggtaatgtggatcaggtatcctaccgtagggtttttatttattaggttttgcatttcttcccaggctgccagcgggaccaggatggctattactggatcactggcaggattgatgacatgctcaatgtatctggtgagggccaggggccaccttcccatcttattaactctgctcctctgacaacacccagccgaagccttccgcaagagcccaggagtgtcctttggccagaccatgtactaagtgtagcattcagttctgggcccaggttttagaggagtaatgaacactggaatgtgcctagagtaggggaacttggatggtggggtgactgaaagcatgtcatctgaggagtgaatgaagggtcttctccatttggccagaccaggactgccccatgggtacagatggagcatgggctggggcagagcctgggatctctctcatggcacttcctttcccttgacaaggacacctgctgagtacagcagaggtggagtcagcacttgtggaacatgaggctgttgcagaggcagctgtggtggsccaccctcatcctgtgaagggtgaatgcctctactgctttgtcaccttgtgtgatggccacaccttcagccccaagctcacygaggagctcaagaagcagagtaaggagcctccctgggcagggactatagggtctgtcttggaggcccagttatcactgcaagttgttggggaggggctagagcaagctgctccccaaaccacaaacagattccagggggccccatgggctgattgccctcttcctgttcagtctccactagtctcccactaggataataataatagccaacatttctagaatactttgtgccaccgctaggctaagtgctttaaatgaattaccccacttaatccctagagtcacctccatgaaacagatcttattgttaccttcatgctaaagatgatgaaactgagactcatggaagttaaatcacttgcccaaggccacactgctagaaaggtggcatttaaactcyagcaggctcattctacagcctgagttccataagataaaatgagagagtaaagagacaagtgtgttgagagcaagagaagcagtgaacctgaggctgtctctgtgggcagggacttgaggaggaaacaggtggggaacaaagccatctctactttgatttttgaaaagtctggctaagggtgctgaagaaatgcttgatgatttgttggttacagttagagaaaagattggccccattgccacaccagactacatccagaatgcacctggcttgcctaaaacccgctcaggtatgttcagaggcctccatggattgggatgggctgaggcctggtggtggtggggtgtgcgtggatgaaagcctttggcagggctagggtgggtcagtgctttcaccaagtaactagaggtctgtggttccccagggaaaatcatgaggcgagtgcttcggaagattgctcagaatgaccatgacctcggggacatgtctactgtggctgacccatctgtcatcagtcacctcttcagccaccgctgcctgaccatccagtgaacatgatcctgacctttacctaggattcctcctgctccaaactttgcccatcctctttgccccctcaggagtgctgagggccagtgttgacccacactaccctcccttgaccagctgtctgggaccggaaaccagctttgtctccaggtagagacaacatcctgtgactgccaggcagaaaggacagggcccaggtcagcctcagtctgctgtgcctccagactgcagagctctcagaacccagaacagagacgaaaaggctacctctcctacccaagttaagtgttcaaaggggatgtgagggcctccactgaagcagggaggcagctgtgtaatcctatgtcagctctcttaggaagccccagtacttatattgggcatgcacttgcccttaaaaacaatgatttgtgagtccaggaayaatttactatttttaaaatattttgctgcttctgttctgggtctgaattcccttttgtgccagatgccagtactgtctgcccattggctccaggggctgtatgggcagattcagtctccagagggtattcagatcatctgcttctttgaaggagtaaatgtgttttgttcctagggccagaggagcttgtcttccttgtcctctgttcccaccctcccctgaacagaacccagcccataagagacattytcagatgaaactctgttttcttgccccagtcaggctcaagccctgtggttgtaggaataaagcctgtgatctcaagaagtggtgacttgttttcttaggtatctgtgccctgaggctgtatattcattagtggctctgatttgtgtggcagatgggaagggaggggtatttcctaggactatccccaatatcttccttctagaacttttggtttgggcagagcgaaggaggcttcactgacagggcctttgacaagcccctgagctaagcaggaaagtgactgaagccagttcacaactgttatgtatgtcccatcttggttgccttccctcctgggctcctgccagggactctcattcctccctgtgatccagtaagagcattagtgggtggctaaggattgaaacttcagggttccacctgtagagactggtctagggggaccctgattacagaccagtcacttccctgctctaatacatcttaagtgggctaacgtagattacagctcccgcctcccctctatgcacgaagtaaggaatcatcactgaatcagcaatgcagttttatttaaggcagaattagggaaaggctatgcccctccactccccctcctcctaccactcagtcctatcccaagtcaggcactggaacctgctgaaaaggctgatgaggggctgacaggagtggggcagggttcatggacctttacctcagagcagcttaccctgagctatacccacatctcaaggatttgggggcgtctagatctcatctaagggagacacaacttttctggtcctcaratggaaagctgggggaaggtaccagtatttacccttccataaaaactttggaggtctttaggaggatacccctcaggagggctaggagaggaatgacaaatacagaggatagaaggtcccgtggcctggttgtgccctcacacagggtatgggttktccaggactgccactmccgctgccacaccaccatctgcatgctcgatggctttggttcgaagtagatgccccacgtgcttgttcatcacgagtgtcttttcctgcctatagaaatggaggcaggggacacacatcacctggactcagccccaaacccaggaccttccctggacccagctgagcagtacctgggtaactgtctataccaagaaagtgctaggattttagagtctctatgcctctctggagtctccttctagtcctaggttgtcaaaccatgtgttctgagtcctcttggtgctatttggagtttccttcacggttgcaaaggacttctcatcagggcttcatctgataccctggtaaggtgggcaggtcttgggtccttggcctcatttaatagataaagaaacaggtaataaagctagtgattggcagagctggcaccgaagcccaggattcctgactctttccagtgttcccctctaggctggctcacttggctggcactcttgcaagcaggtagtggaaagagcttctcctgattggctcacctgacatagaccccaaagatgcccagctctgaaatgcactggaccactcgggcagggctgccaggccgtagcaggcaattctcaaaaggctcaggttcgatcttctccatgaggatgtaggaggccctctcctcactgtccttcagctgtttcagggcctgtaccatttcctccccatataggttgttacctgcaatgaaactggccagtcaccctggaccctctgcctacctcctccatcccatgccctcacttttggggccacatgggcaagtcagcagcctcagttcctggcacccgctcagtgaagccagggcatatctggcttctcaggagggaagctcactttgacaggagagcccttactcatgcagtgaacacatcttccactacactgttctgccctggttctcctcctacctacagctgttccttctcaagctccattgctggctccttctcttaaatgctggggtcccaggggaattggtcctccacgcttgctctctcccccatgtacattttcccaaggagatctctcctattcctgagtctccatctataccctaaaaattgttaacttccggccgggcatggtggctcacgcctgtaatcccagcactttgggaggccgaggcaggcagatcatgaggtcaagagattgagaccatcctggccaatatgatgaaaccccatctctactaaaaatacaaaaattagctgggtgtggtggcgcacacctgtagtcccagctactcaggaggctgaggcaggagaatcgcttgaacctgggaggcagtggttgcagtgagccaagatcatgccactgcactccagcctggtgacagagcgagaatccgtctcaaaaaaaaaaaaaaaattgttaacttccaaatatttaatgcaggctccctgcttagacatcatatgactggcccccaaacaaactcaacttgtccaagcagaacttattacttctgcctgaacctgcccctcctggaccttcctactcccaatcaggcaaaaggtacccctgagtcatatttaactcctcccttccactaccctctcactatctaggacatgtctctccagttggccccatagtcatagccctagcccaggcctctacgttgctcttctgaacaactgtatcagcctcttccacggtctttctgcttccagtgtctcccctcattccaggacatcttctacaatgcagaaactgtaagttttgcaagttcccaccactgctaaccacttgagtcctggatcaatgtgtcccttcctggcttaaaactccctaatggcttcccactgcccttaagataaaatccaatttctcagtatatattcaaggccctttataatcaggatgcaaaccatttttccagcctaaatccctgtcccctcccagctccccctccagcctcaccagtttctcattaacctccaaacatctcacactttcatggcccggtgccttggcttgaggttgtcccttttgtatggaacactcttcctcctttccacctgggaaattcctacccacctcttaagacaaagattaaaaaaatcctctcctctggagaggcagacatgacccctgacctcaaggagtttcaaactagaaaggaaaacagacatgtattctctccagtctcctaatatgaccctactctacttcccaacaatctacccacaggcacctcaggtaaaacttgtccaaacccttcaatgctggttaatcagattcccctgtgctcccggacttggtcacagggtcttaggggacactgtccaacatgtggcctgtgtcagttccaatagtttcccccatgcccgggactgtgcccagagtaagtgccaatgagcactggccacagcctgctagtccctctcattgaggagccctgcaaagggagatccacctacctccaccctctctctggggctttagcacaaaccggctaggggcagcaagggcctcggcgatggcctggtccccttcttcaccctggcaggaggcagaaagcagttatcaaaagtttaaaggctaaagaggcaagaagcttaggtccagctggttatgcagagcagcatcagaggaagagcaggagggagaacagccacaaattccttcaggcaggatgctactatctggatgacactcccaacaaaccccctgcagcagccgatgcaatgagaacaggcctttctttagcaacagctcagggctctgcagcaggcagcctgatacacttctcaattcttgccacctgccttagtcccttccctctggttgccatcctcatctctacctttgctgagggagcttacaatggattccagcccccatccttccattatgaggctgcccttctgctcagagttctaggggttctccagagcatcaccaaccttgccagctccaccttccccttgtcacaatgccagctccaccctccccaacacattgggctgtaggtctctgccacctaggaggcctgtggtaggagaaacaggctgcccacgtaccacatccagtgagtagaggccagcaaaggtggcgcggaggcrggccacagcctcagrctggccagggagcaacatctccagcatgcccrgcctgcttagctcctgctgcaccttcttagtcccagccagctgggtggcaatgtctgggcacttggcagcatgtgacctctccagcagtagacrtgcttcccaattctgcagagggaagaagacaaaaggaattcgactttattttacttcagctgacgtttactgaacatccatccattaggtgccaggtatcatgatttgtatcttcaccctcattatcacccaggatcattctaacatccttgtgagccaggtgtgatatgttgtagttatgtatcattgtgccagactgtgagcccctgcaaaggcaagaatcccccaatctgtgggaaacaatagaaggtgtaagggtagaacatttgtctacgtgctcagcttcccactgtgttccatactccctaccatggccttcaagatccttcaggagctggctcctgtctactttttcaaccttgtaccatccctgactcctagtctctgccattctactcacacaggcctgtcattcctcaaatcacaaagctctttccctcctcagggcctgcactgcttttccctcaacctgaaacccccttcctttcggcttttcccatgcatagctggatccttaccatccttacatctcagctcaatgtcaccttttcagagaaggcttccctgtccactctatttaatgtggatttcccataattctctttttacccagttgtttcattgaaagcagttacctgagactaaaacacacacatgcacacatacacgcacacgcacacaaacatacacacacaaatcccaatttttttttcctatttttgtttactttttttttcttttgagacgtgggtcttgctctgtcacccagactggagtgcaacagcgcaatcttggctcactgcaacttctacctcctgggctcaagtgatcctccctcctcagcctcccaagtagctgggactacaggtgcaygccamcacacccagctaatttttgtattatttgtagagatggggttttgccatgttgcccaggctggtcttgaactcctgagctcatgcaatccacctacctaggcctcccaaagtgctgggattacaggtacgagccacagtaaatggccatatttttgtttactttctgatgcccatttctctgaccagactgtgagctccatagcacagggctcttatcattttcctcattttctgttgtatctccagtgtctaacacagttcctggcactttgtagttgctcaataaatatttgttgttgttgctgaataagttgaaatttgagtggggttctgaaggacaggtagagcctgacaagtgagactcaatagggaagggatactcaggctaagagaataatatgaacacaggtctcaagtggatgatcacaggatgaatggtttattaccacaagagctgagggtataaaaggcaaggaaacagcaggggatcatgcctcccaactctggttcccattctcatgcaatggggagacagtctgtccttggctccagaccactgcaaactgcacacagcaggatcaggtctctcctgtgacccccacccaatgctgtccttcctttgatactactggtccacctgtagcaccttgacctgatcttcatcaataaccccaggaacccaactactagtctggcattccacgcagaatcacacgtgaccagaacatcagaaataaacccagagaaataccccattatggtagaagcaggaaagcaaaaccaaagataagcaaggacttgcccagggtcatctagtaagtcactaagccttctagatctctctccatgtctaaacctgctctgagctgctcagttccctaaaaatgtctacctcttggccaggtgtggtggctaacacctgtaatcccagcactttgggaggccaaggtgggtggatcgta

SEQ ID NO: 95779 - DNA, 35247 bp, Homo sapiens
aattttttattttaagagaggaggtcttgctgttaatatattgctcgggctggccttgaattcctgggctccagcgatccttccaactcacaagtagctgaagttacagggcgcaccaaaactcctggctcattttcattattaatgataaaaggtcaatccactaagaaaacatagcactccgaagtgtgtatgtatggaaaacagagctgcaaaatatgtgaagcaaaaactaatagatagaaatagataaatccggccaggcgtggtggctcacgcctgtaatctcaacactttgggaggccaaggcaggtggatcacttcaggtcaggagttcgagaccagcctggccaacatggtgaaaccctgtctctactaaaaatacaaaaattagccgggtgtggtggtgcatgcctgtaatcccacttatttgggagactgaggcaggagaatcacttgaactcaggaggcggaggttgcagtgagctgagagtgtgccactgtaccctagcttgagcagcagagggagactccatctcaaaaaaaaaaaaaaaaaaaaaattggccaggcgcagtggctcacgcctgtaatcccagcactttgggaggccgaggcaggcagatcacctgggctcagaagttcaagaccagcctgaccaacatggtgaaaccccgtctctactaaaaatataagaattagctgggcatcgtggtgggtgcttgtaatcccagctactcaggaggctgaggcaggagaatcgcttgaacccgggaggcggaggttgcagtgaacagagatcgcaccactgcaccccagcctgggtgacagagcaactctctgtgtcaaaaaaaaaaaaaaaattgccaaattaattacccttcagaaatttggttcctagtcttgatactctccaaaattgggtataattatggatttcaaatacttaaaaaaaattttctttttctttagacagagtctctctctgtcaccaagtctggagtgcagtggcataatcttggctcactgcaacctccacctcccagattcaagcaactgtcctgcctcagcctcacaagtaactgggattacaggtgcatgccaccatgcccggctaattttgtatttttagtagagatgcggttttgccatgttggccaggctggccttgaactcctgacctcaagtgatccacctgccttggcctcccaaagtgctgggactataggcctgagccaccacacctggccaaatcttttaaaatttaacaggtactattcacaatagcaaagacatagagtcaacctaaattcccattaatggtagactggataaagaaaacgtggtacatatacaccatggaatactatgcatgcataaaaaagaacaagatcatgtcctttgcaggaacatagatgcaactggaggccattatccttaacaaactaacccaggaacagaaaaccaaatacagcatgttctcacttataagtggaagctaaataatgaaaacacatcaacagagagagggaacaatggacatgggccctatttgagggatgagggtgagaaaagggagaggtttagaaaaaaaaaaacttaggtgctgtgcttcgtacccaggtgatgaaataatctgtacaccaaacccccaactcaccagtttacctatgtaccaaactggcacaggtacccctgaactaaaataaaagttaaaaaatttttttaatttaatgggtgacaaaactttgccatacactcaccaacaatgaacattatcatttgtaattaaaccttttattttgagataattgtagattcatgtgcagttgtaagaaaacacagggggctgggcacggtggctcacgcctgtaatcccaatactttgggaagccagggcgggcggatcacccgaggtcaggagttcgagaccagcctgaccaacatggagaaaccccatctctactaaaaatacaaaattagctggacacggtggcatgtgcctgtaatcccagctgctcaggaggctgaggcatgagaattgcttgaacttgggaggaggaggttgcagtgagccaagattttgccattgcattccagcctgggcaacaagagcgaaactccgacaaaaaaaacaaaaaacaaaaaacaaaaaaacctcagcatgttgggaggctgaagcaggtggatcatttgaggtcagaggttcaagaccagcctggccaacatggcgaaagcccatctctactaaaaatataaatattagccgggtggtagcgacatgcacctgtaatcccagctactcaggaggctgaggcaggagaatggcttgagcctgggagaggtggaggttgctgtgagcctagatagcagaccctgtctcaaaaaaaaaaaaagaaaaagaaaaaagaaacaaagaaaacacagagaaatcccaatgccctttgctcgctttctcccaatggtgacatcttgcaaaaccataataaaacatctcaactaggatactgacaatgataaagcaagatccagaacattccatcaccacaaagtttcctcatgttgcccttttacagccacatttacctctctcttgctcccgtcccctacctaatacctggcaaccactaatctgtggttcatttctataatttggtcatttcaagaatattatagaaatgaaataatatactatgtaatatattggaattggtttttgtcactcagcataattctctaaggattcatccaggttgctgcatttatcaaagtttattccttttgctgagtattatttcatggtatggctgtaccaatttgtttaactgttcatccattaaaagaacctggctgggcgtggtggcttacacctgtaatcccagcactttggaaggccaaggcgggaggatcacttgatgtcagaagttcaagaccagtctggccaacatggtgaaacaccgtctctattaaaaatacaaaaattatccgggtgtgggagcgtgtgcctgtaatcccaggtacttgggaggctaaggtacgagaatcactttgaacctgggagacagaggttgcagtgagccgagatcacaccattgcactccagcctgggcaacagagagacactctttctcaaaaaaaaaaaaaagaagctgaaataataggaaattggctatatcaattgcaatatatccataggctagaacattctgctgctagagaggttgcataaggccagactaaggtgcttagaccttctcctgagaccagcagtctccaaagttttgttcatatgaacttaacggtacaaatattagcaaatatctcattagctgatatctcaaagcacgatatacagtgaggatgagagtcatcattaattaatgagagggcatgtaaattcacatttctttttttttctttttttttttttttttgaggcagtcttgttctgtcacccaggctggagtgcggtggcgcaatcttggctcaatgcaacatccgcctcctgggttcaaacaattcttgtccctcagcctcctgagtagctgagtttacagacgtgcaccatcacgcccggctaatttttgtatttttagtagatacagggtttcactatgttggccaggctggtctggaactcctgaccccaagtgatccactcgccccggcttccaaagtgctgggattacaggtgtgagtcactgcgcctggtccgtaaattcatatttcaaagtgtctttttcattgttttctcaaattttattacattccttacaacatggctgacaaagaccagcattcataccagaaagagacctgtcagctgtgtccttttctacttgtttgctgtgctggtaattttcacagtatctggaacttgccatttctttgcaggaatattttgaagccatttttctgttctcgtaggacaacctagtaacatgatcctacgtttagttagactgacacgactcactacacactgcaatgcactgcagaatgctgaaagggatgcgtgaggaccctgctgcccacctcccaggcgtggaccctcgttccctcaggaagtctctgcttgacatcggccctcatgactctcagacagaggtcagatgtacagatcaagtgagaccaatacatttactatgtcatagaagaccttaattcttatttttattttttattttttgagacaagagtctccctccgtcgcccaggccggagtgcagtggtgcgatctcggctcactgcaagctcggcctcccgggttcacgccattctcctgcctcagccttgcgagtagctgggactacaggctcccgacaccacgcccagctaatttttttttttttttgtatttttagtagagatggggttttaccctgttagccaggatggtctcgatttcctgaccccgtgatccgcccgcctcggcctcccaatgtgctgggattacaggcgtgagccacgcgcccggccagaagagtttaattcttttctcatttttaggttaaaaaatgagtagaggccgggcacggtggctcacgccagtaatcccagcactttgggaggcagaggctggcggatcacctgaggtcgggagttcgagattagcctgaccaatatggagaaaccccgtctctactaaaaatacaaaattagccaggcgtggtggctcatgcctgtaatcccagctactcgggaggctgaggcaagagaatcgcttgaatccgggaggcagaggttggtgtgagccaagatcatgccattgcactccagcctgggcaacaagcgccaaactctatctcaaaaaaagaaaaaacaaaattagccaggtgtggtggtgcgtgcctgtaatccaagccactcgggaggctgaggcaggagaattgcttgaaaccgggaggtggaggttgcagcgagcctagatggtgccactgcactccagtgtgggcgacagagtgagactccataaaaaaaaaaaaaaattcaggggaaaaaaagcaattaaaaaaacataactataaaaataatacaaattacaaaacaaccatttacatagcatttacattatattagttataagtaatctagagatgattaaagtgtacggaggaatgtgcataggttatatgccaatactgcctcattttatatgagggacttgaacatagaagggttttggagtccacagaggtcctgaaaccaatttccccttcccatgcctgggatgactgaattatacagcagcaaaaatgaatatactcaagctatatgcatgagtctcataaatataatgctcacagaaaaaagcaagttgcagaagggtaaatacggttgatatataaaggtgctaaacacagaactatttaatgatatacggatgcagtaaaagtataagaaatgtatgcaaacttacttaaattcagggtgttggttacttggagtaaggcgaatgtttgggatgtcagtaggtacctgacaaatggcaacttaactttgttttggtttttttgagatagggtcttgccctttcgcccaggctcaagtgctgtggtgggatgatagctcactgcagcctcgatctccaggctcaaaagatcctccctcccgcctccgcgtcccaagtagctgggaccacaagcgcgcgccaccacgcccggctaatttttaatttttttttgtagagttcaggtctcactgtgttgcccaggatggtcttgaactcctgggctcaagcgatcctcccgccttggcctcccaaagtgctgggattacaggtgtgagccaccgcgcctggcctgcaactttacttataataatctgtgtggcagatgtcatttggcccattttacagatgaggaaattgaggcacagggaagtgaactggcggaatttcagttccgctgggttttgacactgaatcaactggctgaaccagcgagaggacggcccggctggctctcaggcctctcccggcgctcccttccggaccggtgagtgagactcctggggccacgccttgtgaaattctgaggcttcttttcagggatcgaaatcccctccggctccgccctgcgcgttgggccccgccccagcgggtcatgaatatgcaagtgmgaggaagatatttaaaggcgtcggcgccacgcgcatatccctgctcggcgctgcccgcccagttcctgttcccagactgaggcccagcccccttcgcccgtttccatcacgagtgccgccagcatgtctgacaaactgccctacaaagtcggtgagtcccaggacctgcagccggttgcggccgcccggcacccgcccggggcttgttcgtggcgggggctgcagggccgactcggggctctctggaccccctggaatcgcagcctcggcgcgtttctggccgcgcgaagccagctggaagttggagttctcgcgcggccatgagcgggccgttccgggtggccgtggactacaagtcccagcatgccccgcgacgccggggccgccgcgcggtctgcgagccgcaaactggcggcgtgctccgcgggagagcacacctggccacggcctgggacggctggcacctgccggaccctgctcggggggcctgcgcccggcctcctaggcctggaccggaccctgtccagctgggcggccccgacgagcgtccacccctctctgggcctcctacagggacggcgagggcaccccggagggtgtatgaggagaggcctggaaagcgagccccaggccggctccgatcctcctctcccctgggactttgggccagttacccaacctgtggggtcccccacccctccagcaggggcagccttgcagaaatctcgaagaaaatttggagtggtttgaaaaatcctgctgtcccaccgattgaagtgtaatacagggatagttaacgtttacttagtgtttcctgtgggatcggcactgccttctagctttattctagtctcatggctctrtagggaaactgttctcattttatgatgagaatcctgaggcagaggtaacttgccctcagtcttacagctggtggtgatggagcaagattggaacgcaggccatctagatctctgagcgcaccctttcaccactgtgtgcaagcgaatacacgcggaacaatcctagtgaattttcagcaaaaaccagttcagtttggctggtagcttttcaagtaactttgacactattggaccgggtgtggtggctcacccctgtagtcccagcactttgagaggccgaggtgggcgaatcacttgaggtcaagagttcgagaccagcctggccaacgtggtgaaacgctatctctaccaaaaatacaaaaactagctgggcgtggtggcgggcgccttcattcccagctactcgggaggctgaggcaggaggactgtttgagccggggagayggaggttgcagtgagccgagattgcaccaccacgctccaacctgggcaacagagcaagaccctgtctcaaaaaaaaaaaacaaacaaaaaaagacactattaagtctggagaatgccatccacatttatggaaacacttgctgtatatctggtgatttacgtgtgtttacacaataatcttcatagagrtggacgtaatcccgttatatagagcatgaaactgaggcccttgggaggtgacttgcaaagattctgttgaagtagttcatcaagttgctaccagagtagactgtctccattgtgtggatgctgaaactgaacccagaaaggttatgtgaaggtcacatcaatagtagagctggaatgggggcttgtcatactgtggagagattagtgggtcaggattggggccattgggttgtgtgggtggagataaagctggatttggggatggggagcttagctgggtggggctggaggaaggaggccctgctgtatgccagatcttgatcatatggcattatctttacttaaggcgcatagcaagctagggatgattatccacactttacagatgaagaaactgatgtttacaggggctcttgctgttcctcttggcttgtcctggggacaggtgttcctgtgacttttgcaagtccttagctccagagattgcagcatctagcctctcctgtgcctttggagttgagggtcccagggaaaactgtggggctggcacagtgtcctcgagggcactgaaggagttatttttagctggagggacatgtggtggtggaggggtggagcttagcagcacagggcataacccattgtcccatacagccgggcccctcccaggaggggccttgagaggggcctctgctctagccctgcctggctgccagttctggttctgcggttaattggctatggaacctgcagcaaactcctctctgggtcctctctgggtcattagtaaatgctgggactcagactaggttcagatttgtgttgtttttctttgccacccttgtcacgtgccagcccctctcatggatctttcattcagttctgaggacagatatggtcggtaaacagttgctgaccccttctctgagccaggtcatgctggagacacaaaggtgacccagagacaggggtggcacagacatgcatacagataaagtagtattgtctccattttatgtgagcagatctgccacttgtctgtctccacggtcaccaccccagtctggtctctctccttgcaggtctccctggatctcttgctccgcagatccacacagcagccaatggggtcttttcaaaagacaaatctggtctctgaatgctggyccctgaaaactgtaggttccccacttcactgggactgaagtcccaactcatcttatgcctctatttgagtcaccctggtgcactcttggttcctctagcagggatatactaggttctttcctgtttccaggtttttttcagcacctactgtgtgccaggtactgtattaggtgcttgagaggagccttccaggccgagaactgcttgggttaaagccctgaggtggaaatgagtggagcttgcctgaagtcagtcaggaagcctgtgtgttgaacagctagtgagtggggaaagtggagagatggaggaggggcaggcagtcatgcagatagggcccgaagattgagggaagccattggagggtttgcttgtttagttttgtttactttagtagaatgatggaggtgatgtaacttaaatttttaagagcctccctcttctggctgctgtggggagaatggcatgttagagcatgggaccagtgaagagagtgtggcagtgtccaactgagaagtggcagtgtatttatttctttattgttttttttggagacagagtctccctctcacccaggttggagtgcagtggtgctattttagctcactgccacctccgcctcccaggttcaagcaattctcctgcctcagcctcctgagtagstgggattataagtgcccaccaccacgcccaactaatttttgtatttttagtagagatgggatttcaccatgttggccaggctgctctcgaacttctgacctcgggtgatccgcccaccttggcctcycaaagtgctgggattacaggctgtgagccacygcgcccagcctgagaagtgacagtttagatgaaggtggtgagatgcagttggattgcttatatatttcacttgttgagccaaaaacgtgctgattgaggtgaaagaggaaaagaggaatcaaatcttaagtttttgggcagagtagctggttgaatggtggtttcatttcctaaaatgggaagattgggagagtaaccggtagtgggggcaaaggagccatgaggactccaacatgacacataatagatccaactggacatccaagtggaggtgctgtggaggcagttggatcacatcgagtctcaagttcaggggagtagtttgggctggatataaatacgtgggagtcatccccgtagagaaggtatgtaaagccataagactggatgagcttaattggtaaacataagagaactgggagatgatggagccctgagggcccccaaaccctaaagtctgttagctaaagaggaaccaggaaggtaggtggaaaagcacaggacagtcacagaagccaagtaaagaaagggtttcaggaaggagggcaagtcattcatgcaatctgtgctgctggtagaaacatggtcttaggtaattttgcatcaggtatggagatcaggctggtctttggacggaagagcagttttagtggagtatggaagtccttaaggaggagaggggatatggaatcaggccccatggagcagggatagtgtagtgaccagccccatagggtcggtgggtctctccctgtgtgcggcgacgagagagtgtagaaataaagatacaagacaaagagacaagagaaaaggcagctgggcccgggggaccactaccatcaatgcgcggagaccggtagtggccccgaatgttgggctgcgctgttatttattgcatataaggcagaaggggcagggtaaagaatgtgagtcacctccaasgataggtaaggtcatgtgggtcacgtgtccactggacagggggcccttccctgcctggcagccgaggcagggagggagaggagacagagagaaagacagcttacgcmattatttctgcatatcagggactattagtatttttactaatttactactgctatctagaaggcatagccaggtgtacaggatggaacatgaaggcagactaggagtgtgaccactgaagcacagcatcacagggagatggttaggcctctggataactgtgggcgagcctggctgatgtcaggccctctacaagaggtggaggagcagagtcttttctaaactcccctggggaaagggagacaccccccccccycccgccgccgccacttcccagtctgctaagtagcgggtgttgttccttgacaccttttgctaccgctggaccacgatccgcctggtaacgggcgtcttcccagacgctggcgtcaccgctagaccaaggagccctctggtggccctgtccgggcataacagaaggctcgcactcttgtcttctggtcacacctcactatgtcccctcagctcctatctctgtatggcctggtttttcctaggctatgattatagagcaaggattatcataatattggaataaaaagtaattgctacaaactaatgattaatgatattcatatataatcatatataagatctatatctagtataactattcttgttttatattttattatactggaacagctcgtgtcctctgtctcttgcctcggtgcctgggtggcttgccgcccacaggacagctcatctattttattttatttttttgagaccgagtctcactctgtcacccaggctggagtgcagtggcatgatctcagctcattgcagcctctgcctcccaggttcaagtgattctcctgcctcagcctcctgagtagctgggattacaggcacccaccaccacacccggctaatttttgtatttttagtagagacggggtttcaccatgttggtcaggctggtcttgaactcctgacctcaagtgatctgcccaccttggcctcccaaagtgttgggattacaggtgtgagccaccgcgcccattcaactcatctgtggtaacaggaaagagtgcctggtctgaagctgtagatgactgctataggtgactagtggattccataggggaaaagtggcctggttctgaattcatctcagtgaattgggaagtgagattgtcattcaatggggaaaggtgttggagggttgaggagagtagaaaatgggagtaaatttactaggaaaatgtcataggattgctgcaatgtgctatgtgtcttttatggtcttaataaatatgatatcttggccaggtgtggtggctcacacctgtaatcccagcactttgggaggctgaagcaggtggatcacgaggccaggagttcaagatcagcctggccaacatggtgaaaccccgtctcctctaaaaatacaaaaattagctgggcatggtggcgagttcctgtaatcccagctattggggaggctgaggcaggagaattgcttgaaccgggacctgagaggtggaggttgcagtgggccgagatcgcgccactgcaccccagcctggtctacagagccagactatgtctctaaaataattaattaattaattaattaaatatgatgtcttggtggggttgtgattgtcctcctgctgggttcagtgggtccggtgcagtggagggtcgggtttaattgggctgagagttttgccaagtgagttctcaaagggaaagggggtagaagggacactagaaattggtaggatgaattgaatagaggttctcacctgacaggccacagccttgttggagcttggcctctggaaggagaaaaccagaaagatgaggcgtggctagagttgggtgcttgaagtccagatttccaaggagagctatcactggtgatggcctactagggtaggagggctggggtgggtggcttgagttgaggcacagccggagtggtctctcatgcgggaggcgtgtttcatctctgaaattgttaaaatgcactgtaggaagctgactgacagacaattttattgattattaaattcttagattattaaattctctacagagtcctttgcctcccaccgcctacctctttgggtgtttggcaggatctcagcttccctaaagataaaaatcaccaggagtcttagacctgctgaatcatattttccaggggagatttacaagcatgccagaggaacatcccttaccggggaagtctgcaaactttgacctagggactgacctagggtatgaccttggaagtggaccagtgtggtaggggagagtattgagatagtgagttagctcataataatatccttctttcctgcctgagaatttgaacaaattcgagacattttaggtggcagatagcacctgaaatactttttgttactagtaaccatgaagccagaggatgtagattagtattttaggtggcaacacctgaaatattaccttttattactaataacctcaaagccagaggatatagattaatatgaaatccaaatgatcctgcttattgaacccccagattcagcagttacccaatcagttgcaggcaaggtgggccagggtaggttggtctctggaaaagcagagaacaccagcttcctgcaagtgggcaggtgagtgcttgcttgcaaaaagaagggagagctaagctgagcacaccattttttcctctcagttttactggtcagacaagctcaccccacctcccctggggcagagaggccaagagcattcgttatacggatgagttcctccaggtggaaagaaacatcaggagtggggaagcatttttacatctaaaaggagatcaaggaactgtcaaatccaaaatgttagatagtatttataagtgttgaatcaccgagagtgatgactgagagaggaagatggagaaccagcagctaacatctttagggagtctttagggagtgaggagtggcctggaggttggtaggtgtcagcagaaaggcagggtagtgggaagtatcatgtgagctatttttcaaagggacgcttctttatgttgtaatttttgtgtccctgtgtgattaaatgtgttctcccacaagtcagaaaggtgcaggtaggcagggaccgtgtctttcttgagtactctggcttcataaatacttgttgcatgagtgagagaatgcggtgacagagtgctaagccctagtgtgttgagtccacacgtggatcggggtccatgcagtgacygcccctcttggttggtgggatgaggggactcacggaactcccacctgtttcctcccgtagccgacatcggcctggctgcctggggacgcaaggccctggacattgctgagaacgagatgccgggcctgatgcgtatgcgggagyggtactcggcctccaagccactgaagggcgcccgcatcgctggctgcctgcacatgaccgtggagacggccgtcctcattgagaccctcgtcaccctgggtgctgaggtgaggcccacagctgtatcaccccagagtccttgccctccctgggttcagccagggaagaagacgactgtgccagggtggggaccttccaggtgtggagctgaccgcgggcctggaggggttcctccctctcactcggtttcctccgtttcccagtgctgccaccccttgtggtgagtgttctgcagattttctccctggctgggaaggtcactgttggctaccctcaaggcatcctcctgatggatgctctggcaggaaaaattcaacacccatgtcctacttagtctcttaagggccagcttgccttggcccttcgggggtcacaggcctaccctggacccatcatggctgctggatgatggcagctctgattggttcagcctgggtcatgtgtgccaatgattaacagctctcctaaggtctcagagagtcaagaagcaagctggtttcccaaagcagggtagggcaatggagccaaaatccacagaggggctcagggctgagtccttggacctcttctttcttttcagcattcactcttggcggtctgattttatagctttagacactatctggtgatgactgtcacatttttgtactagcctggacttctcctggaactcaagactggcatatccaggagcgggggcgttgacgctccctggaggtctagtactcatctcaggcagaacgcgttcaaacagactcaggattttctgccccctcttcttcccaaagccttccccacctgagtaaatggaacctctgttccagccttctgggttctctcaattcacgaatctgggagtcatctcctcccctccctttcctccccactcccaactccctttactccaacaactcatccctctgcaaatcctgtcagtgcagccttcagagtagacccaggatgtgacaacttctcatcatctccactgctactgtcatatttcttgtctggagtcttctccaacagtctctgcagttgtccccttgcttccaccctttcccttccacacagcactggagtgaggttttaaaacctgagttggatctcgcccctgctctggctcccatctgcccacccagcatccccagcctgtgatcctagagcttgctgtgcctagatcccaagcctctccccactacccgaagctctcccttttcctcgcccagcgtccctggtgcttttgagccatcagtgaccaacagccttgttttgatggctcttctaggtgcagtggtccagctgcaacatcttctccacccaggaccatgcggcggctgccattgccaaggctggcattccgggtaagtcctgcttgcttctgagacgtggaatttgtgaagggattctgccctctttgcttcactgactgctagagcaacagacttccttacatatcagaaagggagaggagtcaccgccacaaaatcctagcccagcgaccccacaggaaagagctgctttgtcccatcatcatctaaaatcctgtggaagttgtttattgacccaggtcaagccgtgtaaccaggaagagcaagatcttatgattgggaactacatgatgaagcggaggggaagttcattaaaggaaggatgtggatctctttccaaagaactggggagggctacggggcagaaaaagaggttcactgcctagggtatggcggtctaaaggactgaggaargaccaagtctaacgagaatggagttttcacaggctgggcacatgtctgcttggacttggggaggggagtggttagatctgacccagtgattaggacattcaagattgcttctaaccaaccacaggtggacaggagggggtggcacagcactccttcacagactgaccagggctgaatgggcatgatccccattcctcagccttggcaccgtggctttcttcttttttttttttctttttgagacagagtcttgccccgttgcccatactggagtgcagtggtgcgatcttggctcactgcaattcttaagactattgtctgctccagttgtgggtagaagcagctggctctgcttggccagcgtcctttgctcacaagaggctcctgggaaccccacacctgtgccctagtcatgccacatgggaggagtgtgggctggtggtcagtagccctyagttctggtgtctattctggaatttcatktagagtggcccaagtgcgtcttagctcctctctgggcatctgtaagtgatgataatggtcatggctgcctcacagggtttctatgaggaagaatgagatggggtatggaggatttagagtcatgtctggcagaaagcaagtaccccacacatggtagctgctcgtagtcattttttggccagactttgcctgagattcccccacacagaggctgctagtgctccagtcctttcagtgcagagcaaaccctggatcctgccrtgtggatcctgctgagggggaggygttgtggggtatcaagccctggtcactcagggttgatgcctcagtccttggcgcccaggcagaaggggatgggaaaggaaagaatgatttcctgatatctatatctggggcggggggctgtacatggcttctgtctcacttaatccatactattgtgagccctatttacagaggagaagactgaggctcagagaggtgaagtgatttgcccaaggtcacacagctggcaagtggcagagccagggtttgaactcagatctatctggctccaagttgtgtcctgaccactgctgagttttcagaggggccggaggtggctggggatgggagttgggaaggaggtagttttggctctgccagagttgttccctggagcaggtaccagttgggaagtccaggccctgatgtgccactcaccctccagtgtatgcctggaagggcgaaacggacgaggagtacctgtggtgcattgagcagaccctgtacttcaaggacrggcccctcaacatgattctggacgacgggggcgacctcaccaacctcatccacaccaagtacccgcagcttctgccaggtgagcagggcggggcaggtgggctgggtgctggtggcctgggtggggcctgtttgcccacatgatggccgcaggcctggcaggactcccatcacctcaagcagcaggatctggaagatgggaggatggcaggctctggcattcatgctggggcctcctgacttctgagggtgcgaggctagggcagctgagctgatggcccaagggcaggcacagacagggccatggttgggaatagctgggagggagccagctttgttcaaagcaggtacgcagagtgcagaggccctgaggcaggaatggctggagtgttcaggaaacagaaaagaggcccacaggatagcagtgagcaaagggagccttcactgcgggtatggtgtgaacttcgtgaagaccagatgtgtcagggcctaataggccaatagaaaagtgtttgacctgatwtgcagagcaaggggaaataactggagggcgttgagaagatttctctgagaagatacatgttagaaatggctgctgcatggaggatgggttgtggtagggagactgggaagaagcgacagggtcacggactagagcagcggcagtgagaatagagaagctgggagttgttcggaggcagagtcactaggcctggtggtggcttccctgtaggagggcgttggggactcctccctcaygcgggtctgggtgattggggggcctgtgggatcagtcacagagatgggaacccagaaagaggaatggctttagggggtaaagatgaggaatttgcatgagcacaggtgtggcatctctgaggcttgtcctgtcccctcttgtttaggcatccgaggcatctctgaggagaccacgactggggtccacaacctctacaagatgatggccaatgggatcctcaaggtgcctgccatcaatgtcaatgactccgtcaccaaggtgagccgagggkcagtgacagctcccgctacagtggctgcagctcaggacgaggcctctgaagaagagtgcccaggaaggctgagattagggacatgaagccctcatttgagggggcaaaagcggttatagacaggctaatgagtgcgtttaaaaggggtgtcagagctgggtgttaggagctttatggctttgggaagaagagctttcaagttaagcaaggtctttgaccgggcaatctctcctagtaactgatgcctaggaaggctccacactggcagagaaagattagagagaagctctttgagccgatcggggtgaagggcttgtgggggcattgggtgctggaggggttcagcccaggccgggatgcttggtgggcccatgatgcctgggctcttcagaatactctgaggccaagttgtcctggccccagggccttgcctgcccctattgtctccttaccccctttcctttcagagcaagtttgacaacctctatggctgccgggagtccctcatagatggcatcaagcgggccacagatgtgatgattgccggcaaggtagcggtggtagcaggctatggtgatgtgggcaagggctgtgcccaggccctgcggggtttcggagcccgcgtcatcatcaccgagattgaccccatcaacgcactgcaggctgccatggagggtaggatagggcaagggttggttgtcagccactggggccagagggaggggcaaggscaccgtagatgacccacagccactgtctctgcacaggctatgaggtgaccaccatggatgaggcctgtcaggagggcaacatctttgtcaccaccacaggctgtattgacatcatccttggccggtaggtgccagatggggggtcccggggagtgagggaggagggcagagttgggacagctttctgtccctgacartctcccacggtcttgggctgcctgacaggcactttgagcagatgaaggatgatgccattgtgtgtaacattggacactttgacgtggagatcgatgtcaagtggctcaacgagaacgccgtggagaaggtgaacatcaagccgcaggtgagaagctcccgccttgccagtgggctgggcagatgggagtgcagaggagtgctggctgccagggaggagagctgaggagatggtggcaacctgtgcagggggatggggagaagagggcctagcatcagagccagccagaygtggcaaccttatcctgtgggcagccggcatccctgaaggtatcaggcaggtgagctgtatgtggtgaggctgtagttttagaaagatcactctagctactgtgtgcagaataaaagcaacaatggcgggtggtggggagagaggcttttagaggaggctcgtagaatccctgcaggggatgatggcagcctcagcttagggagtgctggggtggatggacggcatgtrgggtcaggatggaggcagagtaacaaaggacacagctttggccgggcatggtggctcacacctgtaatcccagcactttggaaggccgagatgggcggatcacctgaggccaggagttcgagactagcctggccaacatggttgaaaccccgtctctactaaaaatacaaaaaaattagctgggccgggtgcggtagctcatgcctgtaatcccagcastttgggaggtcgaggcgggcggatcacatgaggtcaggggttcgagaccagcctgaccaatatgatgaaaccccatctctactaaaaatagaaaaattagccgggtgtggtggcgggcacctgtaatcccagctatttgggaggctgaggcaggagagaattgcttgaagctgggaggcggaggttgcagtgagccgagatcgcaccctcgcactcctgcctggttaataagagygagactccatctcaaaaaaaaaaaaaaaaaaaaggccaggtacagtggctcatgcctgtaatcccagcactttgggaggcctaggtgggcagatcacgaggtcaggagtttgagaccagtctggccarcatagtgaaaccccgtctctactaaaaatacaagaagttagccgggtgtggtgatgtgcacctgcaatcccagctacttgggaggctgaggcaggagaatcacatgaacccgggagatggaggttgtagtgagccgagattgttccactgcactccagcctgggtgacagtgcgagactctgtctcaaaaacaaacaaacaaaaaaatcagctgggcatggtggtgggtgcctgtaatcccagctactcgggaggctgargcatgagaatcgcttaaacgtggtaggcagaggttgcagtgagccgagattgcgccattgcwctccagcctgggcaacagagcgagactccatctcaaaaacaaaactaaaaacaaaaaacaaaaagggacacagcttgaatcactgtgtgaggagcaggcccatgcactgagctgggaaagaacaggtttgcattgggcattggggcactgaaactggaagatgagttcttatagggggtgtgaagttttacttgagttgcaattattatgagtttatttttttctctgattataaaagtagtatgtttctggaagacattttggctttggatatcaagagctttaaagttaagcaacctctttgactgggcaatctctcctataattggtccttaggataattaaatatgtatgtagagatgttcatcattttttttttctttttttgagatgggctcactctgttacccaagctagagggcagtggcatgatcatggcacactgcagccttgacctcctgggctgaaggagctgatcctcctgcctcagccttccaagtacctgggactacagatgtgcactactacacctggctaactttttattttttgtagagacgaggccttgctgtgttccccaggctggtctcaaactcctgagcttaagttatctcccaaagtgctgggattataggcgtgagctgccacaccaggtccaccacattttttaaagggagaaaagcccacctatgtgaggttctttgagttggtgctgtgccgtgtttgagatatgataaggaagatacagacacagagttggccaaagccctgacacccacccagtcacagccacaccagaagcccaagtcccagagaggcagacaggcagctctatgaacccacatcccctacactgtcctcttgggtgctctgctcctgcgtgggagttctccttggctaggtcctgcactagtctagggtgtcagttcccggctaggcagagggcacctccatctctgcctagaaggcctggcactcatcacagtgtgggggtggccagggcgtgcttctgtggcagccacacccctgacagccatctgtctagacctcctttttgcaaaggcatcacaggtgaaacctgctacattggggtgatgggcacctttctgccaagctgccctccaaagctggactctatgcccaccctcaacatccttgacagtcttgccaaccttctgcccaacattatctcttgtccgtcctctcaagggcctctgtactcaggccataattgaccactccctgaatacccactgcagctcctacttctgctcatctgtccagacagctgcatttgtctggaacagaacacatgcccttctccttgttcatcttctcagcccagctcaagagacccccttcyggccaggcacggtggcacacacctgtaattccagcactttgggaggccgaggcaggcggatcacttgaggtcaggagtttgagaccagcctggccaacatggtcaaaccctgtctctactaaaaatacaaaaaattagctgggcatggtggctcatgcgtatagtcccagctactctggaggctgaggcaggagaatcgcttgaacccaggaggtggaggttgcagtgagctgagatcacaccactgtactccagcctggatgacagagtaagactccgtctcagaaaaaaaaaaaaaaaaaaattaataaaataaaaaagagacccccttcctggccagctcctctggcagaggcaatgcccacactcttagtacagacccctagtgcagcatccatcactggctttggtctctgaccccactgttgtaccaggagggtagagtccaggttgacgtgtccctgcaaggggcttagatgggtatcagtgagtgcttattgattgaagcatcaatcaatgcctgatgggcatcagagacctttccttggatcggtactaggcctctggagcagcttggaaacctgggcttttggggaaatgtttgggaggctgcctgagggtggagggatggcaagggaagagctgggagtggggagaaagcaagtttgtgtgttcagacagctgggacagacggaggactggggcactgaggctggggatttccatgtcacgttcactcactaaaccgggagttctcaaccttggcagtcacctgggagccacactgtgggccacaggaataggagtctctgggaatgaggccaaggtatcttttttttttttttttttttttttgagacggagtttcgctcttgttgcccaggctggagtgcaatggcgcgaycttggctcaccacaacctccgcttcccaggttcaagcgattcgcctggctcagccttcctgagtagctgggattacaggcatgtgctaccatgcctggctaattttgtgtttttagtagagacagggtttctccatgttgttcaggctggtcccgaactcccgacctcaggtgattccccccgccttggcctcccaaagtgctgggattacaggcatgagccaccgcgtctggcctgggtatcctcattttttaaagcttctgaggtgattccaatgtgagygccacggcattcagcttttgctaagctgcattcaaaactatttcatggttattgagaacatgggatctgtcctcagaccgtccagactcaaattgcagcctcctcttagtgtgtggctctggacaagtgacctaacccttgtaaacttcagtttctgaatctgaaatggggatgacagcagtactgaaatcacagggttgtttctgggatgaaatgtggtagttacctgtaaaggacttagtacagggcacatgacagtgatcataacgataacattagctgctgcttactgagtgcctcatatgcgccaagcaagtgtgagcacgtgaagttctcacagcagaactgtgcagtctgcagctcagcatttctttgttgtttttttgttttttgttttttgagacagagtctcgctccgtcgcccaggctgcagtgcagtggtgcgatctcggctcgctgcaaactccacctcccaggttcacgccattctcctgcctcagcctcccgagtggctgggaccacaggcgcctgctaccacgcccggctaattttttgtattttttttttagtagagacgggctttcactgtgttggccaagataatctcgatctcctgacctcatgatccgcctgcctcggccttccaaagtgctgggattacaggcgtgagccaccgtgccccggccagctyaacatttcttaataaatattggctgttatttttgtgctaagccatgtgctggaggttgttttggagcagttcggactcctcatgggcactgttggaggcagagaggcctgccagatcagagggtgggctgtgggagcggggccctgcctgccttcactgttgccctgcctgygtgtaggtggaccggtatcggttgaagaatgggcgccgcatcatcctgctggccgagggtcggctggtcaacctgggttgtgccatgggccaccccagcttcgtgatgagtaactccttcaccaaccaggtgatggcgcagatcgagctgtggacccatccagacaagtaccccgttggggttcatttcctgcccaagaaggtgggtttattcttctacctcaagccaagggtcacgtgtctaatcctgggatccccacacagggcttgccagagtttataaagtgcttgcctgtctgccctcttagaggccctcatggggtcctctacagtgcagaagtcattctccccattgacagaagaagaaactgagacccacagtagggagtggctccctggagcacagcagagcggcaggaccaggtggtgaggagagcctgggccttggagcgggacacaccccagtttgaatctcagccccaccacttacaggctgtgtaatccaggcaaattctttctctgtcttcattttctcatctgtgaaatgaaggtaatagcaacccccttcaggattgtgaggatttcctgagatcatgaacccacacacccacaggggctaggcaggtaaatgagtgatgccagctgaacaaggactggaagagctgaaggggtaaagggctggttgccacctaggaacccaggtccgtctgaccagggcttctaacctttcaggagagccagagataccaagatctctatacaaaatgattttcaaatacaggcaactcattaaaattttattttgattttgatttttttgagatagagtctcactctgttgcccaggctagagtgcagtgacgtgatctcggcttactgcaacctccacctgccgggttcaagcaatcctcccacctcagcctcttgagtagctaggattacaggcagatgccaccacacttggctaatttttttgtatttttagtagagacggggttttgccatattggccagactggtctcgaactcctgatttcaagtgatccacccgcctcggccactgcacctggcctcattataatttaaaaaataactgggtgggttaacttggacatgtgtataagctgagtgcagtctgcaggctgcacgttgtggccttgtaataagatgatacatccctggccaggcgcggtggctcacacctgtaatcccagcactttgggaggccgaggtgggcagatcatttgaggtcagaagttggagaccagcctggccaacatggtgaaaccccatctctactaaaaatacaaaaaaatgagctgggcatggtggcgcatgcctgtagtcccaggtacttgggaagctgaggcaggagaattgcttgaacccaggaggtggaggttgcagtgagacgagattgtgccactgcactccagcctggtgacagagtgagaccctgtctcaaaaaaaaaagatacatccctaagcatggcatctcactatggttgtatggtctgcatactcatgaagatgaagtcctctgacatgaaatccagtgctcaccctaacaccccatgcagtccacccttccctggggtcaggacagatgttttagtcctggcttttcttggcagttttacaggtgaactttgctttgtcccttaccctgtccaatcctcagtctccttatgagctaaatggtaagagtagctcttgctcttccagccttttgctgctggagaagctgtgatggggtctacataccatcccttcatcttttgaaaggctggttctaccaattgaggaagacgcaggaagaggcctggggcatctgcctccagggccagccaacaactaatctccctggagcaatgtcttgctggaccaaacattttacycataaggacctcaaggcataccttgttctgtgcagctggttgtggggttgaaagattctcacttgatccccatctaatcccagttgggagaaatatggctatgagtttggtgagaaattggtcaggctttgaaatgagggcagggttggaagtgaaagaggcaaagctcccgcctcagcacctgaccctgtccttaccacttttcttcatcattgctaacatgtggcttggggacaggacactcttggcatcatgcctcacatgctgtatgcaggcaagggactaggtaccttggtcaacaatgacagagaaggcagccaccatttattaagtcacctactgcacgaatgactctgagtagcactgatctttgtaacagccttgagagatgagtgatccatccatcctgcgaatggggaaagtcaggtgtagagaccgacttgctctcacagatgttaagtatcaggccaggaatagaacctagctctgtctgtccaaggtgttgaccttaggacgtgacacacaccttctggttcagggtgctgggagaaggaaaagttctgggctagtccgggccaagcagaaggttgatttcaatgtgtactgtgggggttggaggccatcgttctacctctggaactgacgtggactcagttctaggctgggccctggtcctactgttgcccgcctctctgctgagcacatcaccttctgcaggctctttgcttcatctgaagatacaaggataaaccgcacccatcctacttcttaagggtgtttgggaggctctaatgaaacagtagatgtgaaaccacttgggaatgtaaaagctgtgggctgagctgtggtcagaggccgccatgccatcatgggacaggatggggtcccttaggggtagggagaggcctacctcatgagagagttagaggcttgcttgtatttaactcttgcctctgtcctcctcggtttctgcataatctcttcaaagctgctctagaggccataagctgggatgcttgagacacattttggggctttgaagccagatagacctgggttcaaatcctagctctgtcattcactagcttggtgaccgtggacacgtcatttcacgtttctgaaccttgatttcctcattttataaaaggaggatggcagtggattagaatccttttggtcacaagtgatagaaacactattcaaaccagtgtatcagttatcttgctgcataacamtctaacccccagacttactggcttcaaataataaatatttattatttcagtttctgtgggtcaagaatttgagatcagcttakctggctgcttctgactcargctctttcatgaggttgcggtcaagatttctgccagggctgcaatcatctgaaggtttgactgggtctggaagatcctcttcacatcgctgttgacaggaggtctcaattcctcatgcatgggcctctccagagggctgcttatgcatcctcaggagatggcatctggcttcccccagagtaagtcatccagaggagagcaaggaggaagccacagggtctctatgaacttgtgtccaaagtcacacaccatcacttctgctttcttctattcattagaaaggaatcactcggtggggtggggggaggcggtggggattaggctctaattcttaaaggagtatcaaagaatttatagatacattttaatcaaaaaaagcaaccagtttaatccaaaaaagaactttattctcgaatctgccaggcacggtggctcacgcctgtaatcccagcactttgggagrctgaggcaggcagatcacctgaggtcaggagttcgacacctgaggtcaggagttcaagaacagccttaccaacatggtgaaaccccatctctactaaaaacagaaagttagctggacgtggtggtgcacgcctgtaatcccagctcctcgggaggctgaggcaggagaatcacttgaacctgggatgtagaagttgcagtgagccgagatcgygccactgcactccagcgtgggcgtccgaatgagactctgtcacaaaaaaaagaactttattctcggatccaaacactggaaacctaggattccgtgtcatcatggctctgtccttctgtctctcggatctatcttcatttcacttgtaaaatagacttggaactggtgagctgagattgatagatacccttccctgtttaggaatcccagtggggttggagcaccttgtctctgcctgtcatggaaaatatgtcctgtgcatagatcaattccagagaagcattttggttagctgcttgagttgaagaatgaggaaggagatgtgattgatggtcctgtcaagccacatgtaggggagggtgtggcatggttcccttttgaggggggctgggcagccaaaacaacacattaactgaggctgggtgtgaggatagaaagagttaacatgagtaccacacatggcagaaaccctaacagaacacttctgcctctattggcagccagacgcgtgtaggggtcccagaaaatggcactgattcccggtcttcctttgtttctccccagctggatgaggcagtggctgaagcccacctgggcaagctgaatgtgaagttgaccaagctaactgagaagcaagcccagtacctgggcatgtcctgtgatggccccttcaagccggatcactaccgctactgagagccaggtctgcgtttcaccctccagctgctgtccttgcccaggccccacctctcctccctaagagctaatggcaccaactttgtgattggtttgtcagtgtcccccatcgactctctggggctgatcacttagtttttggcctctgctgcagccgtcatactgttccaaatgtggcagcgggaacagagtaccctcttcaagccccggtcatgatggaggtcccagccacagggaaccatgagctcagtggtcttggaacagctcactaagtcagtccttccttagcctggaagtcagkagtggagtcacaaagcccatgtgttttgccatctaggccttcacctggtctgtggacttatacctgtgtgcttggtttacaggtccagtggttcttcagcccatgacagatgagaaggggctatattgaagggcaaagaggaactgttgtttgaattttcctgagagcctggcttagtgctgggccttctcttaaacctcattacaatgaggttagtacttttagtccctgttttacaggggttagaatagactgttaaggggcaactgmgaaagamsasagaaktgacagctaggggttgagaggggccagaaamacatgaatgcaggcagatttcgtgaaatctgccaccmctttataaccagatggttcctttcwcaaccctgggtcaaaaagagaataatttggcctataatgttaaaagaaagcaggaaggtgggtaaataaaaatcttggtgcctggaagaattttgagcctttattttatagataatcctctgctaacaatgtatgccatgaatagggggttatagtcgtgctgatgaagcattcacagggtactctgcagtggaacggctgtctgtggtccttaggcttgaaagaatgggtaaagtgaagagggaactctttcgtttttttttgagacagagtctcgctccgtcacccaggctggagtgcagtgatgcaatctcagctcaatgcaaccttcgcctcctgggttcaagcgatcctcctgcctcagcctcctgagtagttgagatcacacccagctaatttttttttggtatttttagtagagacggggttttaccatgttagccaggctgatcttgaactcctgacctcaagtgatctgcctgggattataggcgtgagccactgtgcccggctgtttgcagtatttttaaaagtgcactaagtggggactcacattaagttctaaagatacaatgtcaagtaaaacccttaagtcacactcaatggcccatgatcagtgaggcatgaggggctgaaaactgctcactctggcttggatgctcatcagtgtgtcctgcctgacaattaattcttaccttttctttttccctgagtgcacatagtttaagttgcataagttacgtgtgtatgtgatgtgactctgctgtaaatagtgtacagactttggtacttcaactattattagtaccaaatgacagggcacccactcccaactgaccacaacacaagtggtcaaaacaggctgagatcttgcacacttgggtgacaggcatggtgcaagcatcttttagagttgttgttttttttttttttctagacagtctcgctctgttgcccaggcarcagagtgcagtggtgctatctcagctcactgcaagctccacctcccaggttcatgccattcttctgcctcagcctcccgagtagctgggactacaggcacccgccaccacgcccggcaaatttttttttgtatttttttttagtagagatggggtttcaccatgttagccaggatggtctcgatctcctgacctcgtgatccacccgcctcggccacccaaagtgctgggattagaagcgtgagccaccgtgcctggcctttttttttttttttttttttgagacggagtctcactctcgtcgcccaggctagagtgcagtggcacaatctcagctcactgcaacctctgcctcctgagttcaagcaattctcctgcctcagcctcccaagtagctgggattacagatgctcatcaccacacctggctaatttttgtatttgtagtagagacagggtttcaccatgttggccaggctggtcttgaactcctaacctcaggtgatctgcccacctcagcttcccaaagtgctgggattacaggcatgagccaccatgcctggccttagtgcactaagtggggactcacattaagttctaaagatatgatgtatctttacatcatatgtaaaaagatatggtcttatttattcctcatagagacttgaattcccctgtctgaggctgtgagaggagccataagcatgagctgacttttgtatgtggtaggacttagaccaaaatccaagccccttccacaccagcaaggtcaggtttaggaagggagcctggattcagatttcccaacattagatcaggaactctggaactgtaaaccagagggctacccagagccctgcctcagttcttctactggggtggctgctgggacgataacttcacagtagaaaaaaggagaggctgctgttcttctaagccagagaggttgaacgccttctgctgcacagccgctgcctgtgtgtgcgcatgctcccttccctctagcgtgtctcctcgtggatgtgggaaatgctgtcagaatgcttcctcctgccagatcccatgtagccccccacctcccttcttccaggagttctggtttctgttatgccagcctcttcctttcctgttcggaggtgtcctgtcagttcccagaaccttttgtttcagaaaacacagcccctcttttcacatctggtctcagacttacctctgatttcaggtctgctaatctgtcacatgtgtgacactgaccgggtacccacaatgaaagatgatgtgtctcctgctccacccccaataccccaatactccactcctgatatctgggctgcccccatcaaagcttcatggcgaaagaaggaattggccaagggtcctgcagtatccaggcctagccctggttggattttttccaggaaagagatgggaagatgaggcctgtggttggtggaaagtggctgtttatggagcagtggactgaactttggaaagaggagccctgggtctgctgctgactcactgtgttccccgcagggacagaaatacctacttcagatggctgtcttgacgctcgaatgatagaacattagtgaggagtttttatgctgagtttttttttttttttttttttttttgagatggagtcttgctctgtcgcccaggctggagtgcagtggcgcgatctcggctcactgcaagctccgcctcccaggttcacgccattctcctgcctcagcctcccgagtagctgggactacaggcgcccgccaccgtgtccggctaattttttatatttttagtagagatggggtttcaccgtggtttcgatctcctgacctcgtgatctgcctgctttggcctcccaaagtgctgggattacaggcatgagccactgtgcccggcctttatgctgagttttaagggctgtatgagacaccaggtggtgggagggagctgttttgagagcagggaatttaggatacttaggaaattagaaaattagagaagtcataggatcttggaactaagggagaaccttagagtcctgtggagcagaacccagcatttgtatgtggagaaacggaggcccagagaagttgtgacttatccgggtcactctgcaggtctgggtgtcccacccgagtccatgtcagggctctttctgcacaccaagccccatgcccacctctgtgtgactggctgtggtgggaggggcctcctaggctagaggtgctgggatcccttttcagtccagaaataatgagcttagagggtctggaagtagcatggactaaaacccaggaaggatccacagggactgttgatgccagtgaggactccaggaagccggatcacggggactgttgatgccagtgaggactccaggaagctgctgttgggacagccctgctttgggagtctgaggttccaggaaaccccaggaatccggattctcatccctgagacctactcaggactagcccaggggaccgagctaggaaacctgcttgaggtggtagaggcagccaggggtgtgcagtggtccgggcgggcttcgatcagttccaggttggttgcttctccaaactggctccaagacaggcatgtggctcaagttggtctggactcaatcccgggactttaggacttttgctagaaatctggtgtggtgcaggagcgactccaggattcactctgtgggctgcttggactcagactcccccaggactagaggctgcttctccctggtgggaggagttacaaccttgcaagggttctaaagacccccgggtgctgggtggtgggcttttcctgacaacttccataagttattggaacctaaattcacactgcttagcatcgtaatagtctgatcaaccctgctcagtgttctcatacttgccctattaccagggagagaaatagagaggtgggtgcctccctagagtatccacccacactgtgtactgaatgcccctcctcaacctgtctctcgtggggacctgcacctgcttttcctactaactgctggcttgtatttattcccctaaagcctgttccataacccagtgtggttcttagacttgagcaaacctcagaaacacctggagggcttatccccagtcctgattctgtaggtctggggtgaggccttatagtgtgcattttaacaacgtccccagtgtttcccaatgctgctggtgcacaccaagtgtagaatttgcctctgtgcctgttgcacagtaggtggaggtggcaactgtaaaagagacccagctatcctaaaaacagaaaaggtactgtcttcagtggggctgccaggattggaaggaatgtgagcctgtagctgctcctttgcccccacgaaggccagcttgccttaggatgaagccaacacagaccgggtgcagcagctcacacctgtaatcccagcactttgggaggccaaggtgggcagatcacctgaggtcaggagtttgagaccagcctggccaacataatgaaaccctagctctactaaaaaaaaaatagaataaaaaaaaaaattagccgggcatggtgatgcacgcctgtaatcccagctactcaggaggctgagacaggaaaatcacttgaactgggaggtggcagttagagtgagttgagatcacacactgcactccagtctgggggacagagcaagggctcatctcaaaaaaaaaaaaaagaaagatataaagccaacacaattgagagagagtgacacattccagagaatatttgagtagctgaatctagacatgttttacactaactggatctagcccctttttagtgaaatgaaccccccagaaagttaccttctttccctaaacccatctcaataggttgctgtctgacaattctgagtctcgctgtagtggagaagacattgaagacaccaggttatagaaaaacaacagagaaaagaaaacagagggccgggtgtggtgactcatgcctgtaatcccagcactttgggaggccgaggcaggcagatcacctgaggtcaggagttcgagaccagcctggccaacgtggtgaaaccccgtctctactaaaaatacaaaattagcctggcatggtggagcacacctgtaatcccagctacttgggagggtgaggtaggagaatcgcttgaacccgtgaggcggaggttgcagtgagcggagatcaagccactgcactccagcctgggtgacagagcgagactccatctcaaaaaaaaaaaaaaaaaagaaaatagagaacttgggccaggtcccctcccagctgcaccatgaaggggactggattcgcccccaagactgccttgtccaatcccttcatggtgcagctgggagggaattttgcccaaggtcatacagcagtgaggggcagtgctggaacaggaatttgtaccacctgactcttttaaagagacaaagtctcattttgtcatccaggctggagtatagtcacattcatggctcactgcagccttgaactcccgagctcaagcgatcctcctgcctcagcctcccaaatagctcagactacaggcgcgtgccaccacacctggctaatttaatttaaaatttttttttgtagagatgggggctcgccatgttgcccaggctggtctcaaactcctgggctcaagcaatcctcctgcctcggcctcccaaagtgctggaattacaggagtgagccaccataccccagcccctcttgattctttatcagtgccctatcctgtacctctcatggcctcttgagtaagtactgacccaagaaaagaagatgcagctgcttctctccagaagctccactagtgagactactccctggggtggtgttgacaaggtctcattagagagctggggagtcacatggggagtctgttgggtacacctcttgggccgagtctcttgcaaggtgttggctctacgcaggcagagtcccctctgcctggttttcagtggcctggtgtttaagggcctaggctctggaatgacatgggctggatctgaatccccatgctgaggtgtgaggtctatctagacacattgcttaacatctttgagccccagttctcttatttacagtgatacttaggtcaagacgttaatt

SEQ ID NO: 95780 - DNA, 49880 bp, Homo sapiens
  misc_feature (1)...(49880): n = A,T,C or G
tggaagggaagcacaatcagggtctctatttgtttgctacagctgctgtaatagagaaccacaaactgaggagcttacaaaacagaaatgtactgtctccagctctggggttagaagtccaagatcaaggtgtcagtagggtttgttccttcaaagggggtgaagaagaatctgtttcatgcctacccccttgctcctgatggtttgctggaaatgtgtgacatttcttggtgttcctctacttcagtttcatatggcattctccctgtgtgaatgtctgtgttcaaattcctcctgtttataaggacaccagttgtgttggattaggggcccagcctactccagtatgacctcatcttatctaattacatttttaactaccctattcccaaataaggtcataccctgaggtactaagggctaggaatccaatacataaatttttagaagacacaattcaactcataacaagatcacagagatcttgttatgacatagtgttggaaagttgacattcccgaggtaggacagtgaaggtgtatttttggctttgttagttgaaagaaaactgcttttggtgatctttactaacagatactaagacaaagcactcagcagatcaataactgcatgccagttactaggggataggttctcaagtaatgaaatgacatctggaacagcagctgcaattagtcactactcagttaagtttatgataatccactgtcattttccaagatcaatctgttttctgcacaggccaaacaggagggttgaatgcgaatatgtcaggaatcatcacccctgcatccttaagtgcactcatctctgcaattcctcctggaatgcggtattgcttttggcttactattattccaggaagaggcagctctagtggcttctacttggcctttcctaccacgatcgccctcactccacaagtcggggaaccagtgtggggattctgccagttgctgagtatgtctataccagttatgcatcctggaactggcaaagtaaccataggatgaatatggggacccactgtgaggagaacctgggttaaacttccattgaccacctaacctcaacaagtccctactctgaatggcgggccaaaatgacactttgagtgtcctggaattagtgtcagttcagacttaagagttcagtaatctgtgagaagtctaattatttcctcttctccagtgcacacttaccctgataagccataggtccctttgggaaacctgagaaaaaaattaacggtataaattcttagcagcgcaatggggtccttcctcaaaaggatccagcctcccctcagtcagggggttctgagtctgtaaaatgactcaaatctgggaactgattgagggaccatgactctttctttggtaattaaagtaaagcttccattcacttgacctagaactcttctgcttatagagatcaagtcagaattcagtagactgcccaacgagttctcttctagggacaccatgaccacctacccaattaggacccccaagtcaggctgttcagattgttgctttgactccgctgtcccccatgatggcaacacacctacttactctttggtgatcacatagcccctgccatcctagatccaaccatccctgctgcagctaaggacccccagtcagtggcaacagctcccactgcaatctctgacctgaagagaaaagcaaccccagagctcttcacggattcctgaggaaaaccggcaatgtcttgcaaggtaactacctcaagggaggtcattacaggttcttcaggcaaagcagagttaacctcctcagaggtggaagaactgcttctactggcaaaaaagagtgagtcaaatttaggagtttaacatccccagcttcatcaggatgttcccatatggccctattccaaatgtgcagatcccattccttcccaatcaatgccctcattttaatagcagaccaaggtgagaagggaattcagttagcactgtaattcagccacctacaggataagactctggatttggttttcaccaacctcagctctgtagctacaagagatacgggtttctttagggcagacacagaaacttttcaggtcacttatgtggagcttcaatcgggaatttgaagccttaagctccccttttctttcctcttcttttttttttttttgagacagtctcactctgtcactcaggttggagtgcagtggtgcaatctcggctcactgcaacctccgcctcctgggttcaagcgattctcctgcctcagcctcctgagtagctgggatcatccttttcttttctcactttacccagtacagttaaaagcaaccagcctatcttattgtactcattaattcgattaaaatgttctaaggtatcaaatacctgatcattctgaatcttgtctataagcatgagtgggagtatctaatagtgatcttttgcatatctttgttgccatatcacaccagggactatcagtgccctcttttctacagggaatactcattactgcctttgaatctgatcagtttggaaaaccaattccagaaacactataatcaattcagaaaactcatccttaagattctgctcactagaagcactctcagcacccaaatttgaatcagtcagggctctacagagatacagaactgataggaaaaaatatatagatgtagataaaaacataaatatcttcatctacatatagacagatacagagatattggtattttaaggaactggctcacacaactgtaggggatagcaacttcaaaatgtgtagggtagatctacagacaggaaacttaggcaggaattgatgctgcagtcttgaggaaaatactgtcttcttcaggacacttcagttttggcttttttagccttcaattgattgaatgaggtccacccacattatttagggtaatatcctttagtttaggtcaactgattatagatgttaaccacgtcttcagaataccatcatagcatcaaccaaactagtatctgattaaataactaggtattatagcctagctaagctgacataataaaactaatcatcacacacagtattactcaacaaaatcttattttcaactgaaggaaaaaccttttaaacaataatattttatttgttccagaaagacaatgaaatttcagtaggaacactttcctgagtggaacagaggaaaagtccttcatccaaaactatttggaggaacaaagcttccatgaaccacctctcttcacagaacactatcttaggaaactataacattgtttctacatttttaaaacaatctctatgtttcaaaaatatgatcttcaactctacaacagaaatcacactttaaaattatacctctgagagaagtactctcactttcttacaaatgggttgaaataaatcctgcaggtcctttccttgtcttggtggagctcacattccagcaagataacatccttatctaactattttctctcgggacatcataacccaggcattaagaagtatcaaaacactttctgaaaaatctactatttgctaggcaacgtccagttctgagtatgatcttctagccagcactgtttcattattagcagagtctggtcaatcagccagactgcctgggtccaaatcttgatcccactacttaacaagctgcatgatcttggccaagttacttaaccctcatctgtaaaacaaacactcataactataccactgggttcggttagaattaaacgagtgcaaatgaataaagcactaaccttggcacctaaaaggtactcgagtattagctattattattttaatgtccagaaaaccagagattactcaggcaataatgagggaaaaataacaccaatggtaactttaaaatcatttttatctggctcatttacttacattaactgctttcaagaatccttcccctctattctcaaatgaatttacacaacttctagttaagttttataaaaactgaaaaatgtaatctctatatatcccatcatcgtggagttttcataaacacatagttaagaggcttttaatctaataactttttttgttttgtttagttttttttgagacagtctcgctctgtcgcccaggctagagtgcaacggcgcaatctcggctcactgcaacctccgccttccgggtttaagcgattctcctgcctcagcctcctgagtagctgggattacaggcacgcgccaccacgcctggctaatttttgtatttttagtagagacggggtttcaccatgttggccaggctggtctcaaactcctgacctcgtgatccaaccgcctcggcctcccaacggctgggattacagaagtgagccactgcacccggtgtttaaaaacattaaaacatgtttttaaaagtcaaaattacactcattttctgtaaaattacaacagcaattatctcaagaaacttaagcatcaggaacagggaatgtaattgcctggttctaatgcttgtatatgcctataatgcattcgatctgtaagacctacacttttgcagttgtcaatattcatgtaatgagattaattctcaacttacctcatttcatataataacaaatacaagcagtcatcagaaattgatgggtcatccttatttgtgaaaaataggcctcattcttggttcaaagtttgtaacctcaaatgggctaatgcccacaatttagaagtgattagattggaaagcacgacgctgcaaatgctgccttccccaaagccaggtctattcattaatatacctgtgcctactgacaagaaggaaggctggtaaagcacattttcaaagctgttttaaatggatcaattttggtaaagagtaattcaagacggattgtaaatctgatcagttttacaaccttggaaggtggggacttgacgcacgacgttaatatgcacacgcttcaataatctatccacaggtagttttgaccctgatctcaggttgaaagtcctcaactatggagctttcgagtttcagtacagtaggcgctttcactccccagtagaaatctggggtgatggccaaaaaaagtgtgttgtctcccccaaaccacaccatgccaagttcagccaacgcagaccaatgcatccttaggtatttgtcaagaagaggtataggcggtcccttttctcagaatctaacaggtaagaatggcctcttgtggcttcccaaacacggcggtaaggaccagtctgccagtccctaataagaaattgctaattttaaaaaccattccgaacgcgggcgcttccgggcccctcttcaactggcttcggaagaaggggggagaacacggtgaagggttacagcaaaggaggctgaaaaacagtcccaaagcaagatttgccaggacactggctcgacccggaagggcggggggacctctctcggccgccggggtctgtggggtcggcgagtgtggacgacccgtctggcagtcgtacactgccacagcccgaagagcggcgcacgcggagcagttgccgggttcgcgccgcgagtcagctcccggacacacgcccagggttgaaggtgccctctagacccctcccgctgccccacagaggcctgggcccatgctacctcttaggacgctggagccgccgccgccgcttcccgccgcgcaggctggaccacagctcctcggatgccacggcggtgtcactcagcagagcagcccgacaaagcgtgggtccgcgtgcaggaacccgccgggctcagccggacgctagccccctgccgcccccggccccgccagccgcgcccactagcaacgtgctcgcgacctccagtgcccgctcagtgaagcttctgcatgccgcgcgcggcacgtcgggactcgtagttccggcgcggaggacgtgcgtcgcggcactctcgcctgaccgtctccacgtgactctcgcacctccggaagtgacgtaagcagacacgcgtggcgcgggccgccgtttccgcaaacagaatcgcgtttggctgtgctggtgagtgtgacggctggaactccggcccttcctttctttgtgtttgtccctcggccgccgtggaggggtggaactggcactcccaccmctgacatgggctcacttcgcattagccctgtgcttcactacccaacgcgtgggtctattgccttgtgtcctcagtcccaaggaaaatgggaactccttggggtgggcgggcgctgttcctcctccagactgggcgagcccgggtgggagaagcagctcgaagagctgctccagctcgcgccccagggccgtgctggggaggggcgtggggtccgcaggtttgtcttcagcggcgcttcggaaacctgaaccagaggttgagtaacaggccgcgctaatgacggagggggtgaacttggctggagaagtcccttctcgcctctgtgcgtcctctcgggccccgtggtagagggtcaagcgggcgggtcgggacttasagcttatcccgcttgggctttatcccggcggccctggcggcctgctcgctcgtaccctgaggagctgaaatgacgcagagacatagcttgcttcggaggtgtgactggaaagccgggtcgaaatgttcgtgtggttatttatcgcgtgtccatctccatgtcagtcgaccacctttcgaaggtttcttgaagattctgagggacagctctcttccctatggagtgttttcattattccactttgagtttggtttgggttttttttcccccaatttgttaaattgatacatagaagttgcacatatttgcaggtgcaggtgatactttgatacatgcatacaatgtgtaacgactaaatcagggcaattgggatatttgtcatctcaaacatttatctttatgttgggaacattccaatttttcttttagctattttgaactacacaataagttattgttaactgtgtccaccccactgtactatcaggcactagattttatttcttctggggttttttgtacccattaaccaatttctcttcttcatcccgctcctcttcctgctacccttcccagtctgtggtaaccaccaatccactctttacctccatcaggtccacatttttagctcccacatgagtaacaacatgatattgtcttcatgtgcctggcttatttcagttaacataatgacatccggtttcatccatgttgttgcaaatgacaggatttcattctttttaatgactaatattccattgtgtatatatgctrcattatctttattcatctgttgatgaacgcttaggttgattccatatcttgactattgtgaataaacttgagactgcagatatttcttagatatactgatttcccttcttttggatctgtacccagatttgcaaaactgttcatcggacaggggattaacaaccagaatatagaagaaactcatctcaatagcactagttctattttttgttttttgaagaacctccatcatacttttcccagtatgtaaattagtggctgtgctaatttacgttctccctaacagtgtacaagtgttcccccttttctgcatcctgcatcctcatcagcatctttttnnnnnnnnnnnnnnnnnnnnttttttttttttttttttttttttgtgtgtgtgacggagccttgctctgtcgcccaggccggagtgcagtggcttgatctcagctcactgcaacctccacctcccgggttcaagcgattctcatgcctcagcctcccgagtagctggtattacaggcgcacatcaccatgcccggctgatttttgtgtttttggtagagacggggtttcactatgttggccaggctggtctagaactcctgacctcaagtgatctgcccacctccacctcccaaagtgctgggattacaggtgtgagccaycgtgacggcctcagcatccattttttaaaaatctttttgataaaagccgttttaaccgagatgagatggtatctcattgtggttttgacttgcatttccctgatattactgatattgagcattttttacgtatatacctgttggccatttgtgtgtcttttaagaaatgtctattcagatcttttgcccatttgtagtaggattgcttctttttttttgctattgagttgagtttcttctgtattccggttgtgaatcccgtcagatgaatggttttgcagatattttctcccattctctaggttatctcttcactcttgtttcctttgctgtgcagaagttttttagcttgatgtaatcccatttgtctgtttttgcttttgttgcctgtgcttttgaggtcttaccacaaaaatctttgcccagaccagtgtcttgaagcatttccacaatgttttcttcaagtagtttcatacttttgggtattaaatttttcagtccattttgatttgatttttgcatatggtgagagagagtggtctagatttcccagcaccgttttttgaagagactgtcttttcactatgtacgttcttggcacctttgttgagaacaagttggctgtaaacatgatgcttggttttaaacgttcttacttatttttgtggtcatctggaatgctgtgtcatttcttctgacctaattatgtttttattatgtcacatctgtgatatcatgaaagtgacataagtaaaattcatgcttaaatctcaatattaattttaggtaataaatatagctaaagataagtcacatttctttatttgaatttaaagccaatwtccattaggaaatcaatggcagaggaggagaaataggaatttgataagttggtatccagtttttctagataatcattttaagtatttgttctgaaaatcacttttctgatttgttgttgttgttcyctgattcagttctatttggtacttcttggtattttgttacctcaaatggtgggtcatgaaaactaataaccattgaaacccttacccattcatagtgagtgacttgttacccattcctttaagcaacttgatttcttattctttttcattatccaaaaggctttttatttatttacttttttttttaagcacaaacacttccttcatgaaaaagctttttttttttaagtggggtctcactttgttgtctaggctggagtacagtggcmcaatcatggctcactgcagcctggacctcctgggctcaggtgatcctcctacttcagcctgctgagtaactgggactaaggcatgtgccaccatgcccagctattttttgtagagacgggattttgccatgttgcccaacctggtctcgaactccagagctcaagcagtctgcccacctcgttcccccaaagtggtgggattacaggtgtgagccactgtgcccagcgaaagcttaacattttaatagtggtatataagctataaacatcttgaaaacatgatttacattgagcttctccatagtaggaggtcactaaatttgttgaatggcttaataaatgaaccaccataattcttgcccaatagatagttcagttatttctctcgctttcccatcttaatgtaggtctaaaaacatatttgaaagagacttaatggtcatcaaactgcaggctgagtcctgaaacttgtctaaagccatttctactctcttcactttctacctaattggaacacccattatgaaatacgatttcagaattcttgctgtagaatcccaaactttttctgttcttgatgcccttagtgtccataggccaaaagaaatataacagttccatttattaagtagtttaccccaaagaatttaaaagtatttatggtctaacaactttatgtctgtttaaaaaattaacacacataaattggggggaaaggtaatgtttctgttttattcttgattaatcacaatcccttactaacaggatgtgtgaacctattgggtactgtacaacttcaagcctcgaaatcagataggcaccaccaacctcatttcctgtttcaccttgattttctgtgataccaaaatctcagcttcacaaagtcattgaaaggtatgtagtgtaatctattcagctggaactgtgctgtacttaaagctggtagtttctgtgatatcttccacattaggttctgtggtgcctgtttgttatggtgccaaccatgcagtttgggaaccagggttatagagtaaggatcagaaccaaaatggaactagtgcatgtgtatcgccacttcatttgtcagctttaatgccaacagtgacttttatgaataagattatagaattttggggggattataattagtactgccatattcagaaattcatacatagtatcagttaacattttttaatatgctctctacaatgagatttttttaaactcctagttgatcaaattctagttaaaattattttaggccaggcgcagtggcttacgcctgtaatcccagcactttgggaggccgaggcaggcggatcacctggggtcaggagttagagaccagcctgcccaacgtggggaaatcgcgtctcagctaaacatacaaaaaattagccaggcgtggtggcaggtgcctgtaatcccagctactggggaggctgaggcaggagaatcacttgaaccccagaggcggagcttgcagtgagccgagatcatgccmttgcactccagcctgggcgacaagagtgaaactccgtctcaaaaaaaaaaaaaaattgttttaaagtcttagtgtttacaagtaataccaatttttttcctattctagtgttggttcatgaagttttaccatcaattcaagtaatcataaatggcaaattctgcaaaagcagaagaayatgaaaagatgtctcttgaacaggcaaaascgtcagtgaattctgaaacagagtcttcattcaatattaatgaaaacacaacagcttctgggactgggctttctgaaaagacttctgtctgtaggcaagtagacatagcaagaaagagaaaagagtttgaagatgatcttgtaaaggaaagttctagttgtgggaaagacactccatccaagaagagaaaacttgatcctgaaattgtcccagaggaaraagattgtggtgatgctgaaggcaattcaaagaaaagaaaaagagaaactgaggatgttccaaaagataaatcttctactggagatggcactcaaaataagagaaaaatagcacttgaggatgttcctgaaaagcagaaagtatgttcagtgtattttcatttattcataatagaatatgtaagtttgaaatgtggaacacccgtggattcatactggtttttacataatagcttaagaatgttctatttttaatagatrtggtcytaagacaaagtaggcttttaactcttatgatttctgttaaggtgaaacatctcctgctaatgagatagattttttagtttttgtttgtttttattttctaatgagataatgtttatcttattttagaatatttaactagaaacttttttttccgagacagagtcttgcactgtcgcccaggctggagtgtgatggtgtaatcaaagctcactgcagccacaacctcctgggcataagcagtcctccggcgtttttaaaaagactagagtatgagatccaaatgatttacctatttttcttttttattaggtgttcagctctagtttttttgtcagaggttatcacttaaagggataacttttaaaattatacctagctttacatccctttattaatgtaattccttaaacagttttcagcttcttattaatgtattttacatactgttttagttaagtgaatgcaaatgcctaatatttagcaaagatattatagggcaagttgttttcatctggaagtaccacattagaaaggaatttgaggcagaatctggagttagaggaaaagattactttaatgagtaaataaaattctgccattggcccttatgaggaaagtgactgatagtgaggcttttgtcatcaatggaatgtgaattcttgtaacagaggggagcccccttttttttttttttttttttttcggagacagagtctcactctgtctcctaggctagagtgcagtggtgtaaactcggctcactgcaacctccacctcccgggacctccacctcccgggttcaagcgattctcctgcctcagcctcccgagtagctgggactacaggtgcccaccaccatgcctggctaatttttgtgttttttagtacagatgggatttcaccatattggccaggctggtcttgaattcctgaccttgtgatctgcccacctcagcctcccaaagtgctgggattacaggcatgagccactgcgcctggctgggagcttgtattttaaacatagttttcaaacttttactagccccagaacccctttttcaactgaaaatcttacacttaaacctgttacgtaaaataggtcaaggatttgtttgaaaggcctttcagcacatcagtgagattcagcactttggctgaaaagggaggtaggaggatccgaagccctttacctatcatggcatttttacaggatttctagggcctcaggaagcacaaattgaaaactgttgggttacatgtaacatatataatagcattattataatagaaatcactaacgctgcacatagcctactgaattctaatctctctttttttttgagagtctcgctctgttgcccatgctggagtgcggtggcccgatctcggctcactgcaacctccacctcctgggttcaagcgattctcctgcctcagcctcctgagtagctggaattacaggtgtgcaccaccatgcccagctaatttttgtatttttagtagagatagggtttcaccatgttggccaggctggtctcaaactcctgacttcaagtgatcctcccacctgggcctcccacagtgctgggattataggtatgagccacctcacccaggcctaatctctttatatacattatcttatttaattttcacaacagctttataataataatgtaattatagcttattcctaatttattcctttgtagaaacaccaaacattgactgtcatttattgaactgaataaatcagaactctggaagagtactgggtttattaagacattgacactaaaattaatgcagatgaaatatcacaatgaaaattttaaacctagagatgtttttcaaaataaggtgatatggtttgggtgtgtccctacccagatctcatcttgaattatagctctcataattcccacatgtgtgggagggacctgatgtgagataattgaatcatgggcgcagttccccatacttttctcatggtagtgaataagtctcacgagatctgatggttttataaggggtttccccttttacttggctctcattgtctcttgcctgccgccatgtaagacctgcctttcaccttccaccatgattgtgaggcctcccccgccacgaggaactgtgagtccattgaacctctttttgtttataaattacccagtctccggtacgtctttagcagcaacattaaaatggactgatacacagggacacagaaaacaaatcttaggtctaatgataattagtgagacttctgtggttaattgccattgtttagtgaagtttaccaattctaatagcattttatccattcacaggtcaaatgttctgaggcttatttttaccatgttctgatccttgatttttttctattctcttttattttcagaatctggaagaaggacacagctcaacagtggctgcccattacaatgaacttcaggaagttggtttggagaagcgtagtcaaagtcgtattttttacctaagaaactttaataattggatgaaaagtgttctcattggtatgatccaacaccaagctactgagtctttaattcctattcatttaattatcaaaccttgactttataaagctagagccaagactaggtcttgaagacaaattcttctaatatttacttttggttgactgtgtaagattttaatgagtgtttaattattatgttaatcaggttttcagaagrcaatattttttttaatgcacagaattaaggttacctagtactattaagtaatgattctattttactctaatagttttggagcaactgcatattgttggttaaacattcaggtttcattaagtyaagaaataggcagtgtcttgatttgtttaggccttcaattagttgataaagatcatgtgtattacattgaggatagataaaaacattcaacttttttgagccaacattttatctatggaaactcacctttgaaattaaaatgaaagtgaacagagaaaatatgattcagaatacaattcttgtcggcaccgtaagatagggtaaaaaaaagaatataattattgctctgtatatttagtgcattaagtagactcttagataaatttagagaactttaaaaagtggtttgttttaaaatttttcataataaagatttttttaaagccagtcaaagaagaagtgagaatgctttcttaattatgctagaaagaataaagtgctaattatgggtacttcctactagttttgatgataatttactaattttcaaagataaattacctaatctgataagtattagcagtaggaactaactaggcttactttgaacacattttaacattttgtatatcacttgtttttaacattcatgttctgttacaaaaatatttatttgactctgccatgtgtcagcttaggctaaatgagtgttcactttttttttttttttttttaagattaacgtaatggcattttcagtctctactcacaaggttctctctctaccccagtcctaatttcttttcagcctttctcttccttcattaccctcaatgatgcagataacttattggattttttatgaatacttatttattcatgtatttttttattgaataactttttcgagtccatattttccacattgttacatgtattatttctataatcagaaaagaggtatttttttttaaaggactgaagtcagagttggcaaaattgtctcttggcatatacagggtattctttccttyttcagctgttctagcagctctcttgatgtgtgctttgcacctgtgtttaacatcctaatacaatcagtgtgatctgtgccaagctttctctctggctgtttcctttctcaacactcattctttgtcactcattttctcttttttcttggtgcttgtagcttggtaagtaaacagttgagtatagttcttgaatgtgataaaggcttttttgaaattgtttcttgatgatttcctctctcgttagtcttactgtatataaatgcagagattttataattgtttttcgctctttcagtatttttatgctattaagattcatggcagaaagttaaatattatggaacatttgtgcttctgttgaagttactttaagttcctgcagaaggtgaaagtacttgtacaggatatttttagccatcaaaataatacacacctgaaagtgtccagctcagtgataaagacaaggagaatgtatctaggattcagtattgtatcaagttttagaactgttgaatacttaacttgcctgagaatattaatatgcttttaatcgacgtttgaacaatttgcctattgatgtttggttgcctactgattttatctgttggctgttaatgtcatttagtagactggggtctaccaaatactgatgatgctaaaactaaaagacatagtgctttttttttttctagtttttatatttctcttggtggtaagcctgacatctttgataatcaggctcttttatcattccataacaactttgatttacttacgtgtctactgttaaacacctagctatggaaagagaaagctacaaaaaaaaatatgaataattagtttttctaatccttacttagctttttctctcatcctgaacaagtgttgtgttgtcttatattagaattttaaatatctgctatttaaaattcatttttgaaagttaacattcaaaatgctgcctttattttccaaaacaccagacacgtactctttaatgatagaggatcagattaatcaactcttagtcatatttttagttacttatcagaagttacaaattacataaatggatgtgtaatagtttatgttacatattgggcaaaagatagtaggttattagaggtaacagtttatacttcagtaaaattgaagaagaggtagtttattgtgactgatttctctcttttaggagaatttttggaaaaggtacgacagaagaaaaaacgtgatatcactgttttggacctgggatgtggtaaaggtggagatttgctgaaatggaaaaaaggaagaattaacaagctagtttgtactggtaagataaataatgatatgggaaagaataatttgtagtcagataaatggaaaataagaaggattgtctcaaattgcaagatatctgggactatgcatgagatgggttttttttaaattaattacggcctgacgcggtggctcatgcctgtaatccaacattttggaaggctgaggtgggtggatcacttgaggtcaggagtttgagaccggcctggccaacattgtgaaaccctgtctctactaaaaatacagaaaattagctgggcatggtggtgcacacctgtaatctcagctactcaggaagctgaggcaggagaatcacttttacctgggaggtgaaggttatagtaagacaagatcgcaccactgcacaccagcctgagtgacagagcaagactccgtctcgaaaaaaaaaaaattagttacaagactttcctgatagtttcatagtaagattaataagcctgggataacgtttccttcccaaaaggaaggaagctatcaaagatggtcggagtcatgtctaaagggcagacttgaaaaggtttccattggcaaaaatagggcaattttaacattaaaaaaaaaatagcagttggacacatcaaatcagaaaaacacattgttcacccttgaaggttgctaagaaactattctgaaacttataaattaaggggaggaaatcaaacatttgtaatcagatggttgaaaagggcagttccttttttttttcaatcagataaagaggaattatagaattagaaaatcataatttttttcattctttatgaaataatagatctaggcaataattttttttttttgctacggaagccattaagggaaaagtcgatagtaacgcaatgaatcaatcaatcaatcaccttagcccggtggttagtcttaacactgaagtgggacaagcagacgtcagcgtctttctgatgtggtgagttaaaagagatacatacccccactactgaagtactgcccaaattagcagttctcagattttttggttttatgagccctgtatacttaaaaattattgaggaccccagaaagcttttttgtatgtaattatggtaagtagctactgatatttactatattggaaattaaagctgagaattttgaaaatattttttagttcattaaaagtaacaaggctggcttttacatttttgtaaatccctttagagtttgaaattgcaggagacaactggattctcacacctgtttctgcatccaatatgttgtgattttattttggttgataagtagttgtaaaataaagaagtattttaatagccttttttgataattgtagatattcctctgttactacatcaaaactcagtaagtggtagtttcttaaagagtagttacaatatggaatctgaaaccttagtgatgaactttttataccgtgtaacattaaaatccattaatctgtcttgcacttcctgcatgattttatagtacttggaaaatactgttcactaaagttatgcagatctaattgttgagaatcaaaaaatcacgtgtttaatatcactgccaatcagaaaagtattgggaagaagtccagcccacagtgatcaatacgagtttttcagggttgtaattcttatttgaaagtcarttttatttttggcaacaaatacactgtcccttgtctccctttaaattagcgatccctaacctttttggcaccaggggccggtttcatggaagactgtttttccacagaagcggggggatggaattctacctcagatcatcaggtgttagattctcataaggagtatgcaaccagcttgcctgccactcacctcctgctgtgcagcctggttcctaacaggccgtggacctgtactggtttgtcgcccaagggttggggaactttaagtgacaggttcactttgttcattttcaagaaaatatgtgccaggtactgaagtctgcataaccgtagtttgtcagtcattcaagtcaaaataattttctcagaaaaaaagtggccagtacagctcaaaactcagaacagtcatatcagtactgttcttgaagatgaccatcatactttgttaggtagcagaaatgttttgttacttcccatttcatcacasaacattttaaaaagtgtgtattcaaaagcccaggtttaataaaattaattttcactattttataaagggtattcttaaatgaaactgtttttctccccctgcatattgtatagtggtgaagaatacatgaagtactgccagtaccatttagtgctgctactttgtatttgtgataagatcccattgcctttgcattatcagtgtgaatctttaaacagggaaaagggcaggctgggcacagtggttcatgcctataatccccagcactttgggaagcaaaggagggtggatcacttgaggccagaagttagagaccagcctggccaatgtggtgaaaccccatcctctaccaaaaatacaaaaaattagctgggcatggtggcacacaacctataatcctagctactcgggaggctgaggtatgagaatcacttgaaccctggaggcagaggttgcagtgagtgaagattgcaccactgcactccagcctgggcaatacagcaagactctgtctcaaaaaagaaaaaaagaaaagggctaataacattttattataaaaatatacccttggtatttccaaaactgggcttactgatagtgttaggttttataattcagattggaataaaactttctcctttttactttgaataagcatttaaaaatcatgatagaacttttatagcgtcygtacctattgagacgcttttagttcctcttgaaaactgatagggtatttgcgtcgkaacaaagcccttttcttttcttttaaaggaaataaaaccttttcactggtactaaggctgacttttatgccagagtttgtcagttgagatcaatgtctagatttctggcattctgtgttgatacttactaatacccttccatccttccagatattgccgatgtttctgtcaaacagtgtcagcagcggtatgaggacatgaaaaatcgtcgtgatagtgaatatattttcagtgcagaatttataactgctgacagctcaaaggtacagtttctttctttggtcaatttattttttacatttttagtttgggtaaataatttgttttaaaaatcaactcaatttttacttttttaaaaaaatttactcttattttttgagacagggtcttactctgtcacctaggctggagcacagtggcacgatctcagcttactgcaacctctgcctcccaggctcaagtgattctcctgcctcccagcctcctgagtagctgggactacaggcacatgccaccacacccagctaatttttatatattttgtaaagatggggttttgccatgttgccaaggctggcctcaaactcctgagcccaggtgatctgcctgcctcccatagtgctgggattacaggcatgagccatggtgcccggctactcattttttaaaatgtgttttgaaactttaaaaatcttggaatatgcattttcacttttgactggaaattctattatgataaattcccttgaatgactcactgaatacttgtaattttttgcttttaataatttgaattgaaattagctgytgcttttcggtatggacatcatttattttccagtattttgaaatagaactgaacttatactatgttttgttcaccttgtaatttattartttcccaacatatcagagcctgtttggttttttcctaccttccacctgtttctgaatttcttaaaaagaactgcttcaagggtgaaagtctcaccatgaactttttgttcttcattgacttattgactcactgaactgttatagatacctttaatcatacacattttgtttgaaatttgaaagtgaaaaagataagtgggagtatactgccagaaagttgtaatacctttaaaacatttttgcattttttaaaaaatgccaaacgccagatgttttttaactcaagttattgttgaatgtcattttattttagctgtcaagtaaagtgatgaaaggatcaagttgaaatgtcataattgactaatatattttaaacatgatttcagaattcctcagtttttaaatactgtgaaagtgggaatcaaattattctgttaaactagaatacatgcatgatttctgtgtgtcctttattgtacaagggaaagattgtgagggaaaggaagaaccttacattctagaagttaatttactaaraagtttttaatctttgttgtagttacctcacaatcttaactcattttaatttgtttcaggaacttctgattgacaaatttcgtgacccacaaatgtgttttgacatctgcagttgtcagtttgtctgtcattactcatttgagtcttatgagcaggctgacatgatgctgagaaatgcgtgtgagagacttagccctgggggctattttattggtactactcccaatagctttgaattgatgtaagtacttctaaatatattgtggtttataaaatattcagtattaagtagcaaatgtttatcagaggtagattttattaaaatacgctattttaatcttataagtgttgaacactttcataagatatttgagtagacattcaaaatttaaattcaatagacaaatttacaggtgaacttttaacagttcatctttgtgtgtaagttagagactgaagttatagtgatagacaaactgcaggtcagatacacaggcacagagatgaaccagctgtcatgagagtgatacctacttccagcttaattttattggtgtgactgttggtgatcttttagtatattgcttcttaaaagtagctcaaatcaggagagtgcagtggctcatgcctataatcctagcactttgggaggccaaggcaggaggattgcttgaggccaggagtttgagaccagcctggacaacatagtgagaccttgtctttacaaaaaatttacaaattagccagcatggtggcacgcccctgtagtccttgctcaggaggctgaggcaggaggatcacttgagcccaggagttggtggctgtagtgagctatgatcacaccaccacactccagcctgaatgacagattaagaccttgtcactttaaaaaaaaaaaaaaaaggtagcccagatctaattaaaaggctaatcaagtgtgcatcatgtagtttttcacatgcataatctgatcaaaataagtctacactaatcacaattttaatctttttattttggttgggggataaccttgatagaagacgccttgaagcttcagaaacagaatcatttggaaatgaaatatatactgtgaaatttcagaagaaaggagattatcctttatttggctgcaaatatgacttcaacttggaaggtgttgtggatgttcctgaattcttggtctattttccattgctaaatgagtaagaagtcattaatctgttcactcttttctttttgtcttaagggaaagaaaagcggggaaaagcaatatttattttactctttattttaaatgagggctaaagaaaaagtataatcttgtttttttgtttttgtgtttttaaaaaaaaaaaacaaaacaagactagcttcacatctaggggattattgccataggtctcataatagcctaacttagttttctctcattcctggaattttttaatcctgtgggtgaaaaagggaaccagttgccttcagcttgtggcacaaaatgcctgacactgcaaatagcaaaagttttttttttttttttagtgactactggtaactttgatgataaacaatgagtcttcataaatcaaagatccggccgggcgcggtggctcacgcctgtaatcccagcactttgggaggccgagacgggtggatcacgaggtcaggagatcgagaccatcctggctgacacggtgaaaccccgtctctactaaaaatacaaaaattagctgggcatggtggcgcgcgcctgtagtcccagctaytcgggaggctgaggcaggagaatggcatgaacccgggaggcggagcttgcagtgagtcgagatcgcgccactgcgctccagcctgggcgacagagcgaaactccgtctcaaaaaaaaaaawaaataaataaataaataaataaataaataaatcaaagatcctccttttgacagagatgagtattaaaagttgtttgcatttcactataactttgaaattgcctatgtctcacaggcaatgttgatgataaaatcctgattcaggaatgtattctcccatgtgcctgaattcctaggagtcctggcaaactgtagacacaggaaaagctgggggtaactgggccttaccaggtaaggcttcaaggccttgtgatacaccttggtttccagagtttccccggtggggagagtataaaagtcagcttaaatgtaggccatgtcatgattgattgaacttgattttctactttttagaaacaaaaatcttttgttttgaatattaactgagaaaaagaagaggtatattgtctgcttacttctgcttggtgcttattttaattgtaactcagtcagtctgtaaaattagggttacagtattttcaggagttctataatagcttattcaataatataagaaagccaagtagcattgtgactgaacatgaggaaaatactgtgcataattttataaatataaaccatttacaaaatttaaaaatatcaattacattttccttttaatttttaaaactaataaactggggaaatgttactgctcttcaactttatttaaaaaagaacttaattgtggaatgttattgagtatgtttaatatgttagcttgagattttagttaacagtttggtgattttagtataatcaaaaagataataaaacaaaagatttgttttaaatgctaaacaagacctagcggtcttcttttttttttttttttgacttaaattgcctaatgatggtaaacctaagtcatcagtttaatatctaattttttaaaagattatttattgaaacagtattggatgaaatagaatctgaaaatgtgtgggggttttgagatgcctttttgccatttcattaagaaatttaacagaaataagctttttgtgtggcaaaacttattcaaattgggcctcaattctttgaatcatgatttttttaggtgtaaaacttggtttcatttctaaagggttattttagagatttacaaacgaaaatgaactgcctggaataaaaaacttggtttcatttctaaaggcttattttagagatttacaaaagaaaatgaactgcctggaataaaaaacttggtttcatttctaaaggcttattttagagatttacaaaagaaaatgaactgcctggaataaaagacttaattttgctcatgttgcctttccaaggaggattaattgaagtaacagaatcctgccttacgtatacctcttacatagaaacctcagtggccctccagtgtttgcccttaccctatcccctcaaatgccaccctgtacacgagccttcccacctaattttcagggtttctccccttccttccactcttcctttaactgctgcctgaagtcatctccaggctccctcttgttgtctacagatacatgattataaacttggcaaatgcagtgaggaaaaaaactacctgagagtctaacggagagacctaatataattaagatttaaggaaggtgcctgtaaagaagcgatgtttgagtcaggatctaaaggatggaaaagtaggtgggcagctgaggactggagggaagaatgctcctgacaagaggacagcgtgtgtgagggcccagcagtgggaaagctaggctagtccaagatgttgaaagaaggcccatcctgatttatatcgggggctgtcccaaaatgaggcagcattcctttacagaygaatgtcttcgagaccatgttctgtatcctaagtgcactggagcccagtrgagggtgttaagggggtagtgacatgactcaggtccgcatttctgaaagcttaatctggctgcgattggaaaattcattgagggagagtaagaatggaagcaggggacaagcaaagtgagtttatggactggtgccactgagtggtgatggtgactgaagcagcaggatggtgccaaatgcaggaggtaagaagtggacctatttgaaattgatgttttctaggtaaaatagaaaggacttagtgatgtgtattgagcacagtgggtaaaagagaaggggagatggcatggatcactaggtagatttactgaaatggcaaagattggcagtaaaagagcagtgatgttcagccttagatgtgggacgttagagagtgccagtgacacatgcaggtgaagatttctaataagcagtagaatccatgagtgatgagagacagctgaactaccgatagctggggggtggaagtgagtagggctctggactgtactctacagaaccttgaagtttagaagttgggtaaaaaaaaacctgtaagtgaaaaggaaaaaaaaaaaacctgcaaagaagcagttcatgatgtaggggaaaaattaatagtgtatcttgccagagaagtcgagatgaaagtgaatctttaagaaggaagttggcagctgtttgcagtgcagctgtgagagatcaagtaaagtgaaatggaatcagtagaaaagagtttcctacactttttccgcatctcacagctccggagactctcatttacttcctgacctttatgttatactaatagagccctctgaaaccsctgagatttagaatgcatgtttcttttaggtgtgatatgttactcttgattcattttgtattactgtattgtgaatttatcaagggartggtagcttttttagttaagtccagaagatgycattgctgtacaaaagtaagttgaggaattacaaacatgtggaagctttttcrttaagtattcttttttggacagaatggcaaagaagtacaatatgaaactagtctacaaaaaaacatttctggaattctacgaagaaaagattaagaacaatgaaaataaaatgctcttaaaacgaatgcaggccttggaggtgagtatttagaaaagatgtacaaatttcagtcatggtgaacttgtttggctgttcttgagatccttgcaaggccatctgaacatgaaatagttatgtgtattacgctcttcagcacctaggacggagcttgatacagaaactgcatggtgagtgctcagtaaatacttgatgaaagaatgagtactggtgttaccaaattctgttttctaggatagtactgctttaaaataggatttctcagcctcaggactgttgacattttgttctggataatgccttgctgtgggatgctgtgcattgtaggatattcagtagcattcctggcttctacgcactagatgccttccagtaacactcttgtccccagttacgataaccagaaaactctctccagacattgccaaatgtcccctggtggacaaaattgccccaagttgagaaccagttctttacaacagtgccttttggttacgacagtaatttagaaccttcctggccagtgtccagacaagctcaaaccatacataattttattgcatggtaattctttagcagggttccagtcttttagactgtgttgttgctgagacctctcctgtcctaatgcagcagtgaaggtatctatataagcttcaattacacagccattgatkgtttttcctttttctccttaccagacaatgtttggttggacagacctaaaatattcagtgagcatttttattattgatcagtagaatcatattcatcaaatggacattaaacttccttagagagtttattcagtttaagtactttaagcatactctgacttctttatccttataattacctccatgaagtaggcagaatggtaacttttcactaatttttttcctatttttttttttttttgttaatgacaggatctcgctctgttgcccaggctggagtgcagtgatgtgatcacagctcactgaggccttcaccttctggaaggtgatcctcccacctgagcctcctgagtaactgactacaagcgtgtgtcaccacacctgtctcagttttaaactttttgtgctgatgaagttttgctgtgttgcccaggctggtctcaaactcctggcctcatcaagcaatcctcccgccttggcctcccaaagtactgggattacaggtgtgagccactgcacctggccagttttcacatttttttagtgggcagcctgaggctcagaggataatgacttgctcaaggcatactaacctttagattttcttcagtttttgtagatgatactcaaacagaagtctcctgttgaagttgcacctgcacccagccactcccacaatgttgagtgggaggactttttataaattctaaattgtcttttaagagacataatcagtaaaatttcatattcctcattagttatatttcctatactttagatctaagaatgtttttattggctttatattaggaatggatgcttgttttgtttgtcttaaggaagaggagaaaactagcaaaactatgtgtggataagtccccctgtcccacatatacagcatatctttagcatattgcctttatttgatggtgctttgcatgatagtggtcaattatttagcctttctcttagcatatgggtagtgaattcacttgtgtaatgtatgtcaaaatctacttaggtatggtagggtatgggataacaagaattttatggcatgttatttcagtgaataatgcagtccatgatgggaaytgcagtattgaagcattccaagtgcagtgagtatataaagggccttttgggaaggaagaagattggtagaggacaggcagagaaaccagagtgcacaggagatgtttgaggaagtagtgctaatggccttcacagttcttcagcagtcttccttctctcccagtactgcacttggggatatgacctgttaccatggctgtctggggacagaagcagtaatagcatgtagtttgaaaaatcctttggttttcctacttcttgaccaagtcactctggtgggcgtgtaaaggacttggagcaggaaaggacatgaccagataagagttaggacactacttgggtggcataatgggggatggtttggagggactttgagaccagaccagaggtggaaagagcagtcggatgccactgctttcgaccaggtcagaggtttaaatggatctgtttcttgatatttgtcccaaaaagtcttttcctgaagcatccagcttttatctgggttcagcactagaaccagtacaacttttctgctttcctggagcgttgkaacagagagaagaaagaatgaaaagatgtaggccatggaactgtaggtcctgacacctgttttctttttttcaccagcaaacatattctagggacagttctggaaaagtaactccttttagaggagacactaagatatatatgttttaataagttttggtcccggcatggtggctcatgcctgtaaccccagcactttgggaggccgaggcgggcagataacctgaggtcaggagttgtagagcagcctggccaacatggtaaaaccccgtctctactaaaaatacaaaattagccaggtgtggtggtgcatacttgtaatcccagctactcaggaggctgaggcaggagaatcacttgaacccgggaggtggaggttgcagtgagcgaagatcacgccactgcactccagcctgggtgacgaaactgaaactccatctcaaaaaataaaatcaattttaaaaaataacgatgttttacagctttataatcatgtattggttggtctttcaaaatgatcagtagagaagagaaactgggtgtccagtgataagcagataatcacatggaggataagttgaagaacaagtttacaacaaaatagtttgacaggcattcaaaaacgaagttctgaagctttgtgatatggtaaaactacaatatgtggaattaaagttcaaaaaaaactgattggtaatctgttctttcttagagccctgtgttgggatgtgatacaaagtaaagtggtttatgctaatgatacagcagtctcaaatagctgagtacttctaaaacagcaaataaataggttaatttctaatgcctaaacttgctgcaggatgtttataaagaaaagagacaaagaagattgcaaagcagatattcatagatcattttcttaaaagtttattagggagttgtacgtttaaagtgcctcctttctagctggtttgttgcaataagacaaagaattataaagaattataaatgaattattaaaaacataaactttgtagagtagatggttctattaaatgttttatgtaatttattgtgttttgatttgcatgtatctggtttgttttttggtgagggagttggggagacagagtctcgctctgtcatccaagctggagtgcactgacaccatcttggcatcttggcacactgcaaccccttccccccgacccttctcccccagcctcacctaaacccggcctaagtgatcctttcacctcccccttctgagtagctgggactacaggcacgtgccaccacacctggctactttttgtattttacgtagagacaggatgttgaaatgttgcccaggctagtctcgaacccctgagctcaagtgatctgccttcctcggyctcccaaagtgctggggttacagcatgagctaccgagccaggcctgatttacatgtattaaaaggcaaaatgcagatactataaagggatatcacttaaaatgaattaaaaatggcacttgaagtaacttggataaacatttggccagcatacccttaaaaacacagcatgtttttctgacccttttccagagtcttaggtaaatatgggaaatgtcggtattttggaggctggattattaaacagcgttctatgttgtcttgactttttcatttgtattatttgtaattgctatttatgcttttcatggctattaaattgccatcattttaatatttagctctttttatgacatctttaagctttgtatttatatayaaagcctttggctaacagtagagaaggtgcaagtgtttgctgctaaatggttcttggtggtgattaaattatgtagcttctttcagctgtgaatatcctaagattatgataaaagttgaccataaggctggatgtggtggttcacacctgtgatctcagcgctttgggaggctgaggtaggagaattctttgagaccagaaatttaagaccagcctgggcaacatactgaaaccttgtccctacaaaaaaatttttaaaaattagccagcatagtggcttgtgcgtgtagtcccagctacccaggaggttgaggtggaggatcacttgagctcgggaggccaaggttgcrgtgaatggagatcctgccactgcaatacagcctgggagacagagcaagactctgtctcaaaaaaaaaagatgctagtttacatctgatctttgacaaacctgacaaaaacaagcaatggagaaaggattccctatttaataaatggtgctgggaaaactggctagccatatgtagaaagctgaaactggatcccttccttacactttatataaaaattaactcaagatggattaaagacttaaatgtgagacataaaaccataaaaaccctagaagaaaacctaggcaataccattcaggacataggcatgggcaaagacttcatgactaaaacaccaaaagcaattgcaacaaaagccaaaactgacaaatgggatctaattaaactaaattagatgtacttatgcacagcaaaagaaactatcatcagagtgaacaggcaacctacagaatgggagaaaatttttgccgtctacccatctgatagagggctaatatccataatctacaaagaacttaaacaagtttacaagaaaaaaacaaccccatcaaaaagtgggcaaaggatatgaacagacacttctcaaaacacgacatttatgcagccaacagacacagaggaaatgctcatcatcactggtcatcagagaaatgcaaatcaaaaccacaatgagataccatctcacgccagttagaatggcgatcattaaaaattcaggaaacaacagatgctggagaggatgtggagaaataggaacgcttttacactgttggtgggactgtaaactagttcaaccattgtggaagacaatgtggcgattcctcaaggatctagaactagaaataccatttgacccagcaatcccattactgggtgtatacccaaaggattataaatcatgctgctacaaagacacatgcacacgtatgtttattgcagcactgattcacagtagcagagacatgaaaccaacccagatgtccatcaatgatagactagattaagaaaatgtggcacatatacaccatggaatactatgcagccatataaaaggatgagttcatgtcctttgtagggacgtggatgaagctgaaaaccatcattctaagcaaactaacacaaggacagaaaaccaaccaccacatgttctcactcataggtgggagttgagcaatgagaacacatggacacaggaaggggaacatcacacaccggggggcctgtcatggggtgggggcctgggggaggtatagcattaggagaaatacctaatgtaaatgatgagttgatgggtgcagcaaaccaacatggcacatgtatacctatgtaataaacctgaacgatttgcacatgtaccctggaataatataccctagtataatattwaaaaaaaattggtttaagagaggattcttccttttttttaatttttttctgtatttcaaaagtatgtatagtttgtattcctgaagtagtacttacggattattctcctaattatgttatttcagtgatttagcatgtttaattctgaattgtaaatttccgttattgtaactaggactttcatttctttccccagccatatcctgcaaatgagagttctaaacttgtctctgagaaggtggatgactatgaacatgcagcaaagtacatgaagaacagtcaagtaaggttacctttggtaagttttaatttatgaaagtattttatagagaatgaaaaaaagaacatgcttatatggagacataggaaatgatttcacttgtttacaatacttaggctcactgacttacaaatcagttgtttccactaagtgatgttgacttgttataaccacagaatatggaataaaatttatttcaatggactgagaatggagtgctatatctaaggcaatgaggacagtgaaaaaattacagggttggtgtgcaagttccctgctaatgtaggcaccaatgaaccacagcatttcatacatagaatgcagcagtccaggaatttaaatgggaaaaaattacatcttcacctatactaatttctgcgtaaaagtttacattttaagaatgattactacaatagtaccacagtggtattagctgctgctgtgactttgtcatcagtagaagttacagatattttcatagcacatttttgctaatatcttagaatattgttttcatttatcacatctggaaaaatgacatcactagaactgccactagatcttgttattatagttaatggtgtgtgcaaagcaacacatatctttaatattttgatagctacataaatataatttatttcctttgtgtgatatgtactttattttgttattcctttgaaaaaacacaaaaattgtattttttccaccagtgctgtttgatatttcaagataggccttttttattttttcattttccaaattaagaatacaagatagggccgggtacagtggctcacgcctgtaatcccagcactttgggaggccgaggcaggtggatcatgaggtcaggaaatcgagaccatactggctaacagtgaaaccctgcctctactaaaaatacaaaaattagctggacgtggtgacgggcccctatagtcccagctacttgtgaggctgaggcaggagaatggggtgaacccgggaggcggagcttgcagtgagccgagatcgcagcactgcactccagcctgggcgacagagccagactctgtctcaaaaaaaagaaagaatacaagataggccgggcgcaatggctcaacgcctgtaatcccagcactttgggaggctgaggcgggcggatcacaacgtcaggagattgagaccatcctggctgacacggtgaaacctcgtctttactaaaaacgcaaaaagttagctaggcgtggtggcgggcacctgtagtcccagctactcggcaggctgaggcaggagaatggcatgaacccaggaggcagagcttgcagtgagccaagatcacgccactgccctccagtctgggcgacagagcaaggctctgtctcaaaaaaagaaaaaaaaaataatacaagatagatgcattttccagttacacacacasacacacacacacacacacacacacacacacacacaatgccctcttcacacacattcaccctttggatgagaatttgagaatttggcaggaggataaaagtctgagaagatgactttcaaagtgaatctcaccgatttcttttatatgctcaggtcacaatatgattaacagtgaatcgaatgtgtatttacagtgaagttagggtcttttggccatctctgcccattatttagaaataagcatatgtttacttccatattgaatctaaaattttctttttctcttttgtaattttagggaaccttaagtaaatcagaatgggaagctacaagtgagtatatcatcagcatagattaactgataatttcaaaagtcctgtttcaaagtgatcattaaaacctgaaaaaaggctgggcactgtggctcacaccagtactctcagtattttgggatgccgagacagacagattcctcgagcccaggagttgagaccggtctgggcaacatggcaaatgcttgtctctaccaaaaatacaaaaaaattagccagtcatggtggcatgtgcctgtagtccagctactcaggaggctgaggtgggaggattccttgagcctgagaagtcaaggctgcagtgagctgtgattacatcactgcactccagtctgggcaacacagcgagactctcaaaaaaaaatctgaaaactttgagtttttctgacattttaggttgtgtttgtgtttacacacacacacaaatacgtatatctctacatatgtctaatcctcctttcttgcacagctgtgtagtgccaagagaagatacactgtacacagggtcttcctcagcataaacttgagtgagcatgtgtaaacattctcattgcctatttgttactaagtagccatctccatttgaagtgtttacctcagatttctagtggaatttttggcttatagaatacttgcatgycttttttttatttggccactctgatgtgacagtgaaggcataataatactagaacattcaatgaaacatccatgagcaggatgtgttagaggtgtgcatgataggggacaaatgtggtgcaaagatattctgaagtgaggttcctgtgttcagaagagaagccagaagcacagcaaatctgtgaaggcctgtggttcttcagcagtgggtgttgaggaagtcaggttgcagagcctcattgttactgtaggaatccccttacatggttgttggtgatgttgaggcacaagtggtcattaaggacaatccatttgataaacattwttgatttacgtgaagttctgtgaaaggtaaagtaaaataaagatgttaaatctctaccttctagaagtctacactgtaatggaaggaacaggcacaaataaacactactaggcaaatttttaagtgctaatgatactgtagtggggcacaaaggtgaaagagagcttaatgaaaactaaactaatgacatctgggatgtagtaatattgatattactgagtgttgaacatgtgcaggtgcgtgtaacgtttttaatccttgtaataactcacatgttgtaactcatttaatcctcacaatgactttatgagtagagtattatatctcctttcacagatgagaagactaacaacttagctaagatcacagagctaacctgtggttagcttacctaagtgatctgtcattttaactatggtttcatggaagcctggcaaaaggaaaatctagtaagacttcctgagttggatagagaagaagaggaaaggagtcaagcaagaccagtattttgaggctatttgtctttgaacattggtactattactagaaatcggactggaggatgttatacacatacgatcatgcttgacacactggtgagcatgtgcataaactatggattttattactttttccctgcagtggagactggttgcctgtcttagacatcctgctggtcccaaagtagagtgtaaattytgatcacgagtcatcatgatggcggtactggctgtggcttagaactgtatttttatattattaagtgtggactttagtcatcatgtacaaatgaaaaattagatggccccagacaattggaagagatgggctggacatgcgaagagagcagtggccaaattgcacctcgggtgtagcaccccaggattgtttggctgtttgatgaattgctctgttctaagctagagggcttcgtgggttgagcgtattttgcatgccatcacgagtctaaaaggcccaggctacattttagacttctactggtctgatcattaagctatcaccagagctgctgctcctctagaagatggctttaaatgagaaaggagagaattgctattgatttatttctggaagtggaagtggttcacgatttgatttttttaaatcccaattgaaatgcctgcatagaaggcattttatacaataagtgggactttttaggagtttcaagttagaaagaaagttgctattatgtattgaaaatcagactctagcatgttagtggtttcaaatgaccctaaatgaggacaggacaggactgaggggttgtttgcaattgctatgggtgtgtggggggtgggatttggcagggctgggctgcacaaaggtcacacagagtgggggacagcatgagtgatactggccagctgtgagtgctgacatgctgtgcacgctgatgtgttgcaagtgctggggactgctttgtctccttaccttctggcaagaaccacagaattgatgaacaccctgcccgttttctgtcctatcgctgtgctactagccacatttcatttcaactaaaagaaattggaaaccggtaaataaggtgaccaaagtagtattttggaaaaactgctatggtrttcctgtacaagttgggttggaagagcaagaagctggagtcttgggaggccatcaggcagttagctgtgttcatctaccctcccttcaaaagaagtcatctcaaggagtgaggcctccagcttagatggacttgatcttgactcactgttgagtatcctagcacatgccccaaacatccttgtgatgtttgcaggatttgtcacctttgcaggtattttcttgccctaaaatctattggtattttattagaagatatacaggcataccttggagatactgcaagttcagttctagaccaccacaataaagcaagtcactcagattttttggtttcccagtgcatataaaagttatgtttactgtagtctgttaagtgtgtagtagtgttgtgtctgaaaacmatgtacataccttaatttaaaaatacttcattggtaaaaaaatgctgatgatcatctgaaccttcagtgaatctgaatcttttctgcttggtgaagggtctttcctccatggcggaaatactcttgatggatggtggttgccgaagattggtgtggctgtggcagttaagacaatgaagtttgcctcattgattgaccattctttcacagaagatttctctgtagcatgcagtgctgtttgatagcgttttacccactgtagaacttatttctaaattggagtcactcctctgaaaccctactggtctttatcaactaagtttttgtaatattaatattcgaaatccttgtcatttcaacaatgttcccaatgtgtttaccagaagtagattctatctcaagctcatccataagaagcagctcttcatttgttcaagtttgatcatgagattgcagcaattcagtcacatctgcaggctccacttctaattctggttctcttgttgttgccatcccgtctgcagctacttcctccmctgatgtgttgaaccccttgaagtcatgcatgagggttggaatccagttcttctaaacttgcgttcatgttgatattttgacctcatcccatgaagcatgaacattcttaatgatatctagaatggggaatcatttccatcaggttttttatttacttcatccagatccatcagaggaatcactatctatggcagctatagccttacaaaatgtatttcttaaataataagacttaaaaatgaaaagtaccccttgatcaatgggctgcagaatggatgttgtattagcagccatgaaaataacattgatctccttgtacatcttcatcagacctcctgggtgaccaggtatattgccaatgagcggtaatattttgaaaagaattttatttttctgagcagtaggtctcaacagtgggcctaaaatactcagtaaaccgtgatgtgaacagatatgctgtcatccaggctttgttccatttatagagcatgagcagagcagattttacataattcttaagggcctcgggatttttggaaggataaatgagcattggcttcaccttaaagtcactagcagcattagtccctaacaggagagtcgccctgtcttttgaagctttgaaactaggtattgacttctctctagctatgaaagtcctagatggcatcttctaatagaagactgtctcgtcttcattgaagatcttatttagtgtagccaccttcatcaatgatcttagctagatcttctgcataacttgatgcagcttctacatcagcacttgctgcatcatcttgcacttttacattatgaaggtggctgctttccttaaacgtcctgaaccaacttctagtttcagacttttcttgtgcagtttcctcacctctctcatccttcatagaattgaagagagagagttagggcctctgaattaggctttggataaagggaatgttgtggctggttgatctttgcagaccactcagactttttctgaaaatcagcagtaaggctgtttgctttcttattccagtgtgttcattggagtagacttttattttaagaacttttcctttgcattcataacggctgatttcaagcctagctttttgcctattttagctttttacatgccttgttcactaagcttagtcatttctagcttctgatttaaagtgagagatgtgcaagtcttcctttcacttgaacatgtggagaccattgtaggattattaactggccttatttcaatattgttgtatctccaggaacagagaggccaaggagagggagggagagagatgagggaacagctgattagtggagcagtcagagcacacatgacatttatgagttctccatcttataaaggcacctcgataaagtttgtggcacctcaaaacaattacagtaataacagcaaagatcactgattacagatcatcatgacaaataataatggaaaagtttgaaataatgcaagaattaccgtaatgtgacataaaaacccgaagcgagcatgtgctgttggaaaaatggtgccagtagacttgcttgatatggtattgccacatacctacaatttgtaaaaaacaccaatttgtaaagctaaataaagctaggtatgcctttaataggtttcaacttgattcagaacaaggaatcctaaattcatttagctgtctttgagtcaaagcaggaaaccttatttcagggagagagctcttggggctaatacatgtagaaatagaaataatatctctgaagtattrattgtcgtagagcttttggcttactttcttcacaaggccctacaacacaataattggataattgggtgaattgttaacatgtcatgttatgtatgttcctttaattctagttttctaaaatatctttaatatttttaattctagttttctttgttatacttatttaaaatttaattttattataattttaatttgttatacttctaatttagttatacttttatttttcttaccttaaactgatttttagagctgttgaactggttttcccatgggctgcaatatcactgagtattatagtaagtagataattgttttaaagtaagcaagtaccatcccatgtctgcctaaaaatgattcaaataatagaggaactcttagaattaaygggkattttcytcttcagaagctgcttgagagcctaagaattttcaccaaattatgaacaagacagattgttttatttattgtaatcatatgagaaactgaactcttatttatttcttctttaggtatttacttggtgtttgcctttgagaaacagcagtgagcacataggcagtagtcccagaggggccgtgttctgtcctgcacaaatttgaacaactcatctcgatatatttgatatttctctgtctgttgattttaattctaaatgtgcaggatgctgccagaaactccaatgtagaaattcaacatttgctgtctgtgacagatgaacttttgcatgtgtatataagaatgagttgggacctctgtctttaaaaatctatttttaggtaatgttctaagaattccatttgcctctatgatcttagctcataaaaatataatatgacttgataaagcaactaaactcttyccacagtgttcagatttgtcctgtgtgtgtttacagtattcaatttattgcagttatagaattggtcagagagcattttcatagtgtgctcatttctatggttttgttatatagcatttttcaacatttaatggtctgtacagttgaatgtaagtgttcaatatgtattgctgaagttataagtttaaaactcaatttcagatgctcataaaagttacttagctaaaattttagcaatttattgcattttgaaataatcattaacatgctgcaattcaggagctggttagaacattttaagtggcagcatagaattttggaattttggggctttcttttcagaaattgctaccatagtaattaatgtttccagttatcaagattgtgattagacacatttacctttcttcattgaacaaatggtgccatagttatttttctcaaaatttagtgaaaatccctcccatgtagacatgttgcacattttttccaaatttatacatggaactgcagtaggaatattctcaccatctgatgccatgtacccacttcagaaataagcaatacttgttcctctgttacaacctcagcactttgcaccgtaggagccattgttaaagttgtcacttgtgtaactgactgcttttccaaaactggtacttaygtgaactgttgtccttgctttacaccaccatttggaaaacttaccagtttttagatgtagatgtagtgaaaaacttcaagaatgaagcagagcaattgagtattcttttttaaattattaagccatgatttacaaaaacattactttctgtaattcacaatacttgttttaaaaacatagtgtcttcattagtgtgcatctattaactgttcatggtgttagagttgcaaactttttagcaagaaaatatggatttcctcatttcagttccttctgcagcctgtgaatctccacaaagtgttaccagtttacaaaaataagtctttttgccttaagtcattttggaaataagtaatactgcatctgactctggtggctgtattagctaggaaaggtttgtaaatggtgtcagtgaggtggggaaaggaagtcttcctgtcacatatgcaggttcgttttcattctagggcagtgccaggaagtatattgatagctttgtaggtacaggaaaaacatcatcattatttcctctgttcacatttactggtcttaattaacaggtaataataatacatgtacttttagcctgaaacctcttccacgccatgggtaacttgggggagagaagaatcctccaaacgatggagtagccagtggtaatacaaagcagggagaacagaaaggtagagttastaaggccttcagtgaacagaaaggagcagagagcaagattagatctgagaagatgctctggggactgagcccactgttgttggtgtcagggaggcttactggagccacacctgcaggcgctgtgttcaggcaccaccttcctccttgagctttgcctgtctcttgccttatcagttcttcctccaccaccctacacccccctccccccggccccaagcccctgtgtctccttgttacaattaagtttctggatattgacttaagaactgttaggaagaggactagaaaaggcttcccctgcctatcctctccgatcaccaaggtggaagggagctagtaggactcttccttgacacaccttgtmgtctaaatgttcggtattctattcaggacttacggtaactattatgagggaggcatggctttccaccgtcgggccaggaagagcacctgttgctgcaagctcagtgaagtggggcactcccagacctgccatgcagtttatcctctgagaatggaattggaaatgaagacctaaccagctattggtgggaatgacggaactggggattgcgatgattgatctgggaacatggctggattgtgatttaaccaagaatgctgatgttgaattctttgggcctagaatatacttgagaaagcacyagtggcttgtgttcagggagaggagctggcagtttttaaccacttctgtgggagcygtgttctaacctgtggaaagtattgcaattctgtgagagtgactctgcagagtcactgcaccatcaggcttggccctgctgtgccttcagtacccagccaggttctctgggtccagggtgactctccaaagaaattggccttcagctggagaaaacattgggtggagactctcacttatgttaatgcaatcttgaaatgactgaaaggtagattgccagcacagtgagtttcccagcctgctcccccatccacacttggaaattgagggagcatgaccgctctctgacttcacatgttaatagaggatcagagcagagttgggagtatattggtcaggatcatagaaaagaagacaaagcttgctcagccatgagatggccaggtatccagttttgttaactctctttgggaatttctttttcagcctgttttttagcttagtgccattatgtcattttgatttgtattcaagtactcttcaagtatctttgtaatgaaggtttggctacttgtataggtctgcctgcagggtgaaaatgccagtgtgaatattctagctaccaaacattgttttttgttgaaaaactgactttctgttgtctacctcaggccttgtgcatttgggttatctcaagccagtcaccacagagggtctctagggtctgcaaaatagaggccaaatccagggaccaggccctaataatagaagttgtaccaaaatgcctgtggtacttgatggcctgttggtcaaataggaagtacaagtgtgtgatgttagaacctccctagttgctgctatatcaaacactgcacacttgacaagtgttttcattccccgccctctgacagaacaacattcctaattctttgaaggcaaccagtgcaaaggctactacacttgtgtaatgatatttagcagatgcatacaggactggatcccagggcactgtcagttcttccctccctctcgtgctgctcagtttgtcctctgctcccatgtaggcctaaagtcaccccactccttagtgcctgcacctcaccacgatattgaggaagcacaggacatccaagggtactctccagtttggctgtggagacttgagcaagccctaaagtcccctgctccctggacttctcctgggttgtgcttttttgggggcaacataccttggacaaagctgagctgacagctaatgtttattagcctcctacctaagtcagtcactttgctaaattcttcacctgtggtaactcattttgattgttataacatctcagcaccrttattcccattttaatgatgaggaaactgagtcatagaggatacagacttgcccaaaggagagccaggattttcacaccccctcctcaagctgggcctgccctccaagtgcttgttatatacctccacgggtgtcagcccagatgactcctcacccatccaccacctgcagcttgagatgttaactattagagctccattcttktggttcaaaacgttgatacttacttagatgttccctgagaggagtgtttatttctgagtaaggggctttgttgaaagagggggttagagagagcaagacagcacttgagtgcactggcaggaagcagagataagacttgaatttcagtttggtagaccwccttctttagcagcccaacctgtagcaaatctagtttagcctgcatggcagggagagggattctcttcccaccctcaccatttgcaagtggcaggagctgagaatgccagtacgagagtgtagccaaagtgagaggctgagagcaaaggagacatttttttcagttttgagtcgagtatccagacagaggcaaatcattttgtttaactttttattaaagtgtaactatagaaacacatcaatgatttttcacaagtggagcacgtgcatacaatcggcaccccagaagccccccgtcagattcccttccagttaactacctctccaagggaaaccactatcctgagttctaagcgcatagattagttctgtctggtttggggagatatataaatggaattatgcattcttcgtatctggtttcttttcaccaatattatgtttgtgagatttttgttgcatgtatttgtacatggattttcattctcatggttgtataatatttcattgtgtgaataaaccacatactgtttatctgacagctgtttggttcatttaccatttggaaactagtactgatccagatattctagtacatgaattttggtgcacataggtacatacttctgcttaggaatgtgctacaatttgaatgtttgtccttctagatcttatgttgaaatttgatccccagtgttggaggtagggcctaatgggaggtgtttgggtcggggggcgggtccctgatggatagattaatgccttgcggtggtgggagtgtgagttcttgctcagttagttcccaaggacaagttaattgttgttgccgattaacaacaatgacacctggttgtttaaaagagcctggcacttcccccattttttgctttctctcgccatgtgatctctacaaccagctctcctttgccttccaccatgagtggaggcagcctgaggccctcatcagaagcaaatgttgcaggatctcactgggcctttgtcttctatgcctacatgtccactgctcggttactctctactgctcctttgcctttgctctgtcaccctgttacctgcaagtgttgggagatgtgtagggaagataccagtacactccagaaccaggaagtggaaacaggaataccagaacattgaagatcagtacaataatgcttggagaaatctaagagagttggggagggagctaagatggctgactagatggggccaggaagagcatctctcaccaagagaccagaccatcaagaaaactggcacactctgagcagacctttggaaggaaggtgttgagagtggacagagggaaaatacagacactgggctcaaggggaaggaagctgggaaccctgcccagggcaggtgagcactaggatttgttcctggtccccagtggctcctgggtaaggggtgagttaaataggcgagtgacccactctcaccatggacctccagaatcctaactgcaggaaaccccacaacccctacggacatttaagctgacggagagttgttcggagcagtggcggggaaaggactccagcctttgcagaacccagagggtttggcacgggaatggctacagcagagtgcaaccaaggacacccatcccctagggctcaccacactcctctgggtgactttggctttgtcaactgtcagacctggacagagcagggtggtcttgcccttgggacaaggccagtctacctgagtgcccctgctcctctaatctgctgacctctctgggggtcccttcctggccatgcccatttgcagtgcagccacagatgcccaatcagggtgctccccagtggcggccaacaaagctcctttacaggccaaccatacctaactgctagagagctccagcagactggcctctaccggtgggcacccacacacccacagcctcctcccaccacaacctccctgcaccatttgccggcatccatgggtggtctcactatcctgctcccaccagtacctgacctctgctgacacacgcacaccccactgcactgccagttacaccacagtcaaaccctcaagggcatcaaagaagataaaagcaggctgggcacagtggcttacacctataatcccagcactttgggaggccaaggtgggcggatcacaagatcaggagttcgagaccagcctgaccaacatggtgaaaccccatctctactaaaaacacaaaagttagctgggcatggtgacacatgcctgtaatcctagctactcaggaggctgaggcaggagaatctcttgaacctgggaggtggaggttgcagtgagctgagatcacgccactgcactccagcctgggcaacagagcaagactccatctcaaaaaaaaaaaaaaaaaagaaaaaaagataaaagcaaaataccctatcaaaaaaaaccagcaacttcaaaagattaaaggagcaccagcacacacaggtgagaaagaaccagcacaagaattctggcaactcaaaaagccagaatgtctccctacttccaaacaaccacactagtaacccagcaatgcttcttaaccaggctcaaatggctgaagtgacagatacagaattcagaatttagataggaacaaaaatcattgggattcaagagaaagtcaaaacccaatccaaggaattgaaggaatccaataaaacaatatgagacctgaaagacaaaataaccattttaagaaagaaccaaacagatttgctagagctgaaaaactcactgcaagaatttcataaaatgatcagatttattaatagcagaatagataaactgaggaaagaatctcagagcttgaagaccagttgtttgaaacttaaacaaaaatagagaacaaagaatataaaagaatgaacaaaacctctgagaaatatgggattatattaaaagacctatgactcaaacctatggctcactggcatccctgaaagagacaagagagtaagcaagtaacttggaaagcatatttgaggatctcatctacagaaatttccccagcctcactagtgaggtcaacattcaaattcaggaaatgcagagaacccctgcaaggtactatagaagacaaccatccccaagacacatagtcatcagattctccaatgtcaagatgaaaaaatattaaaggcaactagagagaaggggcaggtcacctacaaaagaaactccatctgactaacaatggacctttcagcggaaaccctacaagtcagaagagattagggccttatatttagcattctcaaagacaagaaattccaaccaagaatttcatatccagccaaactaagcttcataagtgaaggaagattattttcagacaaacaaatgttaaaattcattaccaccagacctgccttacaagaggtccttaaaagagtactaaatatggaaataaaatattgttaacagccaccacataaacacactgaagtacatagcccattgacactataaagcaaccacacaagtctgcataacaaccagctaccagcatgatgacaggatcaaatctgcacatatcaatagtaaccttgaacataaatgggctaaacactccacttaaaagacgcagagtgtcaagttggataaagaagcaagacccaattgtatgctgtcttcaagagatccacctcatatgcaaatgacacccataggctcaaagtaaagggatggaggaaaatgtatgaagcaatttaaaaaagaacaggggttgctattctaatttcagacaaaacagactttaaaccaacaaacatgaagagaccagggcattacacaatgattaagggttcacatcaacaagaagagttaactatcttaaatatgcacctaacactggaacaaccagattcataaaacaagttcttagagaccttcaaagagacttagataaccacacaataaaagtgggagacttcaacaccacattaacagtattaaacagatctttgaggctgaaaactaacaaagatattccaagacctgaactcaacacttgagcaaatggacctaacagacaactacagaacactccacacaacaacagaatatacattcttctcatttgaacatggcacatactctgaaattgactatacattggccataaaacaattctcagaaagaaaaaaacatgagagcaaaaacatatcaattacactctgaggccacagtgcaatataaatagaaatcaatattaagaaaatcacccaaaactatacaattacatggaaattaacctgttcctgaatgacttttggggaaactatgaaattaaggcagaaatcaagaaattatttgaaatgaatgataaagatacaacgtagcagaatctgggacacagcaaagagtgttaagaggaaagtttacagtgctaaacacccatattaaaaagttaggaagatctcaaatgaacagcctcacatcatacctagaggacctaaagaaacaaggccaaaccaaccccaaagctagcaaaagacgagaaataaccaaagtcagagctgaaccaaatgaaattgagatgtgaaaaaccatacaagagatcaatgcaaccagaagttggttccctgaaagaataaataagactgatagactgccagctagactaataaagaaaaagagaagatccaaataaacacatagatgacaaagaggacattaccgctgaccccacagaaatacaaaaaatcctcagagactgttacaaacacctctatgtacaaaaactaaaaaacctacaagaaatggataaattcctggaaacacacaacccttcaaaattgaaccaggaagaaattgaaaccctgaacagatcaataacaagttacaaaattgaatcagtaataaaaaggctgccaaccagaaagtccagggccaggtggattcatagatgaattcaaccagacagataaagaagggctgagtggcgggcggtggctcacacctgtaatccagcactttgggagtctgaggcgggcagatcacgaggccaggagatcaagaccatcctgactaacacggtgaaaccctgtctgtactaaaaataaaaaaattagccgggcgtggtggcaggtgcatacaaaaaattagccagcatggtggcgggcgcctgtagtcccagctactcaggaggctgaggcaggagaatggcgtgaacccgggaggcggagcttacagtgagctgagatcacgccactgcactccagcctgggcgacagagcgagactctgtctcaaaaaaaaataaaaataaaaaagaagggctggtaccattactactgaagctattccaagaaaaattgaggaggagggactcctccctaattcattctatgaggctagcatcattccagtaccaaagcctggcagagacacaacaacaaaaactttaggccaatatccttgatgactatagatgcaaaaataccgaacaaaatactagcaaaccaaatccagcagcacatcaaaaagctaatcctaatccaccacaaaaatggaggctttatccctgggatgcaaagttggttcaatgaacacaaatcaataaatgtgatttatcacataaacagaaatgaaaacaaaaatcttatgatcatctccataggtgcagaagaggcttccaataaaattcatcataccttcatgttaaaaaccctcaacagactaggcactgaaggagcatacctcaaaataatagagccatctatgacaaacccacagccaacatcacactgaacagggagaagctggaagcattcccctagtgaaccagaacaagacaaggatgtccactctcaccacccttattcaacatagtactggaagtcctagccagagaaataaggcaagagaaagcaataaaagggatccaaatataaaaggaagtcaaactatctctgttttcagatgatgtgattttatacctagaaaagcccatagtctttgcccaaaagttgcttgatctgataagcaacttcagcaaagttttagtttacaaagtcaatgtacaaaaatcagtagcatttctgtgcaccaacaacatccacactgagagctaaatcagtaacataaccccattcacaatagctacaaaaaattaaaatacctaggaaatacagctaaccaggaaggtgaaaggtagctacaatgagaagtacaaaccactgctgaaagaaatcagagaaaacacaaatggagaaacattccttgctcatggagaggaaaaatcaacactgttaaaagggccatactgcccaaagcaatttacaggttcagtgctattcctatcaaatgaccaatgacattttttacagaattagaaaaaaaagtattctaaaattcatatggaaccaaaaaagcctgaacagccaaggcaatcataaagagaacaaagctagaggcatcacattacccaactttatactagaaggctacagtgaccaaaacaccatggtgctggtacaaaaacagacacgtagagcaatagaacaaaaca

SEQ ID NO: 95781 - DNA, 45179 bp, Homo sapiens
  misc_feature (1)...(45179): n = A,T,C or G
gacgctaaagttcttatggaaaaatacacacgcaatagctaggaaaacacagggaaagaagagttctgagcagggcctagtcttagccaatattaaaacatactatgaagcctctgatacttaaacagcatggcgctggtacgtaaatagaccaatgcagttaggtggctctttccaagactctggggaaaaaagtagtaaaaagctaaatgcaatcaatcagcaattgaaagctaagtgagagagccagagggcctccttggtggtaaaagagggttgcatttcttgcagccagaaggcagagaaagtgaagaccaagtccagaactgaatcctaagaaatgcaggactgcaaagaaattggtgtgtgtgtgtgtgtgtgtgtgtttaatttttaaaaagtttttattgagatacaagtcaataccataaagctctcacccttctaaagtgtacaattcagtggtgtgagtatattcataagatttatacttggtgtctattcataagacttatatccagcatattcataactagagccatatcacagatgcattcatcataataattccagacattttcatcaccctaaaaggaaaccctgaaacccattagcagtcattccccattcctccaacccattctctccctaatccctagaaaccaccaatctgctgtgtatttcatctattgccaacatttcatataaatggcatcatacaatatgtggccttttgtgtctggcttctttaacttaacatgttttcaagattcattcatgttatagtatatgttgaggtttcattcctttttatttccgaaagacatttccactgcataaattgactacattttgtttatccattcttccattgataggtatttggatattctccacttttttgctattttgctgcattttttgctattatgactaatagctgctatggacactcttgtatgagattttgtgcagacatatgttttcatttttcttacgtataaaaggcgatccacaattgatgaccccatcataagtcaaggagcatctgtgtgctgtattaatcagagttctccagaaaaaccaaaccattagaatagaggaagagatatataaagagatttattatgagggtttgacttgtgtgattatggagtctgagaagttttgtgatccaccgtctgcaagctggagactcaggaaatccagtggttgtagtttcagaccaattcagaaggctgagaaccaggagattgctggaataagtcccaatccaagtatgaaagcccaagaaccaggagcatcaatattcgagtgcagacgacagatgcctcagctcatgcagggagagaaaatttgctgttcctctttttgttctattcaggcctccagtggattggaagatgcacactcaccctggtgagggctgtcttctctactcagtctacagattgaaatactaatctcttccagaaacatgctcacaggcacatccagaaataacattttaccagccatctgggcgtcccttaaccccgcccagcagacacataaaattaaccctcatgtatacctaggagtggaattgctggatcacgtgataactctatgtttagccatttgagaactgccagactgttttccacagtggctgcaccatttatacacacccacccctggcagtgaatgaaagttccagtttctctgtatccttgccaacactcattgtccatcatgttgattatagccatcctagtgggtagatgagaaagtgatgatatgctgtcaaaattatcaggtctgctcaatgtggtcaggaccctacatggtaaaaaagaatagggccctgacacatagaatgggaacatacaggttgatgccactgagaatctttttttttttttttttttttgagacagtgtcttgctctgtcgcccaggctggagtacagtggcacaatcttggctcactgcaccctccacttcctgggttcaagtggttctcctgcctcagcctcccgagtagctgggactacaggcacatgccaccacgcctgactaatttttgtgttattagtagagatggggtttcaccatgttggccaggctggtcttgaactcctcacctcaagttatctgcccacctcagcctcccaaagtgctgggattacaggcaagggccaccaccccggtcccactgagaatcttgaatcctcagattcctctgactcctagagctgtaaaagtgacctatccatccctccctgttaagagctaaccctcctcccttgcttggaaaccctatagaggcatccacaagacgtttgtccctgtgcccacctcctctcctgcccacaagggttgtaactaggcttaaattccagcataaacaagccagggatgtgacgggcctcataggggaggaaagggcctatatcccaaagtagctggagggccaagccagcatgaccagcagaagtcgggtgagtttgtgcaggagtcaaccttgagggtgctcgatcagggggctgcagtgtgaggtcagataggaaagggtttattgattcggaagtcctttgggagttcagggctgcacacccaggcaaggactccaggagaaggtgtaaacttgctgccaggagggctcctagaagacgggaaaaagtaggaggccatgctaagtgagatccaaatgccagaattgccaggggagacggtggcagatgcgatgaaaggtcagggaagtggcaatgcttgggaaggctgcataaggcccagggagccagaggcgacgatcttccatggaaaggccaagattcccctttaccaagtccacgaggaatggaccaggaagagaacaccagccagcatcacagagaagctcagaaagcctcctctgcaggagatgccatcacaggatggtgggtgaggccccttgggagctaggctcactgatagcaaaagggatggtggaaccctggagtaagagaggccaggagatggcacccattaggggacacagtgctcaccatgagtggtagggcccaggattggccaggaggggctggcctgcagaacatggagatgacccttaaatcttggtgttcatagggacagactagatgggccacaagcaggcagctactcaacttacgccatcaaaatacctcaagaatgaacgccgaggaaacttcccccagtaaaaacatcaccattgctttcctagtgggcttcccaggaaacacgtctgtcacatacgtcagctaaatgtcatgtgtgagcctagatgttggcgggggtgcggatgctataaagaagagtattggaatcgttggtaaatttttcaatataagaatgtatttatggctggatgcagtggcttacacctataattctaccactttgggaggccgaggcaggcagatcacttgagcccaggagttcgagatcagcctgggcaacatggtgagaccctacctgtacaaaaaaatacaaaaattagtcagacatggtggtgtgtgcctgtggtcccagctactcaggaagctgaggcagaagaatcgcttgagcctgagaggttgaggctacagtgagccgagattgtgccactgcactccagcctgggtgacagtgagactctgtctgtctcaaaatatatatttatacaatatttatataataaacgtatatttattatatatgttatataaattatatattatataaattatacaaaattatatttattatatatgttatgagatgatagcattgtatcaatgataaaagtctgaattggaccattgttctgtgcttctgtaacacaatattcttgctcttaggagatataggttgaagcatttaggagtaaagggacataaatcatgcaacatgcattcaaatggttcaggaataaaaatactcatgaagggctgggcgtggtggctcaggtctgtaatcccagcactttgggtggctgaggtgggaagatcgcttgaggccaggagttcgagcccagcctgggcaacatggtgacatcatgacccccatttctaccaaaaaattttaaaaatttagccaggcatggtggtgcatgcctatagtcccagctactcaggaggctgaagtaggaagattgcttgagcttgggagggtgaggctacagtgagctataatcacgccactgcactccagcctgggtgacagagtgagactctgtctcaaaaacaaaacaaaacaaaaacctcctaaaatgtataaatagcaagaaaatgaggggcaaatgtggtaaaaaatataatggctaaaaagtctaaggaagttctttgtgtgcatcttgtaaattttctcagcatttcaaattacttcaaaataaagtgtttttttaaataacaaataaagcacaggctttggagtcaggcagtgtgttagtgtgagaacctagcctgacaacttcctagctgtgtgatcacgggcaaatgtttccacctttgtgagcctccatgttctcatctgaaaaaggaaccttaggactacgcctgcccagcctgcctacctctcggtgttgcagtaaaagttggataagggcaggaaaggcccttaatgagcatgtgcattaatcgaggtttttccagaactaacagggtatttatatttattttgaggtatttattttaaggaattggctcatgtgattgtggaggctggcaaatccaaaatcggcagggtagactggcaggtgggagacccaggaaggagttgctgctgcaagtggaggccaaggcactgcagccgaattccctcttccttgggggagctcagtctttagtctattaaggccttcaactgattgaatcaggcccaccaccttacagatgataatccactttactcaaaaaaaaagtctaccaatgtaaatgttaatcttatctttaaaaaataccttcacaaaaagatctaggataatgtttgaccaaatatctgggtacctgggctcagccaacttgacacataaaattaaccatcccagtatggaagggccctggtcccccactacatcttggagatttttgccttctctgtgaattattattgctgggccaaggcagctggctgggagtcctctgcgagttttgttttcaaagctctgggcacaggagttgcatgtctgtctcctttctggctcacacacttggggtgtgttttcttgcccttgcgaggctggacaagtgcctcatacggtccctcggctgtccacaagtgtgctgagaaactggacacacagaggttcccacccgctgaccacacgggggcctgtgtttacccagaagcagaccaaaacctgagtccagctaggtccctgctttgctgtgtgtccctgagcaagtcagttccctctctgggtctctttttcctctctgccgctttccctgaatgtgagttccctggccactgagaacagggggaaagggacagagcctcaaaagatgacctgtgcgcccctgcttctaagcactttgcaggtattatttaatcatcaagctaatcctacgagagagctgccattttcccccagcttacagatgggggaattgaggcgcgaagagggcaggcgatgtgctcaaggacagacatctagcaggtatgaagccctcacaatggggttctagaggctgtttagttaacctcaagttttggggagcccctgaagggctggtcaccacgctgccggggacagggaaagcctctgagcttgagtcagttttggtttccctgctggggtgcaggagtcagtaaaccttgctgcaaggggcggggaagagcatttgagcttaagttagttttggtttccctgccccggatgcaggagttggtaaactcactgcaaggggcagggcagagcctctgagcttaagttagttttgtttccctgtcccggatacaagagttggtaagctcgctgcagtgggtggagagaggcctctagacttcagtttcagtttcctggctctgggcagcagcaagaattcctctgcctcccatcctaccattcactgtcttgccggcagccagctgagagcaatgggaaatggggagtcycagctgtcctcggtgcctrctcagaagctgggttggtttatccaggaatacctgaagccctacgaagaatgtcagacactgatcgacgagatggtgaacaccatctgtgacgtcctgcaggaacccgaacagttccccctggtgcagggagtggccatagtgagtccagggctgaggttgggtctctgggaggcaggagattccacggcggcagcaaggccragctactgggtgctgggtgcctattatgtgcgaggcccacacttgggtgggatgtggtgtaggagtctcaggctctggagcaggcgcttgctccagagctgtgtgacactgggcaggctacttaacctctctgtgcctcagtctctgactctgtaaaatggggagaggcataatacccacttcagagtatcgtaaggcttgagcacatcatgttcttagcaaaagactggcagtgctcagtgaattcactgtgattactcactgcgattttcttctatcctctccacagtacagaggagtaaacttagggaggctagagaactttgttcaaactacccaggttgccttgtggtttctccgcagcaagaaggagtggcttttatcagttagaaatatttggttttgtggacacaaatctcaggactgaggctgaaaattctggacctctggggaggaagggggactggggagatgccaggaccctagaattgggggcgtgggggtcctgatggcccaatactatcctcttagcctcctgagctgctgacgtcccttctctgctgctgccacactttttggtctctaccccttgcacacatccgctagtgcctcaataaagaaatctagacacgtggtgtccccagccctggcccaggccagcaagctaaggcaagtttggttaatagctattgtcagaactgggattttaagcctgggtaattggcttgagggcatgcatgtttaaccactacactatcctgcctctcaatttttttttcctcatggaagtaaaacagaaaaagtgcccagatcaaagtgtccagcttgataggtagccacaaacaatgtaactgtgtaacccccacccagatccagaaacaaaacattctcagccccccagagccctgggcccccgatccagtcagcacctccaaacccaggtaggcaatctcctgacttctaacagcatagacacgttttgcctgtttttaaacgttttacaattatagggtgaccaactatcccagttcatccaagattggggtgtttcctgggatgtgggactcttggtgtgaaagctgggaatgtaaaccaggatgcatgggtgaaccctacataaatggcatcatgggctctgtgtgctttagtgcgtggtttctctgacctatgatgtttatgaaatttatgttgtggggtacagttgtttatcttttcattgttgtgtcaattccattatgtgaatattccacatttgtccattctactgtgtttttttatttttacataattgtgcatatttatatggggtacatgtgatatttggacacatggatacaatgtgaaatgatcagggtagttaggatatccatcacctcaaacattgatcatttatttgtgttgagaacagttcagatcttctcttctaactattttgaaatatataataaattattgttaactatagtcaccccattgtgctatcaaacactagaatttatcccttctatctaactgtatgtttgtatccattaaccaacttctcttcatttcctcctctacttcccagcctctggtaactatgatcctactctctacctccatgagatcaactttttttaacttccacataaacacatgcaatattgtctttctatgcctgacttatttcatttaacataatgacctctagttccatgcacattgctgcaaatgacagaattccattctttttgtgtctgaatagtattctattgtgtatatatactacattgtctttatccattcagctgctgatggatacgttggttgattccatatcttggcttttgtgaatagtgctgcaataaacatgagggtgcagttatcccttttttggataaatacctagtagtgggattgctggattgaatggcagtgccatttttattttttttagaaacctccatactgttttccgtaatgactgtgctaatttacattcccaccaacagtgtgtaagattccctttactccaaatccttgctagcgtttattttttgtctttttgataatagctattctaactggggtgagatggtatctcattgtggttttgatttgcatttccctagtgattagtgatgtcaagcattttttcatatacccattggccattttgtatgtcttcttttgagaaatgtctatttaggccctttgsctgctttttaatgggatgggttgttttctttgctgttgagttgttcacrttccttgtatattctggatattaaacccttgttggaaaaatagtttccaaatattttctcccattctacagcttgtcttttcactcttgattgttccctttgatgtgcagaagctttttcatttaatatagtcccaattgtctattttttgtttttgttgcctgtgcttttgaagtcttagccacaaaatacttgcatagaccaatatcatgaagcattactcttctgctttattctattaattttatcatttcaggccttatgtttaactctttaayccatttttagttaattttttataagatgacagacgggggcctagtttcattcttctacatatggatatccagttttcccaacaccatttattgaagagagtatcctttccctaatgtgtgttcatggtgctttctcaatcagttggctgtaaatttgtggatttgtttctgggttctcgattctgttcctttggtctatatgtctgtttttataccaatcccatgctgctttggttactatagctttgtagtatattttgaagtcacgtagcatgatgcctctagctttgttctttttcctcagtactatttggctatttgagatcttttgtgtttccatacaaattttaggattgttttttctatttctgtgaaaaaaaatgtcactggtatttataaggattgcattgattctgtagattgctttgggtagtatggttattttaacaatattaattcttccaatccatgagcatgggatgtctttccatttgcttgtgtcaccttcagtttcttttatcagtgttttgtagttttcactgtagagatctttcacttccttagttaaatgcattcctaggtatttttgttaaatactataagattgctttcttgatttctttttcagctagttcattactgatgtgtagaatatgttggtattttggtatgttggtatggtatgttgattttggtattttgattttgtatcctgcaactttaccaaatttatcagttctaagaggttttcttggtggagtctttaggtttttctgtatagaagatcatatggtctgcaaagaggggcaatttgactttttcttttcctatttggatgccttttatttctttatcttttgggattgctttggctaggacttccaggatacaggctgaaagcctttcccaattcagtatgatgttaactgtgggtttgtcatatatggactttattatgttgaggtatgttccttacatgcctaatttgttgagggtttttagcataaagggatgttgaattttaccaaatgttcttctacatctaccaggataatcatatgatttgtccttcattatgttgatgtgatgtgcaaatgttcaacatttgttgacttgctcatgttgaaccatccttgcatccctgggataaatcccacttgatcatgtgttatcttttcgaagtattattggatttggtttgctagcattttttgaaggtatttgtatctatgttcatcagggatattggcctgtagttttcttttttgttgtgtctttggtctagttttggtatcagggtaatgctgacttcatagaagtggttaggagtaattccctcctcttcaatttttttggaatagtttgagaagaaytggtgttaattcttctttataagtttggtagagttcagcagtaaagccatctrgtcctgggctattctttgttgaggagttttttattactgattcaatctactcactcactattggtctgttcaggttttctgtttcttcctggatcaatcttagtaggttgtatgtgttcaggaatttatccatctcctctaggctttccaatttgttcacatgtagttgttcatcatagtctctaatgaccccttttatttctgtggtatcaatggtaatgtctccttttttatccctgattttattttacttgggtcttctctttttttagtctatttagtctaagtagcggttcatccattttgtttatctttttaagaaaccaactttttattttgttaatttttagcctctattatgtttagttctgttctgatttttattatttctttccttctactaattttaggtttggtttattcttgcttttttgtttgtttttgagatggatttttgcttttgttgcccaagctggagtgcaatgacgtgatctcagctcactgcaacctctgccccctgggttcaagtgattctcctgcctcagcctcctgagtagttgggatcacaggcatgcaccaccacgcccggctaattttgtatttttagtagagacggggtttcaccatgttggtcaggctggtctcaaactcctgacctcaggtgatccacccgcctcagcctcccaaagtrctggaatttcaggtgtgagccactatgcctggcttttcttgcttttctaattccttaagatgaaccgttaggttgtttatttgaaattgttctactttttttgatgtaagcatgtattgcttcaaactttgctgtatcccttaggttttggtatgttgtgtttccattttcatttgtttccagaaattttttgatttccttttaaatttcttcatcagcccagtggttgtccaggagcgtgttgtttaattttcacgtatttgtacaatttccaaagttcctcttgttccattgtggtctgtatccattgtggtaagtatccattaagatacctgacagtatttcaatttttaaaaatttgttgagccttgttttgtgacctaccatagggtctatcctggagaacattccctgtgctgataagaatgtgtattctgtagctgaataaataatctgcaaatattcattaggtccatttggactataatgcagactaagtccagtattctttgctgaataaataatctgcaaatattcattaggtccatttggactataatgcagactaagtccrgtatttctttgctgattttctgtctacgtgatctgcccaataccaaaagtgagatgaagttcccagctattactgtattggcagtctctcggtctctgtttagctctmatatttgctttacatatctcagtgctctaccgttgggtggtcatacatatgtgtataaatatacatatacatatatatgtctatatacatatatacacatacttatatcctctggctgaattgatctcttgatcattaattataaaatgaccttctttgtctctttttatgtttttgacttaaagtctactctgtctgatataagtatagctactcctgcacacttttggtttccatttgtgtggaatattttttccattccttcacattcagtctatatgtatcttcacagatgcagtgagtttattggaggcagcatatagttggaccttattttttatccattcagcttgtctgtatcttttaactagagaatttaaaccgttgttaaattcagggttgttattgataggtaacaacttactcctgtcattttgttatttgttttgattgttttgtacattctttgttcttttctttctctttattgcctacctttccaattgttgggggttttgtaatgataacatttgactcctttctctttgtcatttgtgtatctgctctaccagtgagttttatacttttgtgtgttttcatgatggtagacatcatccctttgcttccagatgtaacactctcttaagcattttctgtagaactagtctagtggtgatgaattccctctgtttttgcttgtctgggaragactttgtttctccttcatttttgaaggatagctttgctgggtatcgtattcttgtctgaaagggkttttttttagcactttgagcatatcatcctattctcttctgacctgtaagttttctgctcagaaatctgctattagtctgaggagaattcccttatatgtgactttatacttttgtcttgctattttcagaattatatgtttgtctttgacttttgacagtttgactataatatgcctgcagaagacattttggggttgaatctatttgagaatctttgagcttcctgtatctgggtgtctaaatctcttgtaagacatgggacgttttcagctattacttcattaaatagattttctatgcctttgcccatctcttctcctagatctttccaaatttaaatatttggttactttatgattaccaatatggcacataggctttcttcactcatttttatttatttttctctccttttgtctggctggattatttcaaaagaactgtcttcaagtttagaaattctttcttctccttgacctagtctattgttaaagcagtgagttgtatttttattttattcattgatttcttcagtttcaggaattctctttggttctttttagcaatatctatctctttgttgagtttctcattcagagcataaattattttcctgatttatttgtattgtttatctgtgttttcttgtatcttactgaatttctttaatatcatggttttgaatttttcttaaccattgcacagatatcattttctttgggatctgtactaaagaattattgtgctcctttggaagtgccatgtttcccttgctttttcatgtttctgtgtccttacattgatatcagcacagctaatgtaacagtcacttctccaattttatttattgactttcatagggaaagacattttcctctgctgggcatgatggctcatgcctataatcccagtgactcaggaggctgaggtgggaagattgcttctggcaggagtttgaggttacagtgagatatgattgtgccactatgctccagcctaggtgacagagcaagaccctgtctctaaaaaattaaataaaaataaaataaaaaagatgttttcctgtagatgtgtctatagtgttggttgagtggagcgctttggctttgattctgtgtgggcacagttagtggagcctccacatgatttcattagcatcagtgttgtctgtgagctcctcagtggctgacagtgtagttgttaatggagtctgtggaraggctgtgctgggaacagggacatcaggcaggttggtcttcaagcaccagtggtgacagcagtatgccaggcatgctggtcctcaggcccccaggcagtgtatgtgggtgtcaatgctggtgtgtccaggtgggcagggtatcagacttcaagatgacatgttcgggtgccagtggtagcagcagtggactgaacaggcaggtccttgggcccccaggtggcttgtttggaagcggcagcagcaggccaaccctcaggccctcaagtggtgtacacaggcatcagtgatggcaagctgggtaggctggtccccaggcccttgggagacacatgtggtcactagtggcaggcagagtgggcccatccttaggcctctggatggtgtgtgcctgtgctgctggtggtaaagaggacgggttaatctcctggcccctgggcagcacatgtggatgctggtggcaggtggggcgagcctgtcttcaggttycctaatggtgtgtgcargtgctggccgcaggtgggacagtttkacccccattcccccagatgcgcacaggcaccagcaacaatggcaggtgaggcgatcctatcctcaggccctgggacagtaagcacaggtgctggtggcaggtggggcagttcaatccgtttctattgccagcggccatttgagtcacctccaggttggggctagtatgaaaagtgttactatgagcatcccaatcaggtctttgtggggcaaatggatgcctgccactcaatgttaagaccatttttggcttttacttgagttgagaaataccactgcctgctagagatccctgtaaccccagaatctagtgtctcatatctgcttctttgtcactggcagggtggctcctatggacggaaaacagtcttaagaggcaactccgatggtacscttgtcctcttcttcagtgacttaaaacaattccaggatcagaagagaagccaacgtgacatcctcgataaaactggggataagctgaagttctgtctgttcacgaagtggttgaaaaacaatttcgagatccagaagtcccttgatgggttcaccatccaggtgttcacaaaaaatcagagaatctctttcgaggtgctggccgccttcaacgctctgagtaagcattgctgggtgtcaggagagaaaagccaaagaagsgggtgccagacagctctgtgcaacctctaggccatgagtgggatagataccactgctgctttaaaaaatgggagaccatagaccctcaggagagaagaatcccttctaccctggactcgctctcttckctggaactaacttctcccccataccctgattgtctttggagaaaatgttctggattctagaatctaaggcagagccttttaagccatactgtacacataaatcacctggaaccttgttaaaatgcagatcctgactcaggaggtctgagttagagcccaggatttcatatttctagccagctccatgatgagctgctggtccgcagatcaygcttgcaggttttgaccagagtcagtgttggttagagtaagagratgaggcagacatctgggaaaagtccagctggggcaagcatttgaagtctgccttcctaccaggtcaaaatcaaggcaacgaccttccatagataactatcaaagcttgagggggtgccttgaacccaactcctaaatcccyaagacctgcccacctcttgtgtctcctgtctcagcaaacattcccacactcttgcatattgttaaagtaacctctgcttaccaggcttctggtttaataaaagatggctagagtgactccatcttaaagcaagtagctaggcactcaaaaggaacctacaggcttaatacttgggtctgaaaatagccacagtctaagctgaccaccaattataattgcagaatatttaaggccatacaaaacatctcccactaagcctacaaaatgtccaggtgtcctaaaagttcagcccacttaaaggcagcattaatgagcaggtttaggttgaaggattaatggtcatcaataccactgttaagaagaaaattcttggccaaattgaatttaatggagtttaactgagcagacaattcacaaatctagaagcctcctgagccagagtaggttcagagagtcttgaacacagccacgtggtggaagaagatttatggacaggaaaargaaaatgatgtactgaaaatgaaagtgaggtacagaaacagccagactggttatagctcagcattggccttatttgaacgagatttgaacagttggccacctttgattggccgaaactcagtgattggcacaagagtaggttgcagtctgtttacacatccttttaggttatagttcaccatgtacagagaaattttaggccaaacttaaaatatgtaaggaggcagctttaggctaaacttgatttaacagcaccaataccccctacctttagtgagcacatctgcacattccaattttaatgacagctccttagaatttcttatcaacgaagacactaacaaagaatggcgcattcctccttctcctttctgaggatgccctaccctgtaacaaagtcgtttctaataaatttgcttctttcaccatamtctgtacctgccttgaattcyttcctgcatgagatccaagaaccctctcttgggatctgaatcaggaccctcttttccagcaacgctatcacctgtaaaccaaaagtatctgagacaggtctcaatctatttagaaagtatatttgccaaggtgaaggatgtacccatgacacagcctcaggaagttctgatgacatgtacccaaagtgctcagggtacagcttggttgtatacgtggtatggtttggctgtgtccccaccaaatctcatcttgaattgtagctcccacaatttccacatgtcatgggagggacccagtgggaggtaattgaatcatggaggcaggtatttcccatgctgttctcatgataatgaataaatctcacgagatctgatggtgtcataaaggggagttcccctgcacaagctctctctggcctcccaccatgtaacatgtcccttgctcttccaccatgattgtgaggcctccccaaccatgtggaactgtgagtcaatcaaacctctttcctttataaactactcagtctcaggtatgtctttattaacagcatgagaacagactaatacaatacattttagggagacatgagacatcaatcaatgcaggtaagatgtacattggtttggtttggaaaggcaggacaactcaaagtgggggcttccaggtcattggtagatttaaagattttctgattggcaattgatggaaagagttatcatcaatagaagggaatgtctgggttatgatgataaagggttgtggagaccaaagttttatcatgcagctgaaaactccaggtagcagacttcagagagaatagattgtaaatgtttcttatcagacaagagcctgttctatcactaattccaaaagagagggaggtatcatgaggcatgtccagctcctccttcccatcatggcctgaactggtttttcaggtcaactttggaatgcctttgctgagaggagaggtccattcagatgactgggggkgcttagaattttgtttttggtttatatacctaagccaggattgtatctccagctcccccacctcctcactcacagcccatcamtaagtcctgccagttctgcctaacttgctcctaaatctgcatcatttctctcccttcccactgctacttccctagtcaacgtcaccaccagggatggggcaatggcttcctaattgtctccctgcctcctgtctcactccaccctgcagctggtgctctctttccatgcacaaatattgtgtcacacactctgcctctaatggcttttcactgcatttaggaagttgaccaaaaaggccaaactctgtaaaatattttaagaggttttttctgagccaaatatgaggaccatgacctgtgacacaatctcagtagttcctgagaacgtgtgccccaggtgattaggttacagcttgatttgtatacattttagggggacagaatttacaggcagaaacgtaaatcagtacacataagatgtgcattgattcagcctggaaaggcaaaatgtctcaaagcagggtcttccaggtcatagatggttataaagatttcctgattagcagttagttgaaggagttcagcttaagaaaaggggagttgtggaagacaaggttcttattatgtagatgaagcctccaggtagcaggcttcaaggagaataggtggtaaatgtcccttatcagaccttaaagatgtcagacgattagttaaaatctctcctgaatcaggaaaagatctggaaggggaaggggattctccacagaatgtgaatttttccacaggacacagctttgcagggccattccaatatatgtcaaagaaatatattttggggtaaaatacttttgatttcctttagggcctgttatctgtcaggtgatgccagagttaggctggaatttggtgtcatactgctacaaagagtctgttctgtcagtcttggggtctctattttaatgttagtgtttgtcgattgtgcctgaattccaaagggaggagggtataatgaggtgtctgagctcccccttcccatcatgacctgagctagtttttcaggtttctttgggggttccccttggccaagagaggggttcattcagtaggttgggaaggcttagaattttatttttggtttacaaggataaggatcaaactcctcagcaggacaggactttgatgatctggcagcccctacttacttacctctccagctgtaccactcaccaccaactaactctctatgcttcagccactctggccttccctgagctcctcaaacccacatgatgctagctcaacttgagactttggcctatactgttcctttgcctggaatatacttcccccagccttttatttttggataactccaactcatcctttaagtcctctggctctctatgtctgggttagatccactttccacatgctccagtagcaatttgtgctktctgaatcatgggatttatcactttgcaaaccccaactatctgagacaggtctcagttagtttagaaagtttattttgccaaggttgaggatgcgcacccgtaacacagcctcaggaagtcctgatgacatgtgcccaaggcgctcagagcacagtttgcttttgtacgttttagggagacctgagacatcaatcaacatatgtaaggtgaacaatggttcactccggaaaggcgggacaactcgaagcaaagtgggacaattcaaagtggggagagggcttccagatcataggtagataagagaccaatggttgcattcctctgagtttctgattaacctcttccaaaggaggcaatcaaatacrcatttatctcagcagagggatgactttgaatagaatgggaggcaggtttgtcctgagaagttcccagcttgacttttccctttaaccgagtgattttggggccccaagatttattttcctttcacaacttatatggaaataatgtatttagctttctcctctcctagactataagctccatgaggacaggtatcatgagtatcttgttcttctatggtctctagtacaatgttcattattaataatagttgttggttggatggatggatggagcatgatggataaatggatggaaggtaaatggatggaaaaatgaatgtagatggatggatggatagatagatattaaatatatgtatatatttatggatgaggtagatagatggatagtctcaagcacaaagtctcaagtacaggtgcacatataatcacaaacttaaataattccaggctgggcacagtggttcttgcctataatcccagcgctttgggaggctgaggcaagaggattacttgaggccaggagtttaagaccagcctgggcaacatagtgaaaccccatctctacaaaagaattaaaaattagatgtggtggcatgcagctgtattcctaactactggggagactgaggcaggaggatcacttgagcacaggagttcaaggttgcagtgagctattattacaccactatactccagcctggacaacggagcaagatcttgtcaaaagaaaaraaaaaaagaaagaaagaaaagaaaaggggaggggaggggaagagaggggaggggaagggaaaattcccaagctgaaacttaagccatcattaaacaaatggggaaacagaaaagcccaggtcttctaagcccatggccagagtaccttccatcacctatagttttaaggaatttctgggttaccaggaaccatgaagaacaattagcccaggcatcactgataaggaggagacatacagacatcctgataactcacattcacagaaaggtggcctggcttggggaaacatgtaccagtttgggaggttggcagttctgagttcttatcctggtcctactactcacttatgcctgccagctgtacagtcagactagaaactagattccagggccattaggatgctcagggttgggggtgggggcctgcttcaaacaagggctggagtcaaggagggagacaggtgcatcataattctcataggaaagtcctctcttcctgttccaagtgccatgctgggagacctggccagagcgccctctactgggttcaccccatcatgcaaggatggtgtgagaatgagaaataaactcttccccacatgtgctacccagaagctgccactagatggtggkaaagctgcacattccaaattattataagctcctttttctgcaaggaaacacagggtcactttctgagaaaagcaacctacaggggaattggtaacttgcttttygttttgttttgttttttaaactaaatattagcctaactaatctggcctatttttacaccaggtccaggctggctgtctccaattctgcatctctttccaccactgtgtgccactacaactctccccctagggcctttgacccaaagcaagaagtacctatttacttgactggctggtatttccattatcctcatctgtaaattagtaattgcaattgcacttgccagctaagagttttgtgaggcttgtatgtttcactgtacataaaaggcttagagtaaacacaccataaacgttagctatttattatcattatgggggaagatagaatgctctttccgtcaacctccctgcatgccaagtgcccagaaccatgcctagggagtcagtaaatatccactggggtgtatgaaaggaacaagctagctgctttctcctggtttcttatctaaatgtgtttatgggccagggagctggctcacgtctgtaattccaacactttggaaggccaaggtgggaggatcacttgaggccaggagttcaagaccagcctgggcaacaggcttttttttttctccaaaaaaaaagccaaacatggtggcacacgcctgtggtcccaggtactcagaaggctgagscaggaggatcacttgagccttgaaatatatttgagggtacagtgagctatgattgtgccattgcrgtccagcctgagcgacagagaagactctgtctctaaaagtaagaataatgatgaaacaaactcagtagtcctatagaccattttttgtttgtttttgtttctatttgtttggttgtttttttgtgggggggagggttgttttgttttttaatgaacatagaaattgacccttctgatcttaaagcttgaaacttacatttgttttatctaagttccttcctcagaaaaggaacctcagacctctcaaaaagtatcaaagaactgaaactcaccagtcactgcatccagacaatgggatgtcaaatcccttattcctcatgattacctccttacccctccctaattcccgttttcccacacatagttacatttcttccctgctatatagaaccctaactttagtctgtcagggagaaggatttgagactgatctcccatctcctcagctgcagcacctgattaaagccttcttcttggcaacacttgtttccgccattggctttctatgtggtgagcagcaggacctagactgaacccctggtgtttcagtaacagtaatcaatcaataaatgtgtttattttatttttatttttattttgagacaaagtctcactctgtcacccaggctggagtgcagtggtgcaattatggcccagtgcaacatccacctctyggggtcaaggagttcgcatgccttagcctcctgagtagctgggattacaggcacctgccaccacgcccagctaatttttgtatttttagtacagacggggtttcatcatgttggccaggctggtctcaaactcctggcctcaggtgatccgcctgcctcagactcccaaagtgctgggattacaggcatgagccaccgtgcctggctaaataaatgtgtttataaacagtggaactcagctagcaagaatggaaacccattgattaaaccagcccctgtccccagacctccagggccctgctgccaccttgcctgcctcctcaaagtccctgtaccctgacattctgaagtaaaatattcacaggatggactcaatgacagaatatattgcatgtaaaatataaactttcctttcttccagatgtatgctaactatgccaacacaaacaattttttaaagaacccacttgctccctactaatttggataattccctttctcgtttataattccatctcttgtccctccattaggttctgctgatcttgtcttgggttaacaccayactgttttcattacagtcagtttagactacactttattatctaatgggccaagtcacccttccctactatgttttatgtaaaggtacctgtcctctgaccgattaagcaagagtcgtgtgctatcaaactataactgaccttcattgtagagcaaccctggctctctaaaaccaggttacataaataacaacgttccaatttctgtttcacatcaggcttaaatgataatcccagcccctggatctatcgagagctcaaaagatcyttggataagacaaatgccagtcctggtgagtttgcagtctgcttcactgaactccagcagaagttttttgacaaccgtcctggaaaactaaaggatttgatcctcttgataaagcactggcatcaacaggtaattttccaactgtctatatatggttatcattcatttcctttttatcgagataattgacatccagtaaagtgcaacaatcttaggtatacagctcaacgcattttttacaatcttaccagcaacacccaaatcaacatagggaacgtttcgtgtaccccagaaggtgcctcaagcccattgtccccctagtaatcctcccaaacaaacccctattctaacatctattaccaccgcagattagttttgcttgattttaaacaaacaatgtaagtgggattatatggtacatacttcatgtctgcctyctttggctcaacgggatgtctgagagactcattcatatggttgcagggtcttgctctgctgcccaggctggagtgcagtggtgggatcttggctcactgcaacctgtctcctgggctcaagcaatcctcccatctcagcctcccaagtagctggaactacaggagtgtgccaccatacctggctaatttttgtattttttgtagagatgaggtttcaccatgttgcccaggctggtcttgaactcctgggctcaagctatgtgcccacctcagcctcccaaagtgttgggattacagacatgagccatggcacccagccatagtagcactttttttcattgttttcccatattcaattgtattaatgtaacacacatttatccattctgctgctttgggtcattttcaaattggggcaattttcaaatagatgattgggtcattttcaaattggggcaattatgaattaggttactatgggtatttccctacatgtctttttgtgaatgtaagcattcatttctcttggataaatatgtagcagtagaattgctgggctatccagtgcmcatatatgaatgttgtgtacatatatgcgtgtaaatatataaaatatatatgtagtttgtttttttgtttaaccatagcaaatcttgccgaatcatttccaaaatcttaccaaattatactcccatcagcaagatgtgagtttcaggcatattctcaaacccaactggggatctgcccacccagcgcagcaaagccaaacagactttgggattgcagtgagagagtgaagcatttattgcagggagccaagcagggagaattgggcagctcatgtttaagagccgaactccccgatggcttacaggtaagggttttaaaggtgaggggacagaggttacaggcaaagccataaatcaacacrtggaggctgtacattggtttgacctaaaaaggtgggacgtctccaagcaggagggaggaggaggatgggtggcgctggtcacaggattcaaagactttccaatttgtgatgggtgaaatgggcgaagctttatctaaaaatttcagatcagcagaagggaacgttagctctggctcgtaggtgtgacctcctccaaaaccctcaggaagaaatttagaacaaagaacgaggtcagggttcaatcctcagtttcccctcatctgaggtctacctgccagtggatttgcttggtgggggcctgagtttctgaaaatcaactcagggacatatgctaagatgttatctttagtttctatagggaacaaaacatcttttgactctaacttccttggctactgttttaagtgactattaccttcttttttgttgtttttgttttattgggttttttttcactgctcctgtagaccctgaactactgtatttttgcttatcgagttgctcattgacttttcaaggctagtaaggtgcctggaatttccctcgaaagaactccagattttcctttattttcatgcttgtgggatgggrgcagtgggtggcctgcagacacctaagagaggtccctgctccatcccagttgttccacatctttgtcaagacttggtattgtcagtccactgaactgtaggcattctagcaaaggacaatgacttcctgtagacctctggtttcttgatttcagatccctgacatggtaagaactagatccccnaatgagctgctaccctttccttatcccacagtgccagaaaaaaatcaaggatttaccctcgctgtctccgtatgccctggagctgcttacggtgtatgcctgggaacaggggtgcagaaaagacaactttgacattgctgaaggcgtcagaaccgtwctggagctgatcaaatgccaggagaagctgtgtatctattggatggtcaactacaactttgaagatgagaccatcaggaacatcctgctgcaccagctccaatcagcgaggtgccaagcttctcacaccctatccctgtacctcatcatccgcatgccaggcatacctctttggaatgagatctcagccttgccctatcaagccagtgctggaccagaagaatggcagccaccatgggtggggaggcagatgggtctgtctgaaagaggggaggtccagccagtgcttttcacattccaaaccatagtcacattttgtcccctaaacaaacactggagagacacttccccttatagaaggaaggagctaagagagaaaggggatggggggcaggaagaggagaccactttgttattttattaatagaatgtctctgtaaagcagcaaacccagggccagaggggcttgatgtcgtagacaaaatccctcagcagcttggaggagctgcaggaatccaaattcaagttgccggattcccactccaggcctctttccccaaaacagattttgcctcccacaagcagctcaactgactttttttaatctaatggaatacacaggccagtaatcttggatccagttgacccaaccaataatgtgagtggagataaaatatgctggcaatggctgaaaaaagaagctcaaacctggttgacttctcccaacctggataatgagttacctgcaccatcttggaatgttctggtaagagggttttccaaatacagggtgtttcatgctgcaggaaggtcttcctgacacccaggctaggtcttatctgagagtactctatattcgtttcctgtattgctgttacaaagttccacaacacagatggcttaaagccacagaaatttattctcttaccattctggctattacaagttcaaaatcagggtgttggcagagccaagctctctgcaggccctagggaagaattattycaggcttcctgcagcttctggtggttgccagcagtccttggcttgtggctgcatcactccagcctctgtccctgaggtcacatgcccttctccctacatgtcttcacatcaccttccctctgtgcatgtctgtcttatcatcycctcttcttctaagaacaacagtcatactgaattagggcccaacataatgacctaatcttcactagatcccatttgaaaagacactatttccaagtaacacacattcatcgatactgtaggttggaaccccagcatcttttagggagacacagttcaacccatcacacaccatcagggcaatgactgtgaagtgcaaaatggaacaaagagaaaggggggtacccraagatgcgagatctcaattaatttttgcaagagagaaagctggtgagcaggtggagacatgaaacggagcattgctcagagaagggggtggcagtcaggcctgtggatgccaggacaggctctgagctccgttcaggcaggtgccgggggcaacagtcagaagtgcggccgaaacaagagaaccaattaaggcaccagctgtgaaacaggtgcactggccttccccctcccatccccaaaaggagaagtaaatctgtcaacacaaactcccctgcatgctcagtgcttattagagaaaagccatccaagaagaaccttcccaggttagaccactgagccctctcagctttcctgggaaccgcactggagacaactrtattaattgaggccaaagaggccaatcaaattccacagttcacagacagattaatttatattcaagttatgggaggcggaatctataccccgtttgcacagaagtttgaaggctaactgagtaccaatctggcatgtaaatgaagatgtaaatgagtttagcaaacttcacagaggttggggagtctatgaatggggaacttccctaactggacccagaaggatcaggacgctctgagcagtcacccctgtgcccaccctaacccctactttcactggacccctggtctttgctctctgaccccaattttcccggcttcttcagacagattttttcaaaaaattatccccccgacctgacatcttattctgaagctttgaaacatttaaaaagttagaaaaatgattcagtaaactcctatgatcccctcacatagatgcagtacccatgtgcaacatttgctatgttacagtttgtgtgtgcacacgttattattgttgttgttayagttgtttttaatctttttttaagagatggggctataactcgctacattggccaggctggtctcaaactcctgggctcaagtgatcctcccacctggcctcccaaagytctgggattacaagcgtgagccacctcacctggcccattgttatagttgttgtttatactgagccctttgagagtagactgccagacatctctttacccttaaatgctttcatagggatctctgagaacaagaatattctcttcaataacctccatgccatgatcaaattcaggagactaggagtcatatattattgtcccaatacagcccattgggatgatttcgacagtcattccaagaagggcctttataggacattcttttccaacccagaagcacatgtggcatttagttccaaacatctcctaaaccatcttttgatactcactgtggctgtttttgttctgctatcccatcaacttctattttgagaactgtgagaccatccctgtctctgcagttgttgaagaaaatttaggcccaggaaccactgcataaggcggtccaaacattgggggctcatgcacacatacacacacacacacacgtacatgcatacacaaacatgcacacacacactcacacacatgcacacacatgtactcacaccatgcacacacgcacacacgcacacacatacatgcatacacacatgcayacatgcactcacacacatgcacacacgtactcacaccatgcacacacatgcactcacacacatgcacacatgcactcatgcacacacatgcatgcacaccatgcacacacatgcactcacacacatgcacacacatgcactcataccacgcacacatatgcactcacacaccacaaatattctgccctgtggaaggggcagtgttggcaatgaatattccttcaataggcaccgtcctcagcaactataaggccaacttacaacatctgagaacaaccaaggttggccttcaactttcaagctgwgtgcccttccccacctccaggtgagctagcccatcttgtctgtgttgccagcaaaagtacaatatttgtatagaacagtaattacttgcctcttactgctgttttaaaaaaatgccctaaacttagtggcttaaaacacatgaatttgagccaggcacagtggctcacacctgtaatcccaacactttgggaggctgaggcgggaggatcacttgagaacaggagtttgagaccagcctgagcaacataacaataccccgtctctacaaaaataaataaataaattagctgtagtcccagctagttgggaggctgaggcaggacgatcacttgagcaagggagatcaaggttgcagtgagccatgattgtgccactgcattcagcctgggtgacagaacaagaccctgtctcaaaattacttttgcaccaaccaaaaaatatatatatacatatatatacacacacacatatacacatatatatatacacatatatacatatatacacatatatgcacatatatatacacatatatacatatatacacatatatacatatatacacatatatacacatatatatacacatctatacacatatatatatacacatatatatatatacatatatatgcttcctcaccttttcaagctccttgaggttgtccaaatttcttggctcatggccccttcctccatcttcaaagccaatagcatagcatcttccagcctctctctctacttccaacatcacaccacctaactctaactccaacaccaccacactccaactctaaccctcctgcctccatcttataagtacccttgtccttataagcacagtggctcaygcctgtaattacagcactttgagaggctgaggtgggaggattgcttaagaccargagtttgagaccagcctggggaacctagtgagactcccatctctacaaaaaaaaaaaaaaaaaaaaaaawagctaggygtggtggcacaaacctgtagtcccagctactcaggagactgaggctggaggatcccttgagcccaggaattggagactgcagtgagctataatggcaccactgccccccagcttgggtgacagagcgagacactatttctgaaaaaacatgggttagaatcatgggttggaaggctacctrttgggttctatgctcactacctaggtgatgggatcattcatacaccaagcctcagcgacatgcaatttacccatgtaaaaccccacacatgtacctccttgaacctaaagtaaaagtggagaaaaatgtattaattaattcaattaaaaattaaaattaagaggaaaaagacccctgtgataacatcaggccaaaccaggtaatgcagaataatcctcccatctctagagacttaaccacgtgtgcttcagagggagcacagctgtgccaaaacctggactttgaactgttggcctccagaactgggagagaataaacttctgttgttttaagccacctagttgtggtcacttgttatggcagcctttggaaaccaacacacccgcacatggcgtgtttaaygcaggctgatacaaccttaagaaaggaatggatgtggtcatcagcaatctccaatacctacagcaaatgggaagacagggaaggaccagaggtgtaggtaaagcaaaaagccacaggtcattaggaagtgatgctccaactgggcatggaaaaggagtttggagttaggaacacgacagatctgtctggacaaggatccagatctctcctagggggaaggaggggcaactaggacagtttttgtgtctgtggggggtcttgtgtgccactccaaactctcaggtgtgttcttgggatgtatttgtgcaatgacaaaagacggaaaagatgccagcccacgagcaggagggcagttgggagaggcagggtagggggcccagtacaggcaggaaaagaagccttgggtgggcttacaggtgccactcacacttggggtcttccttccttccccagcctgcaccactcttcacgaccccaggccaccttctggataagttcatcaaggagtttctccagcccaacaaatgcttcctagagcagattgacagtgctgttaacatcatccgtacattccttaaagaaaactgcttccgacaatcaacagccaagatccagattgtccgggtgagcactggccyttctcatgtcttgttggaatgatgtaatattgggcattcctggaagggaggtaagtgggcattgtagctctccaggatccatctaccttcagaaacttgaggaagggaagccaggagttaagggaactaggacactagttttcaggggggttgtggatagactgcctaggtcattaacaacacaactttgattctgtattgtttttcttggagctgttggccgtccttggggctcttgggcctggagacacatcactcccgtctctgcctctgtcatcaccttttcttctgtgtcctcccccttctcttcttttctaagaacacttgtcataggatttagggcccagcctgatccagaatgatctcatctccaggtccttaactcagttacatctgcgaagaccctttttccaaataagggcacatccacaggcccccagagcatgtatttttaggggtccaccattgaacccactgcagattctaaggagcttagaatctccttctcctttgagtgactggagcccggcttgccccatcagctgagctagagatttagaggcttttgtcattcttgtccgtggctcaaaggccacggggctgacatgtttctctctgtttactggtcacacgaccagataaacgtgtccccgtggtcacaagaagggaaggaggaaaatgttattatgtacgcgtaaatttctgcgttgatgccagaacaaatctgtgcaactagagaagaggggcctgggaaatggcaccaatagccccagggcaatgagtgaactgtctcattgaaggtcactggagtgaaaacaggactgagtttctgatcagtgttagaattgtcaaagcatgtgctttctcctctccttcctgaaaccccattcacatgatagtcagtgaaaaataaaaggtatatgacacatcaaagaagaaaagagagccatcggcagataagacattgctttccatcttcctgaagttggttgaaggtttctctgcttaggccagaggaaggtgacacctagagattgtaaggaaggggctacagtctgagaggagccgccgaagcccacctcttaaagacaaaggtggcctgcatgaatgaagggggctggaacagggatgaattgaggatctgcatacaggaaatagaacataccctttcctcacctccttaacccatgtaatcaggcatttaatacccatggataaaataaaacatttttctctacagaaactaaatggaggagaaagaggaggaagaggaggagggagggaagggagaagccttaatggcagagacataaatagcccacaaagcctaaaatasctactatctggcccttttgcagaaagtttaccaaccctgtacctcaattatggatattcacccaatgatcgccagacctgcaggagaaaacacacatcaaagaacagatgagcaccttcaccataattattgcattccgctcgatttatttggttacaggaatccaaataaagctaaatatgtctttaggaaaatctttaggaaattgacctgagaagcaggtaacttgtaactagcccatcagttgttcatgtataaaaggcaggagaataattgccttgggaactgtattgtttaataactgcattatctattagtttgtaaaagaaaaccctttgctttggactcagccctcactgaaccctaacgcagaacttggccttggaaacagtgtcagttagcccaactggtgccagcccaygggggcacgggactcctcggttaaggaaattctggatctcaaccttcctttcttccttagggaggatcaaccgccaaaggcacagctctgaagactggctctgatgccgatctcgtcgtgttccataactcacttaaaagctacacctcccaaaaaaacgagcggcacaaaatcgtcaaggaaatccatgaacagctgaaagccttttggagggagaaggaggaggagcttgaagtcagctttgagcctcccaagtggaaggctcccagggtgctgagcttctctctgaaatccaaagtcctcaacgaaagtgtcagctttgatgtgcttcctgcctttaatgcactgggtaaggctccccagaccttagcttggaagtgatggtggacagaaggtggagggagagccacgtgacttgattacgggctctgaaaacatgtgccactcatgggtccctggccccagcaagtggcattagtcatggcagtaatacttcacacttgtagacaattttggtcccatttctcttttccaagcatggggstgygtgcctataatcccagtaatcagggagactgaggcaggagaattgcttgaacccgggaggtggaggttgcagtgcgagatcgtgccactgcactccagcctgggtaacagagtgagactccgtctgaaaacaaacaaacaaacacacaaacaaaacaagcagttgggctgggcatagaggctcacacctgtaatcccagtatcttgggaggccgaggcgggaagattgcttgatccaggagttcgagaccagcctgggcaacatagtgagacttcatcccaaaaataaataaataaataataaacaaagttagccaggcatggtggcacacgcctgtagtcccagatacccaggaggctgaggtgggaggattgcttgagcccaggagatggaggctgcagtgagctgtgatcatgccactgcactccagtctggggcaacagagcaaaactctgtctcaaaaaagcaaaaaacaacaacaacaacaacaacaacaaaaaaaaaaaaaaaaaaaaaaacaagaagcagcgcaccagatttagcccagggggcggtagttcacaaagtccagatcagtgtcgtcccagagatctttctgtgatcatgaaaatgttctatgtctgggttckacaactactgagagcttgacatgtggctacagcaactgaggaactaaatttttaattttcattccctttaatgaatgtgagtgcaaatggccacattgctggtggctgctctgttagtttaagtctagataatactttaataataccagctgcaccygtgtagaccacataatttttacatatctcattattctggagatgctccctgtgtcttagacatcagtcttttaaatatgctaatactattcasagtaatttccaagaattaaatcatatttgtcaaaaatgttttggaatctgttacttactatgtgtattaaagcaggatgtcaatctctccctcatgccaggtcagctgagttctggctccacacccagccccgaggtttatgcagggctcattgatctgtataaatcctcggacctcccgggaggagagttttctacctgtttcacagtcctgcagcgaaacttcattcgctcccggcccaccaaactaaaggatttaattcgcctggtgaagcactggtacaaagaggtaaggacagtcnttgttctgaccatggggttattatttttaccagtaagccatgaacattaagccctgttgcccacaatctcccatgctgagggctgagccactttggagaatctgcccactggatatctttacgaygttcccatcactaaccctattcatttgggtcaggcgttgatggcttctgcccatcaaagctgctacatgtggtttactttgccctcacactggccaaagaattctgcaggaatccaagtgaccttgcctacagagggtgggtggaagctgggattcacatgcccacacattgccaataggacttttctgcttcccggcgcacatgctctctctcagaaggcaggttgaagctgtaggtggaaccggggctgcattttctatacacccagctcacaggagcttgaacaactggtcagcccctragcccctactacaagtgatcctcaggcaggtaaccccagattcatgcactgtagggtgctgagcagcatccctagtctctacccagtttcccctcacttgcacacaaagtagcttctgaacatcctcatgacagtaaacatcaagcacgatatcagctcttcctgagatgcctcctttctgtgtccagctccctgaaatgtgaaaccaagaccaaactctgtagttttcatcccagaaaatcagagagctggcatggcgtgtcagaagacttggggctgtggcgtgaccttgagtgagtcactccacttcccgcagcttcaaagtcttcatctaaaatgcaggtcatgctgcctgcattgtggggaagattaggaatgatgtgggtaaatgcctgggcccatagctggcatgcagtgggtttctagtaaactgtagctatgttattgtcctaggaaggcatatatggtcaaaagcacaacaaagaaactcaaatgtgctgctgccaggtggactcctgtaggctgtacaatttagacatccaagctgcagagtgtgagcacaccagcacgacactgtgactcagttgccttgctgtggtccctgtgcggctctcactgagctcctaggctaaccagttcgtctgatgttcccactcttacctagtgtgaaaggaaactgaagccaaaggggtctttgcccccaaagtatgccttggagctgctcaccatctatgcctgggagcaggggagtggagtgccrgattttgacactgcagaaggtttccggacagtcctggagctggtcacacaatatcagcagctctgcatcttctggaaggtcaattacaactttgaagatgagaccgtgaggaagtttctactgagccagttgcagaaaaccaggtgccttcaccctagccccrtacttttcttaacctgattcccttgaacactgtctcagcaacctggattttcctctgctggggtcacgattcattccttgcatgacgggggaaagtgctagccaacagaacctgtcacagtctccagggataaaacctagcaggggcaggagaaaatgctgttcagaaaaaatagagmaggaaggttcaagataccacgtccctgagctgctttcatctaagaggtgttagagttggaagtgtgtccctaagaattaacgctatcattcacgggccgatttatcctgcagggtttttattgggttagggtttatctactctttcagaccttcaagaatagtaagaaatcatatccatctgcttagggccaccagcaagggacaaaaacaatggaaaccagaggaaaggaaagagagaaaataaaggagcrttgaaaaagaatagaggagaagtaagagagaaggagacccccggtgggttgcctaccctgggttcttggcaacattgtatttgattaaattatgtatcatattttagctgacatagcaaggaggagatatttagactatgccttcattatgccttcatgagtatagcaattaacagctttcaaaacgcttttggcaaatacaatttaattctaggaagttgctttggttttggcttttgtttttgtttttgagacagagcctcactctgtcacccaggctggagtgcagtggcacaatctcagctcactgcaacctctgcctcccgggttcaagctggttctcctgcctcagcctccgaagtagctgggactacaggtgcgcaccaccacgcccagctaatttttgtatttttagtagagatggggtttctgcatgttggccaggatgttctcgaactcctggccctcaagtgatcctcccacttcagcctcccaaagtgctgggattacaggcatgagccactgcacrcggcctctagaaagttactttgaaccctactagtaaatttgagttgctgacatctaagctgtaagaacacattgtcttattgctgaaagtattataggatggaccccaaattctgaagtcactgggatttggaatctcctaatgccttctaacctctcattcaggcctgtgatcttggacccagccgaacccacaggtgacgtgggtggaggggaccgttggtgttggcatcttctggcaaaagaagcaaaggaatggttatcctctccctgcttcaaggatggkactgsaaacccaataccaccttggaaagtgccggtaaaagtcatctaaaggaggcgttgtctggaaatagccctgtaacaggcttgaatcraagaacttctcctactgtakcaacctgaaattaactcagacacaaataaaggaaacccagctcacaggagcttaaacagctggtcagccccctaagccccactacaagtgatcctcaggcaggtaaccccagattcatgcactgtagggtgctgcgcagcatccctagtctctacccagtagatgccactagccctcctctcccagtgacaaccaaaagtcttcagacattgtcaaacgttcccctgggttcacagatctttctgcctttggcttttggctccaccctctttagctgttaatttgagtacttatggccctgaaagcggccacggtgcctccagatggcaggtttgcaatccaagcaggaagaaggaaaagatacccaaaggtcaagaacacagtgattttattagaagtttcatccgcaaattttcttccatttcattgctcagaaatgtcatgtggytacctgtaacttgaaggtggctacaaagatgactgtggacgtgggttgcactggccacccaaggatgtctgccacacctctccaaagccctccctacctaccaagatatacctgatatattccaccaggatatcctccctccagatatacttggttctctccaccaggttctttctttaaagcaggatttctcaactttgatacttactcacatttggggctagacagttctttgtttggaggctctcttgtgcattgtaggatgttgagcagcatctctggcctgtacccagtagatgccacccagttgtgacaattaaaagtgtcttgagactttatcatgtgtcttctgccctaggtgagaacccttgcactagaggaaccctacaccccaaccctggggggaatgtagggaagaggtggccaagccaaccgtggggttagctctaattattaagatatgcattataaataaataccaaaaaattgtctctggcaatagttaccttcccagatacaggtccccccttttttcccctaactcttttaagcaatgattgtaactattaggagacattgctctcccacgtatgtttttctttttagacaatgcagacaccaggaagttgtggagctaggatccatcctattgtcaatgagatgttctcatccagaagccatagaatcctgaataataattctaaaagaaacttctrgagatcatctggcaatcgcttttaaagactcggctcaccgtgagaaagagtcactcacatccattcttcccttgatggtccctattcctccttcccttgcttcttggacttcttgaaatcaatcaagactgcaaaccctttcataaagtcttgccttgctgaactccctctctgcaggcagcctgcctttaaaaatagttgctgtcatccactttatgtgcatcttatttctgtcaacttgtattttttttcttgtatttttccaattagctcctcctttttccttccagtctaaaaaaggaatcctctgtgtcttcaaagcaaagctctttactttccccttggttctcataactctgtgatmttgctctcggtgcttccaactcatccacgtcctgtctgtttcctctgtatacaaaaccctttctgcccctgctgacacagacatcctctatgccagcagccagccaaccctttcattagaacttcaagctctccaaaggctcagattataactgttgtcatatttatatgaggctgttgtcttttccttctgagcctgcctttctccccccacccaggagtatcctcttgccaaatcaaaagacttttccttgggctttagccttaaagatacttgaaggtctaggtgctttaaccycacataccctcacttaaacttttatcactgttgcatataccagttgtgatacaataaagaatgtatctggattttgtgcctagttcctagcacacagcttcaaaaattctagagtttcctgataggagtgtcttttgtattcataacaagcccttttcacccatscctgggtttatgctaacaaggttacccatggtgggcccttagtttcaaggaaggagttggccaagccagaaagaccaagcatgtggttaaagcattggaattttcagccccatcccacccccaatctccaaggaggtgatggggctggaaattgagttcaattttaacatggccagtgatttaagcaatgctgcctatgtaaagaaaccccaataaaaactctggacagtgaggcttggggagcttcctgattggcagacattccaatgtactaggaaggtagcgcatcttgattccacagggacaaaggctcctgagctctgggcccttccagtgcttgccaccctacatactctttgtctggctcttcatttgtattctttataataaaatggtgattgtaagtagagcattttcctgagttctatgagtcattctgcaaattatcaaaactgaaggaaagtcatggaaactcccaagtttgtaaccaagtcggacagaggtgtgggtagcctggggaccccatgtatggctggagtctgaaagaagggtggacttggtgaggaccttgctctttaaattgtgggacctacacacattccaggtagtcagtgccagacttgacttaaattgcaggacagtcagctggtgtcacagattaggtgttggaatgcaccactactcttgtccaggatgcaggcaaaagaaatatatatgaagatgttgaaaaatggaagaatacaggaaacaagcatgagaagaaaaggcaaaaataatttttaaaaagttttttaaatgataaaaaacatttaatgaaagaatgaccactttaagtacacatctactcagtctacaactagttaccagggccttctggatgcccaaacttgcactagatacataggcaggaaacacggaagcagaaactgtgagacgctgtccccatcctcacagggcttggctggaggaactggaacacatagccctaaatcccttaaagaaaaatgaagggccaggcttgatggctcacaccagtaatcccagcactttgggaggccgaggcagacagatcactagagattaggagtttgagaccagcctggacaacatgatgaaactccacctctactaaaactacaaaaaattagctgggcatggttgcagatgcctgcaatcccagctacccaggaggctgagacaggagaattacttaagcctgggaggcggaggttgcagtgagccgagatcgcgccactgtactccagcctgggcaacaaagtgaggctccgtctcaaaaaaaaaaaaaaagaaaagaaaagaaaagaaaaatgaagggcagtttaccacacgtgccaagtgagatgtatatgatgagaaagaccataaagaaaaaggtgagctgctcaaagccatacaaatgcagaacaggaccatttcagtttttctcatcaatgtcttctcagcactcagtagacatttaaattcattaagagcaaagagaataaaatgttcacagtaatcaagaaacatgcagtcatgggtcactactggaagtagctagggcaccaattctttctaagaaaattggcaacaaatggccctgaataggcaataattaaacccggcctttcttatacaaactgtatttcaggattaaaagagcagccataactgacgaggaaattttattattttttttacggaagaattccatttaataaatgtttaaaagatgacaaattagaaacatcatcattttgtaaccgtaataggtttcttgccctatgcacacagcaagtcaataggctgagacaccaggttgcagcagacaaagaggtttcattgtagggctgccaaatgcagagataggaggaaacctcaaatctgcctccctgaagagttgggggctagggtttttaagggtttgggagtgggccaaagtgtggagatcgttgattggttgaagagtgcagcgtgaagtcatgggacaggragaggaagaaactgtgttctcatagtactgccgactcagtgcctctgttggggtcttcaaactggttgccatcagctgttctgctggaactcaggatcagaagaacatcttaagcaattcttaaacagaagccttatgtttttttttgtttgtttktttktttktttttttgaggcaggggtctagctgtgtcacccaggctggagtgcagcagtgtgatctcggctcactgcaaactccatctcccaggctcaactgatcctcctacctcagcctcctgagttgctgggactacaagcacacaccaccacacccacctaatttttgtatttttttgtagagactgggtttcaccatgttactcaggctggtcttgaactcctgagctcaggtgatctgcctgcatcggcttcccaaagtgctagaattacaggtgtgagccaccgtgcctggccaaaagccttatgattctaatgtcagagatcctataggaacaatggggatgtaaatggtcagtatctagtgctcctgccattcagttacaaggaagtggaccaaagtgcagcatgattaatgcttaattacaacaatatttctgtccagaattcacgttaaccctatgaggatggctttaattttgcaacctacaataaaataaatgatttaggcagagattatcaatgggtgaaaccattagatgaaatgatggggaaggctataatggggtggggggatgtcacctcccaaatccacagggtttatttttatttttttatttttaattttgagacagggtctcactctgttacccaggctggagtacagtggcacaatcacagctcaatgcagcctcaatctcccagactcaaatgatcctcccacctcagcctcctatgtagctgggaccacaacagcacaccacgacgcctagctaattattaaaatttgttagtagaaacggggtttcaccatgttgccagactggtctcaaactcctgatctcatgcaatcctctcacctcagcctcccaaagtgctggtattacaggcatgagccaccattcctggtaccaaatccacagtttaatctcagtgttagcagaagggacagccaaacatggtgtgcctccaggcatgagacagtacagagcacacagcacaatccattatgtgttcttgccaaatcaattttttaaatttgacaccaacattggctacgagaaacaaaacaattgagttagcaaattccagagaaaatgtataggccagacagacttcaaagaaagagaacaaaatatggagaaaccaggacagaaatgtggaagggtgtgcattctcctaaccacaaaagggaaacgagccaagaacctaagaagaatccagttaagcagagttcaaggtcaagaccccagacctatagttcgaccccggttaccctagcaacaagatccccacttacatcaaaggaaggaagcaatgattagacgcaggaacgctcatggtgagtggccaatggcccagggggcagtttaggaagagtttgagtgaccgaccacgaacaaggtcaccagtggggagaggttgtggataaaaggagcctgcatgctggagggcttcggctgctctgacccgaggctcctccagctgagcttggtcagattgcagcaggtaagatgctatcactcctcggttccattcactggcaccagtgcctgggataaacctcagacaggggaaaggtgaggaaggaagctctcctttgcctggtactgccctatgtgagttgggctgggtgcactggagtgttgtgtagacctggagggaagaatctggtaaggagagcaggatatgaggatcccagcaactcagcccaaccaggagggtcccatccaagcaacagtgtcccacatgctcatcttggatggagttcctcaaagaggtgccgtatccaagccagcgtcccttggttgtagggccaggctaggaattgcagagggaaactcgtcatgttcctgagggaatgaggatgtggggctccaattggcagggcagggagttattggcaggaaaaggggaaaagctcagctttggggcaggggtggttacaaaataagatcctttgccaaggctcagccaggagaaaaaggctcacaaagggcttaactgaagccctggccagaagggaaaagatcccaaagttgaaagagcaagataaaaaggccttggcatacctgtgtcctggttgagggtcttcagggttctttagggcccaaggccgaaggtggcagagtctacctagaactatgctttgtgatgttctggggaaaggctttcgacttgttggctatgctattcagtatggctatattgtgcttttgaatacattggtggtgttgttatgtgttctggaccaccaacggagcctaccattcaaaattcagatattgtctttgcagaaaatcttggtgtacatttttatggtattcaaagaggtgacattgtgattgcaaaaagcccaagtgatccaaaatcaaatatttgtaaaaaagtaattggaaggagacaaaatcctcgccactagtccatcagatttctttaaaagccgtagttatgtgccagtgggtcatgtttggttagaaggtgataatctacagaattctacagattccaggtactatggacctattccatatcgactaataagaggacgaatcttctttaagatttggcctctgagtgattttgagtttttacatgccagctctaatggccacagattttctgatgattggtaagcatttattcttttgacttgattattgtctcctattcatttattactcccattaaaaccatgtacttaccaataaactatttgctattcagaaaaacaaaaaaaggcacagtggctcatgcctgtaatcccagcactttgggaggcttaggcgggtggatcacctgaggccaggagttcaagaccagcctgggcaacatggtgaaaccccgtctctactaaaaatacaaaaaaaaattagtcaggcatagtggcattcctgtaatgccagctacctgggaggctgaggcacaagaattgcttgaacccgggaggcagaggttgcagtgagccaagatggcgccactgcactctagcctggggttatagagtgagactccgtttgaaaggaggatttggccaggatgatggctaggataatggaagaatggggtggccagccggtgaccactatgaacttgaagctcaattccttctgacagcaggagagaaaatgccactaaacccatgggaggcaagaaggggtacaggagagcagaggaatagccccccaaagatgtccatatcctaattgaaagcaatggcaaaaactgtaattacttttgcacaaacctactaatcacatgagtccttagaaacagagaccctttcccagctgaaggtagagagattcactggagaagaggcaggagacaaacctgagctgctgtcactggtttgaagatgaaaggagccatggatcaggaaacatggcaccctccagaagctaagaacagccccagccaacatctagcatggagacagggccctccgccctgcaaccacatggaacagaattctgcccacaagagtgagtctggaagcggattctccccagagcctccagaaaggaaggcagcccagctgtcaccttgattccagcctggcggggctcagagcaatcacccacattgcttggtttacgaccccttcctggcatcaccccaacctctcaatttcctcatcacatctactactactgacacttatgtcttgtctccctcgtataaggacccttgggattacatcaaacccaccagcataatctccccctgcaaaattcttaacttaatcatatctgcagagtcctttatgccatataaggtaacatattcacaggttctggggattaggacatggacattttgaggaggtaattattcagtctaccacactgggtgtattagtctgttctcatgctgctaataaagacatatctgagattgggtaatttataaagaaaagcagtttaattgacttacagttctgcgtagctggggaggtctcgggaaacttgcaaccatggcagaaggcacctcttcacagggcggcggcaggtgagagaatgagcgctgaccagaggaggaagacccttataaaaccatcaggtcaggccaggtgcagcagctcacgcctgtaatcctagcactttggaaggccaaggcaggcggatcacaaggtcaagagatcgagaccatcctggccaacatagtgaaaccctgtctctactaaaaatacaaaaattagctgggcgtcgtggcgtgcacctgtaatcccagctactcaggaggttaaggtaggagaatca

SEQ ID NO: 95782 - DNA, 95011 bp, Homo sapiens
  misc_feature (1)...(95011): n = A,T,C or G
aaagtgaaactggcagttttttaaacagtgaatgtgttacattaattgttactagtacagtaattgtacagtactattgctttacagtattggtgcaaatgtcaaagtggaaaaaaggcagataatatcttagtatcataataatagttcaagcatgggctgggctcggtggctcatgcctgtaatcccaacactttgggaggccgaggcaggcagatcatgaggtcaggagatcgagaccatcctggctaacacggcgaaaccctgtctctactaaaaatataaaaaattagcagggcattgtggcacgtgcctttaatcccagctactcgggaggctgaggcaggagaatctcttgaaccctgaaggcaaaggttgcggtgagcagagatcacgccactgcactctagcctgggcgatacagcaaggctccatctcaaaaaaaaaaaaaaaaaaaagccatactttaaggatggtagattgactgcctgaaaacatctcagggattgcccaggtgtctgtagactatagtttgaggttaattttcttcatccctgctaaaatgtaaatttcacgattgcagggattttaatctcttgttcactgatatgcctccagggcctagcgcatagtaggcattcaataaatacttatttaattatttagttaacgaagttaatcagaattagatcatattacggaagagctatgttctccattattggaaacacatttttaaaaatttgtttttggatggataaaaaatacaacaggagacatggtgaaaattctcccactttgcttcccccaaagtacttaagttccttcctgagaggtaaccactgttatcagtttcttccacatttttccagtgatattttatggttcacaaacattacatatacrggcatattcctttctctccttacaaatatggtggcatactatatacatatgggctgtgacataccctttaataagtaaactttttcttttggaataattttattttataattttattttatttatcttttttagaggcaggatctcactttgacaccaggttagaatgcagtggtgcaactatagctcactgcagcctgaaactcctgggctcaaacctgcctcccacttcagcctcccaagcagctaagactacaggcacatgccaccacccctggctagttttttactttttttgtagagatgggggtctttttggctgggtgtggtggctcacgcctgtaatcctagcactttgggaggccaaggcatgcggatcacaaggtcaagagaccaagaccatcctggccaacatggtgaaacctcgtctctattaaaaatatattttaaaaaattagctgggcgtggtggcgggcacctgtagtcccagctactcgggaggctgaggtgggagaatctcctgaacccgggaggcagaggttgcagtgagccgtgatcacgccattgcactccagcctgggcgacagagcaagatgccgtctcaaaaaaaaaaaaaaaaaaagagagagatgggggtgctttttttttttttgagactgagtgtactattgcccaggctgggagtgcagtggcannnnnnnnnnnnnnnnnnnnagtgcagtggcacgatctcggctcactgcagactctgcctcctgagttcaagtgattctcctgcctcagcctcccgagtagctgggattacaggcgtgcaccaccacacctggctaattttttgtatttttagtggagacgtggtttcaccatgctggccaggctggtctcgaactcctgaccccgtaatctgcccaccttggcgtcccaaagtgctgggattacaggcatgagccaccgcacttggctagagatggggtctttctgtgatgccaaggctggtctagaattcctggcctcaggtgatcctcccacctccaccacccaagttgctgagatcacaagcatgagccatcacaattggccttggaataattttagattacaagaaagttgaaaagatagtacagagattctttttttttttttttttttttgagacggagtttcgctccttgttgcccaggctggagtgcaatggtgtgatcttggctcactgcaaccttcgcctcctgggttcaagctattcttctgcctcagcctcctgagtaggcgggattacaggcatgcaccaccatgcctggctaattttgtatttttggtagagacggggttctccatgttggtcaggctggtctcgaactcctgacctcaggtgagctgcctgccttggcctcccaaagtgctgggattacaggtttgagcaatcgcacccggccctgtacagagattcttgtatactctttactcaacttccactaatgttaacatcatacattaccatatggctatgtcaaaactgagaaattagcattgttataataccattaactaaattacagaatttatttatatttcactaggtatgcccttttggttctaggatccaattcaggataccacattgcatttagcgtggtgcttcttttttttttttttttttttttttgagacagagtctggctctgttgcccaggctggagtgcagtggtgcaatcttgggtcactgcaaacttcgcctcctgggtttgagcaattctcctgcctcagtctcccgagtagctgagattacaggtgcccgccactatgcccagttaatgttttgtatttttagtagagacagggtttcaccatgttggccaggctggtctccaactcctgacctcaagtgatcggcccacctcagcctcccaaagtgctgggattacaggtgtgagccaccgtgactggcctcgcatggcgcttcttattcacttaaaatatatcctggagattgtttcatatcagttaatatgcagttgtctcattagaaggactacagaatgaattcctagaagtgaaattgcaggagcagtgattatgtgcatttaaagattaccaaaccctctcccttgaagaaattaccagacccttgycyggtgcagtggctcacacctttaatcccagctctcagggaggcagaggcgcgaggataccttgagcccaggagtttgagacctgcctgggcagtatagcgagaccccgttctccacagaaaggggggaaaaaagacaaaaaaaaaaaaaaaaaaaaaagaaagaaattaccagacctttttttggagagggggaattgtctttttgtggtttttctcttgagacagagtcaccctctgtcacccaggctggagtgcagtggtgtgatctccgctcactgcaacctccgcctcctgggttcaagcgattctcctgcctcaacctcccaagtagttgggactacagcgcacgccaccacacccagctaagtttttgtattttagtagagtcgggggtctcaccatgttgcccaggctggtctcgaattcctgagctcaagcgatccgcccgcctcggcctcccaaagtgctgggattacagacataaatcagggcgcccggcctggacccttctaactggtccccctttgagtattccaagtttcttcacattccaagattaggattggacagtgataatgtaaagtgctcaaaaagtttttgcactcttcaaaataatttttttaagtctactggcacaaatacatatagcattgcgtgatttacattacaccaataattccttgtaccatgacctacgtatatggttgagtcctcttaggaccactagggggctctgctagaagggtttatataatttatgtcagcccacttaggggaaatgttttgagatgatattttcgaattctgaactcttaaaacttgagagagataatctaatccagttttctcgtttcgtagatgaggaaataaaagctggcaagagaactgccatgggagagaactggaattttaaaatctcctcttggttcctggggcgggagtttaagaaattctcttttgccttgtgcccccactgattcgcctccattggctatttccatgtttgccaccacaattttaattacttttggtaaaaccatgtatttgtgatatttttataatagatattttactgattggctaggtgaagaaagtgcatgaagtataaacttctgaaatgacacccttattacttattccaaaatgttctattcaaaatgcttctcagtaccaaaccattattactatgcaccttagaaaccactttcttttttaaaaattattatctttagagacaggatttcaccatagggcccaggttggtctcaaactcctgggctcaagtgatctgctccccctcggccttccaaagtgctgggattacaggcgtgagccaccgcgcccgaccagaaaccactttcttttgtttgtttgttttttgtttttttttgagacggagtctcgctccgttgcccagactggagtgcagtggcgcaatctcgctcgctgcaagctccgcctcccgggttcacgccattctcctgcctcagcctcccgagtagctgggactacaggcgcccgccaccacgcccagctattttttttatatttttttagtagagacggggtttcaccgtgttagccaggatggtcttgatctcctgacctcgtgatccgcccgcctccgcctcccaaagtgctgggattgcaggcgtgagccaccgcacctggcccagaaaccactttcaaacttactttccacttaaaatattttatactttttgttttgttttgttttgtttgagacagaatcttgcactgtggcccaggctggagtgcagtggcgcgatctcgctcactgcaacctccgacccccaggttcaagcgattttcctgcctcagcctccagaatagctgggattacaggtgcctgccaccacacctggctgatttttgtatttttagtagagatggggtttcaccatgttggccagactggtctcggactcctgacctcaagcgatccgccgcgccagcaaaaacgttttagtcttatctgtactcatttactcattcaatatttattgagtgcctactatcaccaggcacctttgaagcctaggtttacagaaataaggctccccctcccccaccccgagtcccctgaagggtactgtaattgtttccatttctccaattttcactttaatatatgtgaattttcacatgcttcattcagttcagtggttctcatgtggtcccggaaccagcaccaacagcagcagcaactgggagacttgttagaagcgcagtcttaggcccaccctacactctagggatgggcataggagtgagtgtgtgtgtgtgtgtgtgtgtgtgtgtgtgagagagagagagagagattgtgtgtgtgtgtcaagctcggtattaaataggtcaaagagcaacatctggcttctaaacccaccctcaggcctctccaccgagtacctgtctcaaacccaatctgatccaacaataaccagccttaattcaataatctgtgctacctgagatgatgggaataatcgtggtactataaatgttgcagaacaaaaacgactgcagtagattttctggggctacaccaactgaaaatgggccggaccgagatccgggagagcgttttcctgcgctagacacggcgttcagcctccgggttccgggtctagctgagtcagggcggcgttccagccgagtgcggcgtcggaaacccgttcggttgcgcccgaaccttcggtcagaggccagcgctggaagcccagaccacagcacccgggtttaaacaggagcggaggcgccgggaagggccgggggggccggctagggccggccagcttggaagccgcaccctcgcggccccagacgccggcagggcggagccacgcggccgcagccccagccgagacgcgagctcgtggctcgggcgtatgggggctccaacgggagcggctgcgccgcccggccgggtcaacgtcgtgcgcatgcgccgacccggcgccattttggtggccgggcgcggaggtgattccacactgaggcgagcgcggcggccggggtggkagyggcagtgttcgtgtgctcaggtctgaatcgccgagggaggaggcggtggaggaagaggtggcggcggtggcggtggtcgtagcggtggcggaggaggcgggtacgaatcagctgcgggcggagacatggccaacatcgcggtgcagcgaatcaagcgggagttcaaggaggtgctgaagagcgaggaggtcagaaatgaactcccggatatcccccacctctgcctggggcgggagggtcctcccagctgcgaccccgatatccccggtagtccctgggtggtcctccttgcggccgcccttctgcctgtgaggaagcagcagtgttcccctcctccttccgccgccttcncctcccctcccagagcgctaggatggacggtctcgcgggcgggtggtctggggtggaacatggtttggggagrtgatggacagggggcaactcctcggagggatggaagctcacaagagaacccgaggcggtggccgcagctggaaatgtggctgtggggtggggagggagcaggccgagcctgagaaaacccgggaagtgggttgggggaaggggaaaggtggtaactggatcccaagagcagtgctgctcgaaggcccacacttttgagggtattcggggttattgcctgtcaggccttcactgttcttttcttggggaaggagcagtgagtccttaggtattgattaaaaaggaaggacattcagagttagtccttcttagttgggtgttaggagtcaaagggagacataatagaatactgtcttatttggtggcaggggtaagggaattttcacctgagttagcaagttaattccaaataagataattatctcttttccacttaacccccaaattcstaggcctcatctttattgacatctcaatcttttgagtgggcaaaggcaaggtgtttggtgtattaaagacatgtaaatatttttagttaggaaacaaataatggaatgtatgagtagcttatttcaaaatattgtttacaagttacagatcagagagactgtcttaagacagtgcctctgtgactcgtgttgtgccacgaaacttcattatgatgtccctcatagttaacttgattcttacttttgaaaagcagacctattaaaaatgtgaaatttcaccagattaatacattgtttcatctccttattgagatttatcacgacttaacagattttcaaaaaagttgcctcccgttgctcttaagtcctgcagaatttagatacatttgtactacgtttatttatgtaagatattcacagtgctctagtaatttgactcaaaattatgcaagtattagtacagtttctcataccaagatcaacaagaatgccagattgtcttccccacatgaattaaacaaaaagtaatacagaaaatgattattttcaagattcacataccattattgaatatatcattgctatttgtgtttttcttttacagttagtactttaatagtgtcaataataatttgtgaaattcagcattctaagtatgtgatgagtatacatggagaaaaaattatttaaaattcaaaaatgacaacagacttattgaaagtagtatataagtcatggtcggttttacagagcatgtgtatgaactctgacctctatgtttgttcatatgccaaaactctgaatggaaggatgactttgtattttgtggtacaatgcagaaatagagtcataagtgtctgtactgatacaatgaaacagcaattttaacttatttaatatgaaaatgtattccaggttagttgacatatatactcctaatgaaagcagttgttgttgccaacaactgaaaacatttcttgtttaataaggttgtacaagcctgaaacttaatagacttttaatgctttattttctgttacttacggtaacagaaacagtaagttactgctctggtaattaatgtggtctctttgctttttatgagctgacttttcaccgtggtattcttagtactaagttgaagattaccagaaatacttgtattgctctctagtaatgcatattaaaaaaacactgctctttatacgtaagggatgttgaagccttacttcagataagcatcaaaagtgtttcagaagaagaaaacaggaaatgcaaacagacaggttttttgttgtttttgttgtttgtttgttttgttttgttttgtttagaacagtacctgtataaatatggaaggaaacttctgggaaaataagttgsaaagaacatttmggaaagggtcacatcatttaatcttggaataaatataaccaataaatagcttattttcaccagtattttttgatattttagtagccccagttctataagtgtattgttattttcaactcattgaagacttgtagtatagtccatgtgtttcctttttaagggtgtaaatacagtcttttgaatggctgatcaaataaatgtttcatcatgtcacttttttggtaaatcagcactttaccgaagtttatttcatgtgtttgtatgcttgtgtttactaagaacactggttgatttaaggactttttggggtggccttataagagcctttgtaaagatagctgacgcttactggattctggttatgagagattataagtggccgttcttagagtgtgttaaaatacagccaacaagataaatgtgaaaaagcaaggtgcagaatagtgtggaagaggccaccatttgtgtcaaaaagaagggcatgtgtgtatttgcctgtatgggtaaaaggtttcatgagaaattggtaaaattgattgctttctgtgtagagagttgggtgtctggggtatagatattttttgaattttgtgtcatacaaatgtgatttacttaaaggcatcatttggcctctttcccttaagacagtgtttggaaatttgtcagatgtttctttttattaattaatatttattttctttgttttagatgtttgtttttaaatatgagtgtgaattttaagtagttttaaataatattccaaagttgttaggcatggaatattgatgtaaagtacattttataattagttattttatgagtaggattacataagtaaattattaattgtgaggatataaacccataatcaatgttttattcataagttttattatttactattagttattgctgctgttaataactagctgccatttgtagaatggctagttgttcttagtatcatttgtttttacgttattgctaattcttaagmacagttctttagatgtcctatttcctagatgagaaaatagagatttagagaagttaaattatttgtctgcaatcacagagcctgggatttggatctaggtctgcttgtgttcatattgtcccacgctgtcatgacttgctaaggataggcatgcttttaattaatttaaaaaatcgagcctggtttgtattactggttaaaggatttaaacacagtttaatttgctagtttaaactcattgaaataagtgttacctataattaactttaagatgtacttgaatttctttctttcatgtttttttttttttcttttaagaaggaatctcgctgtctcgcccagactggagtgcagtggtgcgatctcagctcaccacaacctctgcctcccaggttctagagattctgccgccttagcctcctgagtagctgggattacaggtgcccgccaccacgcccagctaatttttgtatttttagtagagacgacgtttcaccatgttggccaggctggtcttgaactcctaacttcaagtgatccgcctgcctcaacctcccaaagtgctggggttacaggcatgagccaccacacccagccagatttacttgaatttcaatataccaaatattttaaaatttgaaacttaatgaaataaaacacccttaaatcagtgcactctcttgttggtcttatgctatatggcacctgttggtttttcatgttgtaattgcactttggtaacattttcttttcttttcttttctttttttttttttgagacggagttttgcttttgttgcccaggctggagtgcaatggcgcgatcttggctcaccccaacctccgcctcctggattcaagcaattytcctgcctcggcctcctgagtagctgggattataggcatgcaccaccatggctggctaattttgtattttaagtagaggcgaggtttctccatgttggtcaggctggtcttgaactcccgacctcaggtgatccacccgcctcgacttcccaaattgctgggattacaggagtgagctactgcacctggccaacattttctagtctcatagggcrtgtttaaatctatggcataaacaaattggtttcgtgaaaattactatatagtacattaagttttccctcatcatttaaatagatttttgtgtctattttcctttaaaattttaatgtacttgatctagcttgatctagattattctgtaatagaagtagttgtaaatctytaaaagtaagtcttttgatttctgtagaccatggattttttaaccttggcactactgacattttgggcagatagttctttgttgagtggctytcctgtgcattgtgggatgtttagcaacatccctgacctctaccagtatatgcaggtagcactgcagagccccagcgcatgtccccactatctcttcttgctggatgcatcaactaaaaatgtccccagactgccatatgttgagaactatgtagacaaaacttttttttttgatacagagtcttgctcagtcacccaggctggagtgcagtggcacgatctcagctcactgcaacctccacctcctggttgcaagccattctgcctcagcctcccgagtagcttggattacaggcgcctactaccatgcccggttaatgtttttatttttagtagagacgggggtttcaccatgttggccaggctggcctgacaaaactctttaaaagagtgtttatggccaggtggggtggcttatgcctgtaatctagcattttaggaggctgagactcgattgaggccaggagttcaagaccagcctgggcaacatagtgagagtttgttactactaacatttaaaaaaaatcagccaggcctggtggtatgtgcctatagtggcagctactcgggaggccgaggctggaggatgcttgagcccatgaggtcaaggctgcagtgaattgtgatcatgtgaccgcactttagcctgggcatcagcgagrccctgtctcataaatgaaaaaagaaaatgattcctggctatttattaactatataagaagaacacagccaggcgtggtggctcacgcctgtaatcccagcactttgggaggcctaggcaggtggatcacgaggtcaggagatcgagaccatcctggccaacatgatgaaaccccgtctctactaaaaatacaaaaattagccgggcatggtggtgagtgcctgtagtcccagctacttgggaggctgaggcaggagaattgcttgaaccggggaggtggaggttgcagtgagcgagatggcaccactgcactgcagcctggcgacagagcgagactccatctcaaaaaaaaaaaagaatactttgagacttaactgtatcagatgtgtaagataatttatctaaagaataaatggacacagacagtaaagacaaaaaatatatactggctttgaatgttttatttttaaaacttttaagtttgtttcccgtttttagtgtttttcttttaaaatttctcgcttttgattttaataaaaaggtaaaattttctaccaaaaatgaatgtaacgagaatttgaacagttgtttctaagactagaggcaggcgtggtggctcacatcggtaattgcagcacttggggaggctgaggcaggagaatcgtttgagtctgggaggtcgaggctgcagtgagcggtgattgtgccactgcactccagcctgggtgacagagcaacacactgtctccaaatagtaaaaaagtggtttttaaagtttttatttttattttattttttcaaaagtgtgtttgaaagttatgtaagttacagttttatgtaatatttaaatagtatttcttatggtttctggaatgggttgagcaaggaaagcctatagattgggttaaaaaaaatcaaagtctgtgcaggtaatatgtttggggtgaattccttgtatacagtgttacaaagactttgagctctgtccattgggcgtaggtttagacacatctgggctccctagcttcttccctttttatttatttatttttgaaacagagtctcactgtcaccaaagctagaatgcagtggcgtgatcacagttcactgcagccttgaactccccaggcttagatgatcctcctacctcagccttccaagtagcagggactaaaggcgtctgccaccatgcccagctaatttatgtaattttttgtagagacggggtttcaccrtgttgcccaggctggtctcgaactcctggactgaagtgatcctccggccttggccacctgaagtgctgggattacagacgtgagccaccatgcttggcctgtcaccccttcttaaagactatacacctttttttttttttttttttttagacggagtctccctctgtcgcccaggctggagtgcaatgcgccatctcggctcaccgcaacctccgcctcccgggttcaagcaattctcctgtctcagcctcctgagtagctgggattacaggcatgtgccagcatgcatggctaatgtttttttttgtttttttttgtttttgtttttgtatttttagtagagacgggtttttaccgtattggccaggctggtctcgagctcctgaccttgtgatctgccgcctcggcctcccaaagtgctgggattgcaggcatgagccactgcacctgggtttttttttttttttttttgggagacagagtcttgctctgttgtccaggctggagtatggtggcacgatctcaactcaccacagcctctgcctcccgggttcaagcgactctcgtgcctcagcctcctgagtagctggtattacaggcgcaccccaccacgcccagctaatattttgtattgttagtagagacagggttttaccatgttggccaggctggtctcgaacccctgacctcaagtgatccaactgccttggcctcccaaagtgctgggattacaggcgtgagccaccgtgcccagccaagactatatactcttatttcccgtgaatacattattgacagttattgaaaatattgactatagccccaaaaggcttaactggttagagatacagggcagacaaaggatagataaaaatggtgggggcaaagagtaaatgctatgggattctaaagggtatctgcatgagagagattcctttttgttgttgttttgttttgtttttgtgacagagtctcggctctatcacccagcctggagtgcagtggctccatctcagctcactgcaacctccgcctcccaggttcaaccaatacctcagcctctggaatggctgggatcccgggattacaggcatgcgccaccacgcccagctaatttttttttttgagacggagtctcgctttgtcacccaggctggagtgcagtggcgcgatctcagctcactgcaacctccgcctcccaggttsaaccaatacctcagcctctggaatggctgggatcccgggattacaggcatgcgccaccatgcccagctaattttcttttttgagacggagtctcgctctgtcacctaggctggagtgcagtggcgctatctcagctcactgcaagctccgcctctcaggttcaygccattctcctgcctcagcctcctgagtagctgggactacaggcgtccacgaccactcccagctaattttttgtattttttttttagtagagacggggtttcaccgtgttagtcaggatggtctcgatctcctgacctcgtgatctgcctgccttggcctcccaaagtgctgggattacaggtgtgaaccaccctgtccggccacaatacccagctaatttttgtagttttagtagagacagggtttcattgtattggccaggctggtcttaaactcgcggcctcagatgatctgcctgcctgggcctcccaaagtgcttggcttaaatggtgagccaccatgcctggcatgcctggactttttttttttttttttcccagatggaatctcactgtgtcaccctggctggagtccagtagcatgatccaagctcactgcagccaccacctcccaggtcaagcggttctcctgcctcagcctaccaagtagctgggattacaggcgcgccccaccgcccagccaattttttatattgttagtagagacagggttttatgatgttggccaggctggtctcccaaagtgataagattacaagtgtgagccacaatgcccagccaagactatatactcttatttcccagtgaatacattattaacagttaccgaacatgttgaccacagccccaaaaggcttaattggttggagatacaggacaaaggatagataaaaatgggaggggcaaagtgtaaatgctatgggattctgagggtatttgaatgagggaggttcttttttgtttttgttttgttttgagtcagagtctctgtcacccagcctggagtgcagtggctttatctcggctcactgcagcctccgcctcctggcttcaagtgattctcaggcctcagcctccagaatggctggaattacaggcatgcgccaccacacccggctaattttttttgtatttttagtagagactggatttcaccatgttgaccaggctggtctcacactcctgacctcaggtgatctggctgtcttggcctcccaaagtgctgggcttacatgtgtgagccaccccacctggagtttttttgttttgttttgtttgagatggaatctcactctctcacccaggctggagtgcggtgacatgatcttggctcactgcagcttctgcttcccaggtcaggcagttctcctgcttgacccagtagctgggattacaggcgcatgccaccatacccagctaattttcctatttttagtagagatggggtttctagccaggctggtctcgaacttcagacctcaggtgatccgcctgccttggcttctcaaagtgctgggattacaggcatgagccgtcgtgcctggcctgtatgactgtatgagggaggttcttgagctaggtgccttttttttttttttgagatggggtctcactctgtcgcccaggggcacaatcatagctcattgcagccttgacctcctgggttctagcaggccttccacctcagcctcccgagtagctgggactacaggtgtgtgccaccacacctggctaatttttattttttgtagagatggggtctcaytgtgttgcccaggttggtcttgaactcctggcttcaagcagtcctcctgcctcagcctcccaaagtgctgggattataggcatgagccacctcacccagccttcttgagctgagttctagaggaaagttaagactgacctcaaatttcaggagacagtcccaaaggaattctggtaatattgcaattttttttttctgagacagttttgctcttgttgcccaggctggagtgcagtggcacaatctcagctcattgcaacctctgcctcccgggttcaagcgattctcctgcctcagtctcccgagaagctgggattacaggcatgcaccaccacgctcagctaattttgtatttttagtagagaccgrgtttctccatggtggtcagtcaggctggtctcgaactccgggactcaggtgatctgccagccttggcctcccgaagtgctgggattgcaggcgtgagccaccrcgcctggccgagattcttaagtaaatgaacttttctttaggcacatgaattggaactatggaacaaagagattattgatacaattattcaagaagcacatttgcatatttagaacagaaaggttgcacagctcttayatactcaaacatagttttagagttagatcatgatcttaactttcttcatggttaccttttggggaggaaaaccaccctttttcatattaaagtaaaatgtgtacgtaataaagtgtgactggcatccaaatcaagaaacagacccttcccagtaccatgggaatctgcctgcctttctagttactttcctgacttctaataaccgattagttttgagtatgtttgagtaaaagaatagatgtgagtatatattatgtattttaagtttgaaagttttcaaaagatgcttttcaaaatctttcttaagaaaaatatagtgtcttagaaaatgtgccaaaatgtattgaatttcagagctgaaacagatctaggccaaacttctcatctataaaatcaggaaattgaggcccaaggaggttgattgtttctcagagaaacagagctggttaatggtgaacccaggctttttgcataccagtttagtcataataagtagttggtttttgggaatatccttttcataaatgatagtataaaagctgactgctaatacaactttacagaaggggataacaatgcagtattatttgtgtctttttttttttttttcctcttagtatgagaacttgaacttgccaaggaggtagagattttttaactcctgaagcataatttagttaagttagcttagtaattaagrgcgtgggctttaraattagatttgctttgagtcctggcttttcttcttaaaacctgaagtactggctctgtatctcgatttttttaatctgtaaaaatgtgggaagattaggagagtccttgcggtgcttagaacaaccttgggacataattaaacattcagtaaacggatagctgttagatgtcagaattagctatgttttcatattctgtcgtgcttattattcttggattataaaggtattgttcaatggtttagtgattattggatgtaaatatgcctcaagaaaagctcaagatgagggttaaggtacttctaatagtgtttctttgtcacctgtgtgccaataatccatggggctagtggccargtagtccacccttatctgcagtttgattttctgcagtttcagttacccattgtcaaccatcgtccaaaaataagtgagtatagtacaataaggtattttgagagagcacattcacgtaactttcattacaatatattgttataattactccattgttaatctcttgtgtttaatttatagattaaactttatgatatgtatgtacgtatagggtcggtactatctgtggtttcaagcatccactagggatcttggaacgtgtcccctgtggataagaggggatatattaatacaaaggaatatatgtgggctctgttctccagatgtgatttatttaatctttctttaggagacagttataaatcgttcaaagtttgtgttaaaatgttgccttcctgaatgaaaaagttyatttgggaaactctcaaatgatatagagataatgggattattttgaatttcttgacatggctctgggtttcctgaaactagaccaaagaatctagattctaatcctgtggtgtataatcttggatccctttgcaaatccctttttcagtgggctttgggagccagaaaataggcagtctcattcatctgacatccattttattctcttacataaatctgaaaaggtgggagaactttatttcattgaacatgcttttttaaaatttttttatttttttaaggctagtcaaacgaagcagtggaaatggaaaaggaaaaaagtctgtaactggttatgatcaattaattgtaaacaccactgcaaaaccctttttttctttctcttccctttagttctttgcttttactccaaatttagaataactgcctacagttgaatgcctactgtctgattgattgattgattgattgattttaagacacaaggtcttgctctgttgcccaggctggagtgcagtggcagcagagcaagaccttatagctcactgtaaccttgaactcctgggctcaagtgatcctcctgcctcagccttcctagtagctaccacacctggctaaattatcttttttaaaattttttgtggagttgaggttctcactatattgcccaagctggtgtcagactcctgggctcaagcagtcctcctgcctcagcctcccaaagtcctgggattacaggcatgagctactgcaccctgcctatctgacattttttatatatggcagctttatgggattgatagtattcttgtttcacagatccaacagttgcagctgtgaagaaattaagtaactttctcagtatcagtaacttggtggtggaacagaggtttgaaaccaggtctgtgcgtccaaaatattggtggttatggtagaaagagttatactcatatctgctgcttgctccctacatttttgaagatttttttaaaactaagaaatactttatacttagaagttttaaaagtaatacgtgaacatctttatatctgtggtccatatttaacagatagtaatcttctcatactgtgggctaaactgcctctacccaaatactgtaaaacatagaggtaaagctcactggataacttttttcttattccattttttctttctttctaggagtatctgctatgtgaagttagtgtatatccttccccttcatatttttgtttttactgttaatatctcctgaatttaaaaataaaatacttttttgcttttttttttaaagttttttttaaaaacagtttttatgaatgattgtaatgtatgtctcttggaaactttttctctttttttttttttttttgagacggagtctcactttgtcgcccaggctggagtgcagtggtgtgatctcggctcactgcaagctctgcctcccggggtcatgccattctcctgcctcagcctcccgagtatctgggactacaggcgcccgccaccaagcccagctaattttttgtatttttggtagagacagggtttcaccgtgttagcctggatggtctcgatctcctgacttcatgatccgcccgcctcggcctcccaaagtgctgagattacaggtgtgagccaccgcgcccggcagcattattttttaaagatctgtgatagtgcatgttgtgctagttctttaatayagactatattgtattccatgtcagtttttaaagtttatttccctattgatggcatttaattccaacttttagataaaaggatgtactggacatttttataattttttggggaacatgtaagagtttttctaggaagtagatttgtaagacctgagcgtattttcagcttctgcctgactggacattgcttcactgttctccagatgattgaatcaatttacattcccactaaaagagttctgcccgggagaggtggcttactcctgtaatcccagcactttaggaggcaaaggcgggcggatcacctgaggtcaggagttccagaccagcctgaacaccatggagaaacctcgtctctctactaaaaatacaaaaaattagccaggcatggtggtgcatgcctgtaatcccagctacttgggaggctgaggtgggagaattgcttgaactggggaggcagaggttgcattaagccgagattgcgccattgcattccatcctgggcaagagagggagactctgtctcaaaaaaaaatagtcactattttttgtaagactatctcaggaaaaaaagaggaagggaaaaaaaaaacgtagttacttgaaacygcccccccttttttttttggagatggagtctcactctgttgcccaggctggagtgcaatagcaccgacaacctttttttttttttttttttttttgagaccgagtctcgctctgtcacccaggctggagtgcagtggcaagatctcagctcactgcaagctccgcctcctgggttcatgccattctcctgcctcagcctcccaagtagctgggaccacaggcacccgccactgcgcccggccaatttttttttttttttttttttttcagtagagacagggtttctccgtgttttttttgttttattttgttttgttttaagatggactctcgctttatcgcccaggctggagtacagtagcacaatcttggctcattgcaacctccatctcctgtgttcaagcaattctcctgcctcagcctcctgagattatagacgcatgccaccacgcctggctaagttttgtatttttagtacagacagagtttcaccatgttggtcaggctggtcttgaactcttgaccttgtgattcgcccacctcggcctcccaaagtgctgggattacaggcgtgagccaccgcactcggcctacatttttaagacttatgtttttgtcactatgatggatgtgaaatggtggtttattctaatttttacttccctagtcagtagagatattaagcatgttttgtgtttattggccattaggcttttgtaaatttagtgtttacttttttttttttttttttaaatgagacggagtctcgctttgtcgcccaaactggagtgccgtggcgcgatcttggctcgctgcaacctctgcctcctgggttcaagcgattgtcctgcctcagcctgccaagtagttgggattacaggcatgccccgctaagcctggctaatttcgtatttttagtaragacgggttttgccatactggtcacactggtctctaactcctgacctcaggtgatccgcctgcctcagcttcccaaagtgctgggattacaggcgtgagccaccatgcccggccatgtttacattctttaactgcttttttaaaaattggatggtttggcctgggcaacaagagtgaaatttcatctcaaaaaagaaaattaggtggtttgtagttttctccttcttctgtaggaaattttttttttttttttttttttgagacagttcttgctctggagtaaggctggagtcttgttctggagtcagggtttcgctttgttagccaggctggtctcttcctgacctcaggcaatytgcccatctcggcatcccaaagtgctgggattacaagcgtgagccactgtgcccagccagatttgtaggarttctttatgttatttatatgatattgtctatcttacattatgtggcttgatttttaattttggcttatctttttatgctttttttttaagttgtagtaaaatacacataacataaaatttatcatyctaaccattttaaatgttcagtggcattaaggacattgtgtagctatcaccaccatccatctccagaacttttcatcttgcaaaattgaaactctgtacccaatattactaactccctatccccctaccacccagcttctggcagtcacatttctactttgtatctcaatctgtgtgactgctctatcattcattatttgtccctttaaaaaaaaaaactctgagtatactttcttcatttttgtttaaaaccgaaactctggaagttaaaaataacatccttgcccatgagcagcttttttttttaagacagagtcttgctctattattgctcagactagagtgcaatggtgcaatcatggctcactgctgcaacctcaacctcctgggctcaagtgatcttcccacctcatccttccaagtagctgggactacaggtacaccaccatgcctgactaatttttgtattttttgtagagatgaggtctcacactactttttgtagagatgaggtctcagcctaggctgatgtcaaactcaagtgatcctcccgcctctgcttcccaaagttttggggttataggcatgagccaccggagccatcaaatccctgtgcttcttacagacaccagaaaaagtttcagccttgttttcaacattgttctgctgtgctttgtccaaatgaacctttatgagctgcctgccatccagtttctcttgcccacaatttcacttgggaagaccaagccctcaaggattatgtcatgcacgcctgtcagaatagggctcctgggacacttctgcttattttttgtacagcttttcgagttggcttatgcagaattatcctctgagcacattatttgtccttttgtgactggtttatttcacttaactgtcctccttgtcttttagaagtttcatctatatatatatatatatatatatatatatatatatatatatatatatatatttttttttttttttttttttttttaagactgagtctctctctgttgccaggctggaatgcagtggcatgatctcagcccactgcagcctccgactccctggttcaagtgattctcctgcctcagcctcccgagtagctgggattacaggcatgtgccactacccccagttaaatttttttttatatttttagtagagacgggttttaccatgttggccaggatggtctcgatctcctgacctcgtgatgtgcccaccttggcctccctaagtgctgggattacaggcgtaagccaccgtgcttggcccagaagttctatttttaagagacaggtctcactcacacgcttacccaggatagagtgcaatggtgcaatgatgactctctgcagcccggaactcctgggcttaagtgattttcccatgcctcagcccagcctcctgagtagctgggactacaggtacaagccaccactcttggctaattttttttttttttttttgagacggagtctcactctgtcacccaggctggagtgcagtggcgcgatctcggctcactgcaagctctgcctcctgggttcacgccattcttctgcctcagcctcccgagtagctgggactacaggcgcccgccaccacgcccggataatttttttttgtattttttagtagagacggggtttcaccatgttagccagatggtctcaatctcctgacctcgtgatccacctgcctcggcctcccaaagtgctgggattacagacgtgagccaccgcgcccggccagctaatttttaaaaaaaatttttgtagagatgggaatctccctatgttacccaggctgatcttgaactcgtgggttcaagggatcctcccaactcagcctcccaaagtgctgagattataggtgtgggccaccatgcccgtctgcttttttgtatttttagtagagatagggtttttcacgatgttggccaggctggtctccaactcctgatctcaagtgatccacccgcctcagccttccaaagtgctgggattacaggtgtcacccaccgtgcctggccctgtttaattttaaagtagtcaatttttttctggtgtattttacttattgtcctcctttttgtcttacagaagtttaattttaaggtattcagattttatcttttcctacatggtgtgttttttgcattttaagaagtcttctcctactttgatattaataaaggcattctcggacccaggtcactggttggcctgacctcctgctctggaggcactgtgccggaggacccgtttttttttatttgtttatttttttaaagacattcttctgtatttggtttttaaaagttaattcattttcttaacttctgtactcaggtttctctctctaccatgtcatactgaaactgctccttcaggcagtaccttcccaattacagaacacagagtgagttctcgtgatcatccattttgtacatgttccttcagcatttccatttccatcttagaactctcctcctttggttgctctgatactgctcttttctgattttcctctaacctctgttactatcctttataaaatattgtcactgatttacctttcatcctccacttgtctctggaatgtttgttttctcttttttattccttttgttaataccataggtcaggtttttatatctcaggatggactatttatttatttgaaacatggtgtctgtctgtctatctatcatccaggctggggtgccgtgttgtgatcacagctcacgccgcagtcttaacctgttgggcwtaagtgatsctcccaccacagcctcccaagtagctggcattacaggcatttgccaccatgcctggctgattttttttactttttgtggagacagggttttgccatgttgcccaggctggtctcaaactcctaggctcaagtgatccatgcgccttagccgcccagagtgctgggattacaggcatgagccgctgcgcccagcccagatagactatttgtattaaacgtttcctggcaacttgcartagcttaagccggtaatcccagcgttttggacggctgaagcaggaggattgcttgagcccaggagtttgagaccgatctgggcaacatagtgagaccctgtttctacagaatatttaaaaaatgaggccagacacggtggctcacgcctgtaatcctagcactttaggaggccaaggcgggtggattgcctgagctcaggaattcaagatcagcctgggcaacacggtgaaaccctgtctctactaaaatacaaaaaattagtagggcacagcggtgtgcacctgtaatcccagctgcttgggaagccgagacaggagaatcacttgaacccgggaggcggaggttgctgtgagccaagatcgtgccactgcactccagcctgggtggcagggtgagactccatctcaaaaaaaaaaaaaaaaaaaaagcctggggtgggtggtgcgcatcagtagtcctaaactactctggatgctgaggcgagaggatcccttaagcctgggagatcgaggctgcggtgaactttgactttgccactgcacttcacagagccaagaccctgtctttaaagaataaaatagaataaaagtttgcttatgtacatttatttttctgccttcagtctctcccagcttttcttttctttctttttttttttttaagatggactctcgctatatcgcccaggctggagtgcagtggcacaatcttggctcattgcaacctccatctcccgtgttcaagcaattctgcctcagcctcctgagtagctgggattacagatgcatgctgccacacccggctaatttttgtgttttaagtacagacagggtttcaccacgttgatcaggctggtcttgaactsctgaccttgtgatccgcccacctcagcctcccaaagtgctgggattacaggcgtgagccaccacgcccagcctctcccagcttttctagtcaaccctaatggtgccatgccactggatttaattttaaaaatacaatgttacatcattctctgttaggttttccagtgcctatggggataaagtcaaaacctttatactgttgttcttgtgtccggaattggtgggttcttggtctcactgacttcaagaatgaagccacggacccttgcggtgagtgttaacagttcttaaaggcggcgtgtccggagtttgttccttctgatgttcggttgtgttcggagtttcttccttctggtgggttcgtggtctcgctggctcaggagtgaagctgcagaccttcgcggtgagtgttacagctcttaaggcggcgcgtctggagttgttcgttcctcccggtgggttcgtggtytcgctggcttcaggagtgaagctgcagaccttygcggtgagtgttacagctcataaaggcagtgtggacccaaagagtgagcagtagcaagatttattgcaaagagcaaaagaacaaagcttccacagtgtggaaggggacccgagtgggttgccactgctggctcaggcagcctgtttttattctcttatctggccccacgcacatcctgctgattggtccattttacagagagctgattggtctgttttacagagagttgattggtccgttttgacagggtgctgattggtgcgtttacaatccctgagctagacacaaaagttctccatgttctctagattagctagatacagagtgtcgattgctgtatttacaaaccctgagctagacacagagtgctgattggtgcatttacaaaccttgagctagataaagagtgccgattggtgcattcacaatcccttagctagacataaaggttctccaagtccccactagactcaggagcccagctggcctcacccagtggatctcgcacyggggccacaggtggagctgcccgccagtcctgcgccatgcgcctgcactcctcagcccttgggcagtcgatggaactgggtgccgtggagcaggggacaatgctcaggccacgcaggagcccacggcaggggggcaggactcaggcatggcgggctgcaggtcccgagccctgccccgtggggaggcagctaaggcctggtgagaaattgagcgcagcgctggtgggccagcactgctgggggacccggccgcatcctccgcagctgctggcctgggtgctaagcccctcactgcccagggccagcagggccagtcggccgctcagagtgctgagcccgccaagcccacgcccacctggaaatctagctggcctgcaaacgccgtgcgcagccccggttcccacccgtgcctctcccttcacacctccctgcaggctgagggagctggctccggcctcggccatcccaggaaggggctcccacagtgcagcggtgggctgaagggctcctcaagtgtggccagaatgggcactgaggccgaggaggcaccaagagtgagcaagggctgtgagggctgccagcacgctgtcacctctcattctgacctacctttcctgacctatttcctgttaagtcacagatacacacttgcattcctacacatacctcagactttcagtctccctcaaaccttcagcaatacaaaattgcttgctatttagttgtttcatctgtctggaataagcccttatcttttttctttacctttcgaaacctacttgtcctaaaataccacccctggtaagcctttcttgaagccaaagtttccttctgtttttcattgtcagacttcatgagagcagttatcttactattgataattgtacatatgtccttctactcctggtagattaaactccttgagggctcatattcatttttttctctttagcaccttgtagggttccttgaatgtagaagccttagtaatttaaagcacaccaaaaaagtctttgataggtatctaattttgaggagctgctgctaaaagtgctcttaggacataggtttagggcaggcttccgttacttttagcaaatgtgtgattatggatttttctagtgattagaaatgtaggaccagctagtctatgtactcttttctctcagttaactatgggtgtcttgcttttaggtttctttgtttcaagtgaagcatcttacttggttttgtcatacccaattttgggttgtctgatgctgttgcttctcagcgagctgataataaaacattttatgctttttcttaaatcactgtagtgacttagtttttgttgtatagaatatagcacagtttttgcctcctattagacattcagttatttccagtttcttgatagtgtacatgtgtgagaattttgagtgtatatctctgaaagtgatacatactgagtggtcattgagtgttggatgaaattttaggtgtttatattgttaggtgctttctttccatctgcccataggcactgtgaatgtgagtcattgaaagcagagttctttctcactgatcttccattccccattgcttagcaccattgcctgctaagcaggagatacttgttttcctgaatgagtttaaggatattcctaagctctagagagctcatccccaaccattgtgaaagtttcatcctgattctgggactaggaagagttgaatatattgataaaggtggcctccaggtaaagttggatttctgttgcatgtaagtgttaataatgtagtcaggtcttgaattaggatgatggaatgtccaagcccaaaactgggaaacaagatagtgggaaggtaatttttttttttttctgtagttttcccttttgaagatctcactggcatctatttagtatatatgacatcatctgtggttcaattctttagtgtaactttacattttttatttattcacatatttactgaatgctacctatgytaataaaatggacatgatccttgctgttatggaataaattatggctcagtaaggcagtgagaaattgaacagctaataagtgtgtttgttgactttaagtaaggggacctatggaagttgggtattctagcctcagggaaagagtttcttgggaataacyggtaactgatacttacaggataaattagaatgaccatgatcaactctgtatacgtatagatagttaataatcattttacaatgaataatggaaaaacattttattgtttttttctatgtatatatgtttttatttattagagactaggtctcagtttgttgcccaggctggagtgcagtggtatgatcatagctcactgtaaccctgaactccagggctcaagtgattctcctgcctcagccttccgagtagctagtactacaggtagacaccactgtgcccagttaattatttttaaattatttgtagagactgagttttgccatgttacccaggctggtcttgaactcctggcctcaagtgattttcctgccttggctttctaaaatgctgagattacaggcctgagcccctgcctggccaacttctgtttttctttttttcttttcctgatggactgtcctacgactgtttttatttttttaaccaaaactgcgtcataacctcttcttggtttaagggaggctaggaaatcttctttagttgagcacagtactcctcaattaaaatgagagtttctttagtagggaagaaggaaaaaagaaagttgattagacaactagccatgtagagggtagaggggcaagaatgaactcaggatcatttaggaaacctttttaggtagcttaggcaagaaattattgtagtatggggctagagttgaatagggagccgaagagaagttataagtatttgggagaccctctgtcacccaggctggagtgcagtggctcaatcacagctcactgcggcctcaaactcctggtcttaagtgatcttcctacctcagtctcctgagtagctgggactacaggcacgtgccaccacgccctgctaattttcatatttttttttgtagagatggggtttcaccgtgttgcccaggctggtcttgaactcctgggctcaagcaatctayctgcctcggcctcccacagtgctgggattayaggcatgagacaccatacccagtcaacttttaactttttatcaataaaattttgaagagaaaagtcgaaaggacagtacacttgtatccccactagctaagatcatgttgctctcatgaatataattcactaccaaaaacttgagcatgcatctcttaaaaataatattcttttggttgggcatggtggctcactctggtaatccttgcactttaggaggctgaggcaggaggataagttgagcccaggagtttgagaccagtctggacaacatgacaaaagcccgtctcgacaaaaatagaaaaaaatagttgggtgtggtggcatgtggctgtggtcccagctgcttgggcagccgaggtcggaggattgcttgagcccagtaggtacagtgccatgatcatggctcactgcagcctctgcagtccggcctaggtgacagagtaagaccctgtctccaaaaaaaaccccaaacttctatttttcagttgacttaaaaaaaagtcttatctacgtaacgttcacagattgtatataattgtattcttgggtcttttacaatttatgattgttaaccccttcacatacctttctttttttctcatctcattaatactgaaaatcctgatgtctgtgattcctagtttaggtgtaaaggtttgattagcttcaggttaaacattttggtaagaagatcccaagtgatgttgtatacttcatattgaatcatattagtacatgtgtaatatcagattttcttactgttattgatgcttggtcacttgtttaatcatttgattaaggtgggaactacaagatttctttgtaaaggtacattttatgctctttgcaattagcaagtaaaggatggattacttctttggcatcctggaaataatcttattyccaamatccttttaccaggtgcactcacacacacccccactctcactcatgctggtacagtttaaccatgccagttaatctagcatgtttatctttggaatttgggaagaaacctgagtacccggagaaaacccacaaagacgtggggagaacatggcaagctccacataagacagcagcccgtgtgggatttttttttcctcatamatgttataaggaaatgatgttatccaaggacctgctgtattctctttttctctcttttttttttttttgagatggagtctccctctgtcacctaagctggagtgcagtggcatgatctcggctcactgcaaccttcgcctcccaggttcaagtgattctcctgcctcagccccccaagtatctgggattacaggcgcgcaccaccacacccggctaatttagtagagatggaatttcaccatgttggccaggctggtctcaaactcctgacctcaggtgatccactcacctctcttttttctttaattttttttttttgagacagtgtctcactgtcacccagactggagtgcagtggtacaacttcagctcactgcaccccctgccttccagactccaggaatcctcccacctcagcctcctgagtagctgggactacaggtatatgccaccacacctagataattttttttttttttaagtagagacaggatttcactatattgcccaggctggtctcgaactaagctcaagcaatccacctgcctcgacctcccaaagtgctgagattacatgcatgagccatgagccattgtacccagccctgctgtcttctctttttttttttttttttttttccttcagactgagtctcgccctgttgcccgggctggagtgcagtggcacgatctctgctcactgcaagctctgcctcccaggttcatgccattctgctgcctcagcctcccgagtagctgggactacaggcatccaccaccacgccctgctaattttttgtatttttagtagaaacagtgtttcactgtgttagccagggtggtctcaatctcctgacctcctgatccgcctgcctcggcctccgaaagtgctaggattacaggcgtgagccactgcacgtggcctgtctgctcttaaagagattaataaattagagggaaaactcagaatgtctttgtaatttaaatttttgttaagggaaaataataacrtttaaaataattgtttctctgtgttaataatgggtactgtacaattaatttccttttttaaaaaatatattttttgagacagagtttctctcttgttgcgcagggtggagtgcaatggcacaatcgcggcttattgctacctctgcctccggggttcaagcgattctcctgcctcagcctcccaggtagctgggactacaggcacacaccaccacacccatctggtttttttgtatttagtagagatgggatttcaccatgttggtcaggctggtctcgaactcctgaccttaggtgatccacccgcctcagcctcccaaagtgctgggattacaggcatgagccaccatgcccagtccttttttaatttttttttttttttaattgttgtcaccagactggagtacggtggcacaatcatggcttactacaacctggaactcctgggctcaagtgatcctccaacctcagcctcccaagtagctgagactataggcacgcaccaccacacctggctaatttttgtggtatttttgtagaggtggggttttgctgtgttgactaggctagtctcaaactcctgggtgaatcctcctgccttggcttcccaaagtgctgggattacaggtattagccactgcacccagcccaaactgtatttttttgtcttctagtacaccttgtaattttttattgaaagctgggcatgggccgggcatggtggctcatgcctgtaatcctagcactttgggaggctgaggcaggtggattgcctgagttcaggagttcaaaatcagcctgggcaacatggtaaaaccccgtctctgcaaaaaaaaaaaaaaaaaaaaaaatccaaaaattagctaggcatggtaagtgcatgcctgtaggcccagctacttgagggggctgaggcaggaggatcactttagccccggaggcaaaagttgcaatgagctgagatggcgccactgcccttcagcctgggggacagagtgagaccctgtttcaaaaaaaaaaaaaaatgctgggcatgttttactaggtaaaagtaactgagatacataagcctttagtgtgaggcattacgtttatctgacttaggattgggctgtgttttgtattaacattttttgtagctgtaggtgtgagaactaatatttcctccagtgttcttatttttgtttactttgttgtcttggggttccttagagacttcttaaataagatctgagacatgcagttatatatttttcttttttagttttttaattccttgcaagtattgcacaaatgcagttctttgagtaacgtcctgttgttatacaaaagccttcgtggccaggcatggtggctgacaattgtaatcccagcactttgggagtccaaggcagacagattgctttagcccaagaatttgagatttgtagacaaatggagacatggcgaaccgtctctacagaaaatacaaatattaaccaggcatggtgtcatgcacctgtactcacagctactcaggaggctgaggtaggatcatctgaacccgggaggcagtttgcagtgagccatgatcatgccactgcactccagcctgggtgacagagcaagaccctgtctcaaaaaaaaaaaaaaaaaaaaaaaaaacacctcttgatagtaaggtttcagtattctgttgtagtcttttagtgaatctgtgtacctgggctgtgatattcacagttgcttctcagttcacacttcctccttagttgagattggaaggctgggattgggtttttcacttcccttgggtcagttagctctgataaaactccagttggttaacctctggtgaaatcttttctcttgaaggcaggcctttttaaaaagaacagattactttggaattacttcagaatggctactttcccccttccccctgccagaagcatgcagggaattttcttccatcctcactgtgagaacctcctgcgttcaagtgaccctcctgcttcagcctcctgagtatctgggactacaggtgcacaccaccatacctggctaatttttgtatttttagtagagagcaggttttgccatgttgcccaggttggtcttgaactcctgggctcaagcagtctgtccaccttggccttccaaagtgttgggattacaggcatgtaccaccacacttggcctttttttttaaaatagtattgtaaatatttgggtttttaaaataaaacatttattctcagagttgtggaggctagaagttggaaatcaaggtgtcagcagggtcagattgcctctgaaacctctggggaatccttccttgcctcttcctagtttctgttggtttgccagcgtttttggtgttccttggcttgtagatgcatcaccccaataatctgtctttatgtggcatcctccctatatgtctgtcttaacatgttgaccaggctggtctcgaactcctgacctcaggtgttctacctgccttggcctcccaaagtgctgggattacaggcgtgagccatcgtgcctggcctgtttttactttttaactttctgctaaaatttttaaacttgtactgaagttgagaaaatagcataatagatatcatcacccagttgctttttctttttcttttttgtagagacggagatctcactttgctgcccaggctggtcttgaactcctgggcttaaacaatcctcctgcctcagtctcccaaagtgctgggattacaggtgtgagccaccactcctcctggcctccactttcggtagttrtgaacatgtggctagttttgtctgtcagattcccactcccttctagattattttgctgtttgtttgtttgttgtttgagatggagtctcactgtctcccaggctggagtgcaatggtgcgatctcggcttactgcaacctctgcctcctgggctcagacgattctcctccctcagcctcctgagtagctgggactacaggcgtgcaccaccacacctggctaattttttgtgtttttagtagagacagggtttcaccatgttggttaggctggtctcaaactcttgacctcaggtgatctacccacctcagcctcccaaagtgttaggattaccagcgtgagccaatgtrcctgtccccttctagattattttgaaacaaatcttctgagttattttgcagcaaaccccagaattctgtcattgtacagtgaataattcattgtggatctttaacatacaaggacatttttatgaaaccaaatcaattgtcttattatgtccaacaaaagaaacactaatttttgaatatgtaatgacacagtacatgctcaggtttccttgacttctgacttacctttttacagttacrttattcttcttaatggttgtaatcatttagtttactttctagtccttttatgtcacaagcagtcttagagtacaaatgttatatcacatacagaggattgtattgtgtaggaaaaacatggacaacaaagactgaattgaaaaggtgatactggagagtaggacttgatgtgaagaagtttgaggagtagctttgactgtttttcttttctctttaataatcttaaaggtttcttatggggggagcgctgagacaggatacaccacagtcacccaggcaggagtgccagtggtaagatcacggctctctgcagcctgggattcctgggctcaggtgattttcccacttcagcctcccgcattgctgggactatggccatgcaccaccacacccacacctacctaatttttttgtagagacagggtttcaccatgttgtctggactgatcttttttttttttttccataaggatagagatgggctggtcttgaactcctgggttcaaatgatcagcccatctcccaccacccaaagagctgggattacaggtgtgagccactgtgcctggcctaatcttaggattgaagtatataaattctaaaagttgagtaagtgtataataaaaactgagtgataaagtattgtgtcatggtgtaaatggcagtgtttttttcttactggcatacattgagatgtcctctaactgaaatcttagaagtgagccgggtgcagtggctcacgcctgtaatcccagcactttgggaggctgaggcaggcagatcataaggtcaggagttcgagaccagcctggccaatgtggtgaaaccctgtgtctactaaaaaatatgtaagaaattagccaggcgtggtgctgtgcgcctgtagtcccagctactcaggaggttgagacagaagaatcgcttcaacccgggtggtggaggttgcagtgagccgagattgccccactgcatttcagcctgggcgacagagcaagacaccatctcaaaaaaaaaaataagtaaaagaaaagctctgtcttgactcttgaatcagttttaaaacctggcttcactgrttattagctttgtgactttgttgcctcagcttccttattggtaagcacgtaagtttgttttaagattgagttattacatgtacatcagttaaaatattgcctgtaaattatatatagatattgagctgggagtggtggtttacgcctctaatcccaacagtttgggagactgaggcgggagaattgccttagctcagaggtttgaggctgcggtgagctatgattgtaccactgtacctcctgtctggatgataaagcgatgtattaggtattattgttgatcgttcagcaacattacccactgtttccttgaaatattattcctgtagtgtcagtgatatcagactatccaaatatctttttcttcctttcttctttcctttctttccttttccctttccctccccttcctcctgcctttccttttttccttttttcttttttttcttttgagacagagtctcgctctgtcccccaggtggggagtgcagttgtgcgatctyggctcactgcaagctccgcctcctgggttcacgccattctcctgcctcagcctccggagtagctgggactataggcgcccgccaccacgcccggctagtaggttttttttgttttttttgtttttttttttttgtatttttagtagagacggggtttcactgtgttagccaggatggtctccatcttttgacctcgtgatccacccgcctcggcctcccaaagtgctgggattacaggcgtgagccaccgcgcacagccccccaccttttttttttttttttaaggagtcttactttgtcgcccaagctggagtactgtgcttctgtctcggcttactgctccctccgtgtcttggattcaagcagttctcctgcctcagcctccagagtagctgggattacaggcacgcaccaccatgcccccagctaatttttgtatttttagtagaggcggggtttcaccatgttggccaggctagtctcgaactcttgaccttagatgatccgcccaccttgacctctcaaagtgttggtattacaggcgtgagccatggcgcccggtctttcctatctttctgactgtatcttcagatcactcctgaacccgagacctgaatttttcatttacctacttggttctttggattttcacagataccttgtatccaacatgtctcaaactgatttttcccctctccctcaaaccctgacttctcaattctttgtttccttatctttattatactgtcatccacccagcaaaaaatcccctcttctaagatcatagcttttagttagtaactaagtcctttagattttacttcctgtctgccttaattcatcttcttttcattgcactggactttattggcatctctcactggtttcctaagtattctctctaatccccctccagccatttccccctactccagccaggtgatctctaagagacccagatctgattgttacaacacttcaaatttttattattcttcatgaccctgaataatctggcttttgactgcttctcctgcctcatttcatcattttcattctttgtattgtagtcacattggcgrcatttcaattcctaaacctgtcaagtcctcgtttgcctccattttgcacagcgtgtacgctctgccttaagtgctggcttttcctaaagttaagtcttttaaaactaatttcctcaaggaagcttcctcttactttctagattttctgtctgctaaatgttcttcatagtatcctgtacttcatttaaaaattatataattagttcttcagtaccttagaatgaaataactattgatacaggttagagaaaatttctagttgatcattatactaccaatatctgttataatgccttgcaaatagcaagtacttagtaaatattcatggaattgataaattcagacttgaattactcttcattgtagattgagtaaagtttgacagaagtccagaacttaacttttttttttaagrgatggagtctcactctgtcacacaggctggtgtgkagtggcacagtcatagcttactgcacccttgacctcttgggctcaagtgattctcccacttcaacttcctgaatagctgggattacagacacacgttttttgttttttttgttttttttccacgctgtagagatgggagtttcactatatggcccaggcgggtcttaagctcctgggctcaagtgatcctccctcctttgccccacaaagtgttgggattacaggtgtgatttaaaaaatgctagctgcagcctggtgtggtggcttagcctgtaatcccagnnnnnnnnnnnnnnnnnnnnnnnnnnnnnnnnnnnnnnnnnnnnnnnnnnnnnnnnnnnnnnnnnnnnnnnnnnnnnnnnnnnnnnnnnnnnnnnnnnnnnnnnnnnnnnnnnnnnnnnnnnnnnnnnnnnnnnnnnnnnnnnnnnnnnnnnnnnnnnnnnnnnnnnnnnnnnnnnnnnnnnnnnnnnnnnnnnnnnnnnnnnnnnnnnnnnnnnnnnnnnnnnnnnnnnnnnnnnnnnnnnnnnnnnnnnnnnnnnnnnnnnnnnnnnnnnnnnnnnnnnnnnnnnnnnnnnnnnnnnnnnnnnnnnnnnnnnnnnnnnnnnnnnnnnnnnnnnnnnnnnnnnnnnnnnnnnnnnnnnnnnnnnnnnnnnnnnnnnnnnnnnnnnnnnnnnnnnnnnnnnnnnnnnnnnnnnnnnnnnnnnnnnnnnnnnnnnnnnnnnnnnnnnnnnnnnnnnnnnnnnnnnnnnnnnnnnnnnnnnnnnnnnnnnnnnnnnnnnnnnnnnnnnnnnnnnnnnnnnnnnnnnnnnnnnnnnnnnnnnnnnnnnnnnnnnnnnnnnnnnnnnnnnnnnnnnnnnnnnnnnnnnnnnnnnnnnnnnnnnnnnnnnnnnnnnnnnnnnnnnnnnnnnnnnnnnnnnnnnnnnnnnnnnnnnnnnnnnnnnnnnnnnnnnnnnnnnnnnnnnnnnnnnnnnnnnnnnnnnnnnnnnnnnnnnnnnnnnnnnnnnnnnnnnnnnnnnnnnnnnnnnnnnnnnnnnnnnnnnnnnnnnnnctcacacctgtaatcccagcactttgggaagccgaggcaggtggatcaccagaggtcaggagtttgagaccaccctggccaacatgatgaaaccttgtctctagtacaaatacaaaaaaattagccaggcgtggtggcgggcgcctgtaatcccagctacttgggaggctgaggcaggagaattccttgaacccaggagtcagaggttgcagtgagctgggcaacacagcaagactccatctcaaaaaaataaaaaaaaaatttaactgcctagaaggtagaaatcgagtgtatttcttargcctttgaataataggggaaagataagtcatttatattaaattatgagaaaataatggcaactgttaagcttttaaagtattatttccaactaaattaggaagaactaaatttcacttttacatatgcatgacaatgatgagcagggctcctaaaacagttgtggcttgactaggaaacaaataataatttttttatatcaataagaattacttgtaactttagggggcatttagaattatatttgtcttatttgagatttggatttaaattttattttagagcattttttaaaaaataaatagaagtgaggctaatattgttaattattctctttaaaaaatacagtatttgctttgggttaaaattttctgccccaacatcattatcaagagtcagcatattacaatgataaatttagcatttactgtgtggcaggcattgttctatatactttattcgttaaattcaccagcgaaccctatgaggaactatcttatccttagttgacagaggatgaaactggagtacaaagtagttaattaacttgttcatagctagtaagttttaaaaaggttaaacaacaatatactttgtatttagtccttaaatgataaaatcttccagtgtttagtttttcccactagaatgtaagctccaagtgggcagggacttaggttttgttcactaacatttgagatagcatatactagaacctagtcattatttgaaagaatttttacagtgatgatggtaacaatgacaatatcatttcactgagagatggccttggaaatacattagaaccgctttgagttcttcactgttggttgttgacaataatgttttttttatctcattcaaattagcttcaacgttatgtgctattttgcatgcttcatgtatatcttaataaaatagttgatttgaaaattgctaacttytayagcttcttccctcttttttttttttttttttttggtgacagagtcttgcttcgtagcccaggctggagtgcagtggtgtgatcttggttcactgcaacctctgcctcccgggttcaagcaattctcatgcctcagcctcctgagtagctgggattacagacatgtgctaccatgcccagttaatttttgtatttgtagtagagacagggttttgccatatgggccaggctggtctcaagtttyttgcctcaaatgattcatctgcctcggcctcctagagtactggaattacaggggtgaaacatcctgcctggcctagctgctatagcttttatatatctctgktccttttgkgcattaraaatgccttgaagcccccagggaacatcaggraaaaaaaaaaaaaaaaaaaaccaaccagaggtcccgctatgtgttwasctgagttgggaraaraaagttwaaaaaagcaatctttgacctatccttatgaaaaatttacagtgataacacaattcttcagaatttcacccaaaagctacagctgccttggttgttgcagtcattgaagtgaataacacattattttattatttatttttagatactacatttttttcttagactgtggaaacaggactgtgaaattaattttgtaaaatcgggctttaatttttttttttttttttttgagacagaatctcggtctatcayccaggctgcatgtagtggtgcaatctcggctcactgcaacctccacctcccaagttcaagccattcttctgcctcagtctcccgagtagctgggactacaggtgcctgtcagcacacctggctaatttttgtatttttagtagagatggggtttcaccatgttggccaagctagtctcaaactcctgacctcaaatgatccacccgccttggcctcccaaagtgttgggattacagtcgtgagccactgcacccagccaaattaaaggttttatagttaatgttgttagggaaaggggaactatgctgcttacttctatccaagaaacttaattctgaaagtattctcattttacagtaataaaattgagagttaggtgttaagtgttatacctgaatgaataccacaagtaagcgacagaactaggattcagcacacatatgtcttactccaaaggccatgacttttgtaatactgtcatctttcaccattctccatgtcttgcttatagttcctgactcttaaagtaagactttaagttcgcttgtgggagcagggggattggagttttagattgtgaaataactggatgtttgaattaaactgtggtggtataaagaataattgttgcttgatggaaaattgagctgtgaaaaatttttggcttaactttgttttctttttatctttagttctgtgcaaataaagaccctattctaagccctctagaattttttttttttttttttgagacagagtctcactgtgttacccaaactggagtgcaatggcgaaatctcggctcactccaacctccacaccctggattcaaacgattctcgtgcctcaacctcccaagtagcggggactacaggcacacaccaccatgcccggctaatttttccggatttcaccatgttggcctcaaactcttgactcagtgatctgccttggcctcccaaactgttgggattacaggcacgagccaccgcatgcacctgaccagaatgctttttcataatgtaattcatcatgatgatggtattttcttgagcttatttagtacattttttcatacaataataatgttctttctatagagtgaaaaaaagagcaatttttttctgacttataatttgggggctggatgcggtacctcacacctgtaatcgcagcacttttggaggccaaggcaggaggccaaaggtggtggatcacttgagcccaggagttcaagaccagcctgagaaacatggcaaaaccccctctctactaaaaatttaaaamtttagccaggcatrgtggtgcacacctctcgtcccagcgactggttaggccgaggtgggagaatcacctgagcttgggaagttgaggtgcagtgagctgagatcgcactgctgcattccagccagggtgatgggagtgagaccgtgtcttaaacaaataataataatttgggggtgatgtagacagaaataaggacagaggtatgaaaaggaataattatttagcattttactagccagagatttgggcagtcccaaaaagcagcttttctaatctccctctcctttcccaaaaaactttaatcagatcctttagtatcctatcatctttgggttatttacatactactttttggaggggggattgtggaaagctatcgagatctttgaaagcattgatgattagcaagatgattattcctgtaagaagccttaagaggagaaatgcaagtgtaagttaacactggcttcttaaattggtcagtgaaagttggatgcctccaattttcttttaacattatgcatagatactagacaattttttatttttatttatttatttattttgagatggagtctcgctctttcacccaggccatagtgcagtggcacgatcttggctcattgcaacctccgtctccctggttcaagtgattctcctgcctcagcttcccgagtagcaggactacaggtgtgcaccaccatgcccaactaaatttttgtgtttttggtttttttgagacggagtctcgttctgtcacccaggctggagtgcagtggcgtgatctcggctcactgcaagctccgcctcctggtttcacaccattctcctgcctcagcctcccgagtagctgggactgcaggtgcccgccaccacacctggctaatttttttgtatttttagtagagacagggtttcaccgtgttagccaggatggtctcgatctcctgacctcgtgatctgcccgcctcagcctcccaaagtgctgggattacaggcatgagccaccgcgcccggccatcagagtagttttactgttgctaaaatgtacattttctcctctaccacaaataccaaagttgttaatgattttttagggcataagaagtagtttcttattgtacatatttatagttaaatttagtttttggataaaaaatattttcagaaaaatgtaaaaaaaagtactaattagaaagtaagtttttaaatcctatgtttttattaaaaaacaggattaatttggagtgatgtgaactttgaaaaatatgggttttaagtcatgtattgtttatgaactaaacgttctgtactaaaaaatatktaacatagaaaaagagtaaaaattgtggktttttttttgggttggaggaggaagccaaagacagtmattcttacactgtttcatctagtaatcaagtttaagaaagtcagtctaaaagcaaaaaacataagagtagatatgttgtgtcaatcaggtaacaatatggaattctaaccaaaaaaaatgaagatataggccgggcacggtgcctcacgtctataatcccagcactttgggaggccaaggcgggcgtatcgcgaggtcaggagttcgagacaagcctggccaacgtggcgaaaccccgtctygactaaaaataacaaaaattagctgagcatggtagtgggtgcctgtaatcccagctactcaggaggctgaagcaggagagtcacttgaacccaggaggtggaggttgcagtgagccgagatcgtgccatcgcactccagcctgggcagcaagagcaagactccgtctcaaaaaaaggaagatgtaacctgttctttagggattttggtttaaaaaatcgagaggatttactgtatttttaacataggtttgagaatataagtggagagcccatttgctggcaggcacttaygaatgttaatgtgagtcccactggatggttttctgaatcatttaaggttatcatggctctgagaatggactgtcataaggttaagagactcagtaatgctatagataggaaagtacttggagtagtttaaagtgcaaaataagtcaatgtagataaatttaaagtagaaatctggttttttgaagtaggtagttgccgttttaataaactaagcagaaaaacaaattgaagaaggccttttcttttgaggcatttagtcctctggaatttttcatggaaaggagaatctgttaggtagctagagctttcaccattctggtggatagtgtactatttcagtcagttaaactaaacatttaaagttgttatggttagttcaagtgagagtttatggcctaaatggcttttaatgaccctgaattttctgtttaagcagaacccatgtatcgtgggggtatagtgcagaatataatatcttagtgttcatctgtggatgattagatttatcgctttggrcctgatatacatggaattggcaaacataaaatagcttttatactatttttccctaataacattcctagaaagtcaagaagccattgtattgttgttcatagtggtgttatttcgtttaaaacaatgaagttagaatttattagtttgttttaaatattcttaaaactggataattaagtcctagaaaagccgagacttattttactagagcagataatcaagcttatgaaagaggrggtttcaagattttttataggtaatactttaggcgtttttcttgctgacataactaacatttattttctgtttatttttaagacgagcaaaaatcaaattaaagtagatcttgtagatgagaattttacagaattaagaggagaaatagcaggacctccagacacaccatatgaaggcaagtacttttttctgtatcaaaatattgtgcgtattagaacttgtctgaaacatttaatcagaataatcttaaacatctataaattatatggagggtaacttcatttggtttagataaacagcaatttaaaaaatactaaatttagatactgaatatagactggtatttcttactgaattttagctaatttttttctttccataaaacagttttagcagagctttgttacaggtattataggttagaatttaatagaataaaagatctggcatggtaaacctctaaatcatatggactgtagacactcagttacccttcatatggtatctaaaacagaccttgccttaaatatctcattggtaaaatgttgcttttgtttttaaagttcttctttctgtcattcagcatttcattcactcatgtcttcatacaggctgtagtccaaatgtttattttctttattcaggaaagcttttagtgattatttcaagccatagaaaggaggtggctttgctgaacttggtgttcacaaattaagtctgtagctactttagaccatggaatcgggtggtaagatacagaaataaaccttatagcattttactttcttattaggtgagtcttcattaattaatattactgtaaatttagattatatagcatataaccaaggctcttgcattaataactattcaaatatttgtttattagaaaacatataacaatatatggtaaccctaattatacagtctttacatgtattttctcatttaatcctttcagcaaatcttactaggtaaatacaacgattgctgtttcatagatgaagaaacaagttaagagaagtaacttgtttaaggtcaaccatctaagtagcacaactgatagcctttgtcttcaaagcctgtgcttttaatcactttatgtaaatcagaattgacttaatattggaagtggtggtgatgtctgttttgttttatctatttttttatatgcaaagttttactgttacccaagctggagagcagtggcatggtcatagctcattataaatttgaattcctaggctcaggtaatcctccagcttcctcagtagctagtactacaggtgcatgccaccatatccagttaaatactttgtgtgtgttttttgttgttcattttttgattgtttgttttttgagactgagtctctctgtcacccagcctggagtgcggtggtgaaatcttggctcactgcatcctccatctcccagaatcaagtgattctcctgccttagcctcctgagtagctgggattacaggcgcaccaccatgccggctaatttttgtatttttagtagagacagggtttcacaataacggccaggctggtcttgaacttctgaccttaggtgatccgcctgtcttggcctcccaaagtgttaggattacaggcgtgagccaccaatcccggccaccagctaaatactttcgagtggttctataattctgtaatgaacagttacccaaaacactttttttttttgagatggagtctcgctctgttgcccagcctggagtgcagtggcgcgatctcggctcactgcaagcttcgcctcctggattcacgccattctcctgcctcagccttccgagcagctgggactacgggcacccgccaccatgcccggctaattttttttgtatttttttagtagagacggtgtttcaccgtgttagccagaatggtctcgatctcctgacctcgtgatctgccagcctcggcctcccaaagtgctggggttacaggagtgagccaccgtgcccggctacccaaaacactttttaaaaatctaatattcttgaatattttcttgtttttaatccagattttttaagaccctagaatgtctttagcatattataccaattctgtttattcattttttttttttttttttttgggagacagagtcttgctctgtctctcacgctggagtgcagtggtacgatcttggctcactgcaacctccgcctcccgggttcaarcaattctcctgcctcagcctcccragtagctggtactacaggcgcccgccaccatgcccggctaatttttgtatttttagtagaggcggggtttcaccatattggccaggcttgtcttgaactcctgaccttgtgatctgcccacctcagcctcccaaagtgctgagattacaggcgtgagccaccgcaccgcacccagcccatttttttctttctttattggagagatggcatcttgccaagttaccgaggctggtctcaaacccctggcctaaaacaatcctcttgccttggtgtcccaaagtcttgggattctaggcatgagccattgtgcccaaccttgtaccaattcttaagtgatawaattttattttttgttttatagttcatacgagccatttctagatatttaattttttatgctgtttatcgagtgcttcctatctgcttggcttggtctggcagttttcatggatgctgtttcatttartcctttttgcaatcattaaatgtagaggagacctttagttatctttaaaaaatcagatgcttgtcctaatagcagatgtttttatataataatatactagcttcttcttgaagtcagaccttatagttattcttgaatttttttttaggttgttttgaagtatttttggaagatagtagggcagtgacattattctagaggtctgtcagcaaagttttaaattttttcattgatttttataaacaaggcacttcctgagctaaattagatagaagcaatatttaataggtagattaatttttttaattggataatgtatacttatatacattaagatatattaagatacactaattagccgggcgaggtggtgggcgcctgtggtcccagctactcgggaggctgaggcaggagaatggcgtgaaccccgggaggcggagccttcagtgagcccagatcgcgctgctgcactccagcctgggcgacagcgagactctgtcccaaaaagaaaaaaaaaaagatacattaagatatattcttatggccgagtgcggtggctcacacctgtaatcccagcactttgggaggctgaggcgggcagatcacgaggtcaggagatcgagaccgtcctggctaacacgatgaaaccccgtctctactaaaaatacaaaaaaattagccaggcgtgatggtgggcgcctgtagtcccagctacttgggaggctgaggcaggagaatggtgtgaacccgggaggcggagcttgcagtgagccgagattgtgccattgcactccagcctgggcaacagagcaagactccgtctcaaaaaaaaaaaaaaaaaagatatattctttattggttagaaacaagtttggtcattttttttcttttctttttcccgataccgagaatgggaccaaaagtttggtcatttaaaagtgcttatatctgcctgggcrgggtggctgatgcctgtaatcccagcactttgggaggctgaagcaggtggatcacgaggtcaggagttcaagaccagcctgaccaacgtggtgaaactccatctctactaaaaatacaaaaattagctgggtgtggtggcgtgcgcctataatcccagctactcaggaggctgaggcaggagaatcccttgaatccatgagacggaggttgcagtgagctgagatcgcaccactgcactccagcctgggcgacagagggagactgcatctcaaaaaaaaaaagtgcttatttctgctgctgctgctgctaaatgaatattttgataagattagatttaatatgctttttatatatttgaggtagagtaacttgaattctgttattttatataaaactattgagagaagttcattttgttaaggaaaacaccattcaaggacataaactttaatgctttttcttttaaatgtgacgataggttaaatgtttattgcaaggatgttgcagttttttgagtttttaaaaatctaaacttaaatgctaaagcaaaagtttacatgtggaatgttaagcaatttataaccattattaagtaatgaggcagctgtttttgtagtatttaaagaatcagattgtgaagtagagtactcacgggaaaatgccatattgtggatgttacttaactcaattttcttcacttcttttgccttaataattcaatgacaaaggaacagtttagttcttgagcttttcttcctaaaatttcttttaggtttatggaatcattgttgacagcttaaaaattctcattccttcctcatctcctctttgggttaagttaaatttaaagattgttaatttttaatattaaaagctattcttcaagaagttaatgttttaaagtaaaaactattayaatatgaataatatagttatcataargattccttagttgtattaccctgatcaaataatgctatgattaatgctaagtggtcatatattgaaagttgtcagagcgtgtaacataagggatagaaataagattttagagactctcgagtccagcattatttatataatatctgtgggccctcacactgctcctaagagattattttggccattaacaaagaactttgtatgatgggttatagagatggtttaatctggagtttaatcagaaaaaaaaaattcttaggaaggaaaaagaaaagcctatgtagtgctgaagccaaatttattataactatatttgaagctggcatttctaattctgggtatagacagttattgtcacaaaatttcttcaggtacccttctcttacctgtcagttttttttttctttccactacttttctttaaatttcattattgttatatgttctgtgattcaggcatttagttcaactcatgcatgaatcactatgggattctattaaaaagaactagccacsaggcataacggctcatgcctgtaatcccattactttgggaggctgaggcgggtagattatttgaggtcaggagtttgagaccagcttagccagcatgctgagaccctgtctctacttaaaaaaaaattaaaaaattagccaggcatggtggcgcgcacctgtagtcccagctacccaggaggctgaggtaggagaattgctggaactgggaggtgaaggttgcagtcagccgagatcgcaccattgcactccagtctgggcaacagagtgagaatccgcctcaartaaaaagtagccagaagagaggccaggcgcaatggcttatgcctgtaatcccagcactttgggaggctgaggcaggcggatcacctgaggccagaagttcaagcccagcctgaccaacatggtgaaacctcatctctactaaaaatacaaaaattagctgggcattgtggtgggcacctgtaaacccagttactcaggagactgaggcacaagatttgctggaacctgaaaggtggaggttgcagtgagccaagattgtgcctctgcactccagcctgggcaacagaacgaccctgtctcaggaaaaaaaaaaaaagagaaggattcgaaacaaaaagggcttgaagaaaatagtaccacttttattttttcctcagattcatagtcatccatccattcataacaatggaggagtgaggagatacatttgagagagtctagaatatactgaagaaagtctcttgtttgactttttgaagagctragtgtatagaattttgaagataatgttcctagcacacagttttttattttactttttattacagggaatttcagatatatraaaaagaagaataggccaggcgcagtggctcatgcctgtaatcccagctctttgggaggccgaggcgggtggatcacaaggtcaggagattgagaccatcctggctaacacggtgaaaccctgtctctactaaaaayacaaaaaaattagycrggcgtggtgaygggcgcctgtagtcccagctaatcgggaggctgaggcaggagaatggcgtgaacccgggaggcggagcttgcagtgagccgagatcccgccactgcactccagcctgggcgacagagcgagactccgtctcaaaaaaaaaaaaaaagaatataatgaaacctcttcagccagctttaataactatcagctcacggccatctgtgatctaatttattctttgattatcttgaaacaaaatctcatagtcttataaataaatatttcaatagaacagttttatttactatattttgtaatagtattctatgttattaatcttagagttaagagttgaatccagcctctcatccagtgtaagacttaccccttcagtgttttcttttcttttttctcttttctgtttatttgagatagattcttgctctgtcacgtaggctggagtgcagtggtgcgaacttggctcattgcaatatccacctcctgggttcaagcgattcttgtgcctcaacctcctgagtagctgggatcgtaggcacatgccacaatacccggctaatttttgtattttaggtagaggtggggtttcgccatgtttgccaggctagtcttgaacttctggcctcaagtgatctgcccacctcagcctcccaaagtgctgggattacaggcatgagccattgcacgcagcccagagtttcttaagaggcagttatcctttccttgagtaccccagttgtgagaagctagattgtgaagtggcacaatctgggctcactgcaagctccgcctcccaggtttcacgccatttcttctgcctcagcctcctgagtagctggggctacaggcgtccgccaccatgcccagctaattttttgtgtttttagtagagacggggtttcaccatgttagcnnnnnnnnnnnnnnnnnnnncctgacctcgtgatccacctgcctcagcctcccaaagtgctggtattacaggcatgagccaccgcgccgagcctagataagctttttaaaaatgctgtatagctgctagttgctcaagataacttcaaaacgaaacaaaaagttgccttctgtttgtatattactggttagaaaagctccttggtaaaattttgcattttatatacccatttaaaggaataatttgggctgggcacagtggctcacgcctgtgatcccagcactttgggaggttgaggcaggtggatcacgaggtcaggagatcgagaccatcctggctaacatggtgaaaccctgtctgtactaaaaacacaaaaaaattagccaggcgtggtgatgggcgcctgtagtctcagctacttgggaggctgaggcaggagaatggcgtgaacccgggaggtggagcttgaagtgagccgagatcacgccactgcactcyggcctgggcaacagagcgagactctgtctcaaaaaaaaaaaaaataaataaaataaaataaataaataaataaataaatgaaggaatagtttgtctttatgtctatctctcttgttgaattttgcttaaaaaataaaaaatatatttaaagttttttatattaaaatagagacaaggacttgctatattgagcaggctctactcaaactcctggcctagctttaagcagtcctcccacctcggcctcccaaagtgttgggattacaaggcattagccatggacccagcttgtttttattaggctagtgcaaaagtaattgcagtttaattgcacaaatattaacaaataagtattgacatttaatttagggcacaaatgaaaagattgggaccttatttcatttgcgagaaccagctagaagtagaattttgtttatggcataatctctgtcctttgtatcatctgtacttttatacctccttgccttcttttttttttctgacccttttgttgttgttgttatttagcaattcttaacaggatggattagaggacacagtggagattaaaactccaatagttaattgtcctgatgaaatgttggcattgcattgtctggattaaatgtatttatctctggccttgttactcactgataaactaatacagttgtatgaaatggatattctgtatgctttaaacaacctttaaattaaaaactagtgcttttgattactttctttctggatttcaactttaaaatgaatttttataattgaatataaaatagctgctctgaaaagctcatcagtatatttgtcttatatatttgaattgagcagcattcttaactttgttttccccatttttttaggaggaagataccaactagagataaaaataccagaaacatacccatttaatccccctaaggtattgtaagcctatttttgtgcatgaagttacaaaatattttatatttctgacctcattttattaatatatattttagggcttattaaagtcacagctttatganttgcttactgtgtaaacttgatgtggacaggattttagataatggcaggtggctggcttctgaaattagaatgaaaagcaaactcacccaaaggcagccagtaatggctcaaaactggaataggatgtacatctgacaatggctcatatactagatctagaaatacgtggcagtgttcccaaatttagagagcccttttacacatagacagaggttcttacttgactcaaagaagtatgtgttttaggagagtaccttctacattcagtcattatttgagtactttgtgccaagaactatagcagtaactaagacttatactgttcctgctttcatagagctcacattatagtggggaaaaaaaactgagyatggaattgcaactgtgataaatgttgaaagggagtatggaataccctaagatcatgtataacagggggacccaacctaaacttatttttggattgaaccactttctttatgtctctgcttttactgtcatcagcactttaggcattcaactttattccctgttttgtctattatttaatcacccttccatcttttccatttctactcattctctgcactgttggtctagaaatcttcctagagttcagttttgatcatgctgcttttctttccctgaataaagtctaaactccatggcttggcacttgaaacctagaacctgaccccagtcttgtttcccactctaatcttctaccacttccacccacartgtgggtctcattttccatcttagattgtttatttgtaggtgatgcttattcttccacagctttctatcagtttcacttaaatctttgtccctattatttaaaattctagttttctatgaggcccgagtatcactttcttcattaagctgagttcatcaaatgtttctccctctcctctctcagtagcattttatacaatttatatagtggcaacacaaatatagttccaactcatgtattattttggatatgtatctttctctagcttttatgctcctgagtcatataggtcttwtacrcctatatattatcagtaattcccaatagtatagtgtcccttgggcatatgatagcagtcactcagaatgttctagaatttgttcattcaacctattggttgttccagtttaagaatagatatgataatggaagttccagggtgattttggctcacttagcattatgggctgcctattagtctattgtttatgtacatctattttctgataagtctggtcgatttttttattgtgataaaatatgcatgacataaaatttaccattgtaatcatttttatgtgtgcagttcagtggcagtgtatttaccttgttgtttaacctttaccattatctgtctgtagaactttctcaccttcccaaactgaaacttcgtacccattaagcaataactccccattattccccgctcccagcttctggtaaccactgtttctgtttctccgagtttgattaattcagaaacctcatgtaagtggaatcataaaatgtcattttgtgtctggcttatatcacctagcataatgtcatcaaggttcattcatgttaaagcatgtgtcagaatttctttgtttttaaggctgaataatactccattataagtatagaccatattttgttttcttattcagctgttaatggatatttggattttgtttgtttgttttttgtttttttgagatggagtcttgctctgtctcccaggcaggagtgcagtggcacaatctcagctcactgcaagctctgcctcctgggttcacgccattctactgcctcagcctcccaagtagctgggactacaggcgtctgctacctcgcccggctaattttgttgttgttgttgttttcttttttttttttttgagatggagtctcgctctgccgcccaggctggagtacagtggcgcggtctcggctcactgcaacctctgtctcctgggttcaagcaattctcctgcctcagcctcctgagtagctgggattacaggcacccgccaccaagcccagctaatttttgtatttttagtagagatggcatttcaccatgttggccaggctggtcttgaactactgactccatctgaaaaaaagaaaagaaaaggaagtcatacacattaagtgggtgaattatgtctcagtaaaggtgtagcctttatagtgtataatagcttcaaagtaattgcatagttgtggctctgttttaggcagttcaacctgtaacttcatttaatttttgaaataaatattttattaaatctctcccacctcatccccacttttttttagagacagggtcttactctgttgctcagtctggagtttagtggcatgcacagtcatagcttagtgcagcctttaactcctggggtcaagtgatccctccaccttggcctcccaaagtgctgggattacaggcgtgaaccaccacatccactcccttgttttattaaagcgagaaaaatagactcaaaacataataactgaagtatgtctgatgtttttgctactacctcatcttgctattgaagccactgttacctggccaggcatggtggctcacgcctataatcccagcactttaggaagtcaaggcaggagaagcgtttgagctcgggagtttgagttcagcctggacaacatagcaaggccctgtctctagtcccaaaaaaaaaaaaaaagaaaaagaaaagcctctacatctctaattctagctgttccgtttggaggtagctttgacatttagaaacatcttcttaggttcaaccccaatttgtattactgtgacctcaaccaattagtcatagttgcagtttagtgttctttaaatacggtatatatgaaataaaatttttttaaataacaaaaaaaaataaagaacaaacaagaaaatgttatataccctacttgtggcattacgctcttgcagtaaatgttaatgaacatgataaatatgttctagatgtatactacgttgatttgaatttttactgattggtaaataaaatgagaagaatggggaatatttatgtaaatttcttgctgaattgtgtgttcacatgtgtttggactcaggcttaattttaagtcttatgaggtaaaattatcaaggtagctggttatattctcattactactgtgcagctaaaatttgagaaaagatgaaaaattcacatttgtcttaccatggtcacagaatgttttgtgtttattattatgcaataaattattgaccggaagagtaggcttacttctaaaacagagaaaatatatctttgaatcaggtgataatagtgtagaaggaatttgattaaatgcatacaaccaatatgatttctagcattaaattgcaatgtatattgtgttagtgaaaaaatcattagtaaaaatatagtccagtggtgtatcctgcttgaatagagcaggctggatgcggtggtttgctcgcctgtaatcccagcacctagggaggcagggggcaggcagatggcttgagctcagaagttcatgaccaaatggcaaaaacctgtctctactaaaaatgccaaaaacwaaacaaaaaatactagtctggtatggtggcatgcgcctgtagtctcagctactcaggaggctaaggcacaagaattgcttgaacctggcaggcagaggttgcagtgagccgagatcatgccactgcactgcagcctggacaagagagtaagactctgtctcaaaaaaaaaaagaaattaagttgtgaattttgctctttttctttggtgttatcatcatactttttacatgttaagttgtatatacataccaatgctaataatctttaatgagcgtatgctcatctgtacatgcatattcaaaatagcattttcttttgtatgataagggagttaaagctggcttaataatataatatgctttgagaccctgtctcaaaaataaataaaaataagatacggccaggcgcggtggctcacgcctgtaatcccaggactctgggaggccgaggtgggtggatcaccagaggtcaggagttcaagactagcctggccgacatggtgaaaccccatctctactaaaaataattagccaggtgtagtggcacgtgcctgtaatcccagctactcagaaggctgaggcaggagaatcgcttgaacccaagaggcggaggttgcagtaagctaagatcgcaccactgcactccagcctggacgacagagtgagactccatctcaaaaaaaacaaaaacaaaaaaaagcaagaaacacacttcacatatcttcaggtcttaaaactggaagttacagatggaaatatgaactcacatctacmatgaagtgggagctgaagtgttaaactaaagagtgaatgaaatttacagtgcatcctgtaggaagagataagaaccgttgatgctatgccaatattgataatttaagaatagtttccttcatttctgtctgggaacattgagaatctgttgttacatagtgttcagatttccgtttttattcattgagtgcttcccaaagctagtgagtgttctgaagttcccagacaacgctactactagttttgtatataaaaataaggagacattattattatattcttaatagatacagggtcttgctacattgcccaggctggtctcaaactcatagcctcaaacagtcttcccaccttggcctcccaaattgttgagattacgtgcttgattcactgtgctgggccacggagataatcttgaagattaaattctttttttttttttttacaaaatttttattttattttattttttgagacagggtcttgctgtgttgcccaggctggagtacagtggcatgatcatggctcactgcaacctctgcctcctgggctcaagcgatcctctcacctcagccttcgagtagcttggactacaggcataccccaccatgcctgactaatttttttgtattttgtagagatggggtttcaccttgttgcccaggctgctctcgaactcctgggtccaagtgatttcacccacctcagcctcytgaagtattggkattacaggtatgagccaccacgcctggcccctgaagattaaattctttattggatcatctgcaaattcaaaattcttttttcttttcttcttgtttttttttttcaaatagggacggggtctcaccatgttgcccaggctggtctcgaactcctgagcttaagcagcccacctgccttggcttcccaaactgctaggattatagacatgagccaccattcccagcccaaattcaaaattatttatttctaactatagattatagtacaaagtaagaattagttcagtaatttaattgggtcttggcttttttcctatgtatctacagagaattctgtatagaagacccttctttaaaaagcagtgctgaacgccatatcctgctttttgctcacacctgtaatcctagcactgtgggaggctgaggtgggtggatcacttgagcccaagagttcgagaaaagcctaagcaacatggtgaaaccctgttcttgtgtccacaaaaaatatgaaaattagccaggagtgatggcgcacgcctgtagtcccaactactcaggaggctgaggcagaagaattgagctcaggagctcgaggatgcagtgagccgagattgcgccactgcacttcagccaaggtgacagagtaagaccctgtctcaaaaataaataaaaaaggccacgcgcagtggctcatgcctgtaatcctagcattttgggaggctgaggcgggcggatcactgggaattccagaccagcctggccaacatggtgaaaccctgtcactactaaaaaatagaaaaattagtcgggtgtggtggcgcacacacgtagtcccagctactggggagactgaggcgggagagtcacttcggcccgggagacagaggttgcagtgaaccgagatcgcaccaccgcactccagcccaggcaaccaagtgagactctgtctcaataaaagtaaaaaaataagattaaaacaaraggcaaaatacacttcacatatcttcagctcacttgactgaaccgtaatccttctgacatcttcaatagtgttttaaaattatattttctaatcttgttgaaaatactaaaccacatggggttttttgtatgtgtttgttttgttttgtttttgagacggagtctcgctctgtcccccaggctggagtgcagtggcacgatctcagctcactgcaagctccatctccctttacgccattctcctgcctcagccatccgagtagttgggactgcagtagctgggactacaggcgcccgccatcacgcctggctaatttttttttttttctttttttttcttttttttttttttttttgagacggcgtctggctctgtcgcccaggctggagtgcagtggcacaatctcggctcactgcaagctccgcttcccaggttcacgccattctcctgcctcagcctcccgagtagctgggactacaggcgcccgccaccgcgcccggctaattttttgtatttttagtagagacggggtttcaccgtgttagccaggatggtctcaatctcctgaccttgtgatccacctgcctcgccctcccaaagtgctgggattacaggcatgagccactgcgcccagccaccattttaaagttataaaatgctgtgaattccttgagttctgacattatggcatatgcttgtttatgaattgaactcaatagtaaatagaggttgattattcaaaattcaaaaatccgagatttgaaatgctccaaaatctgaaactttttgagtgtttacatgtcactcaaagaaaatgctcgttggagcattttggatttcagattttcagataagaaatactcagcatgggccaagcactgtggcccactcatgcctgtaatcccagcagtttgggaggccgagaggggaggattgcctgagcccagaaggttaggactgcagtgagccatgatcgcaccactccactccagcctgggcaacgggagtgagaccctgtctccaaaaaacagaaagaaagaaaaagaaatactcaacctgtattaagatgtgaaatgtgtggttatatctcttacaaagcaatgtttgatgtgggctcagtggctcacgcctataatcctagtactttgggagcctatgtcgggtggatctcttaagcccaggagttcaagaccagcctgggtaatatggtgaaacccccaacactattagaaataaaagaattggctgggtgtggtggtgtgtgcctatagtcacagctacttttaagatggatcacctgagtctgggaagttgaggttgcagtgagccacagcagtgagaccttctctgsgggggaaaaaagggagaaatgtttgttgtrcataagccctatattactgtcttacttagcttgcattgtatttgatatttagccttataataacatttttgccgtaatattaagtgcacattcattccatgtgagtcgcttacatctggagatgctttattaagtaggatggatacagtgtcttttagggaagaccggacaaacaaggcagaaatcacagaagtgtaattaatatactatgacaaaggaaactgcaggtgtgtggaatagatcaggaagaagtgatatggaaagtgaaacttgaagagtaggaattagttgggagaagagggcacagaggtatgttattgagaaaacaaatatgtatgaaggcccagaacaggggaaaagtttaatatgactttttgagcaggagagtggagtgtgggatagaggtaaaaattgagatttcaggagtagtctaaggccaggttaagagtgtgggcttggccgggcatgatggctccatgcctctaatcccagcacttagggaggccgaggcgggtggatcacctgaggtcaggagtttgagaccagcctggccaacatggcgaaaccccatcttgccatgttggcgctccaagatcgcgccactgcactccagactccagcctgagcgacagcgcgagactccttctcaaaaaaaaagagagagagagtgggcccacatgaagggaatgagaggtcattaatggtccttaaagcagcatagtgatgcaaatcagatttgttttaaagggctctctttagttttggtgcggaaaataaattggagggaacagaagggaaggcagtaaagtcaggagactgtgtagtaacctagatgatgaatgattgtctcctttaatgagaaggtggatggagagaagtaggtatctttgaaagtagtaagattattaagactgaaaagaatcaagcatagcaagaatgaaggaatggaaagtatcttattttcggtattttaaagtcattggcgaattaaagtgcctttttagattgaatatgagttagcaggaggtaaggaagtagaaataggtagtgtaaacaaatcaagaagtcacaaagagaagagagaagtggaaactcttagcttctttccataaatagcttaggagcatatattaaagagtccgtttttttccagttggtcgtgttctgttgcccaggctgtagtacagtggcacgatcacggcttgctgcagctcaacctttcagattcaagtaatcctcatgcctcagctccctagtagctgggagtacaggtgtgtgccaccatgcccagctaatttttttatttgtagagacatggtctcactatgttgcccaggctggtctcaaactcttgggctaaagtgatcctcccgcctcagcctcccaaaatgttgagattacagtgtgtgagtgctaatttttgtgaagttcttagaacattaattggcacatagtaattaatctactaagtgtcaaagaatatgggctcagctggtcattgtcatatgtgtcagagataggaatacaagatcctccaaaagttcatgagtaagagctgatgaactctttaatttcatggtgttcccctagagttttagcattttcacttgttggtttgttattcttccrtaatgagacaaataatgagatgattggactcagaatctggaatcagattgtgggagtttacattgtgctctgtttagctatttaattagatttcttaaactctaagccttagtatctcctcagtgtttgctacatcataataggcatttcaataataagaatttgagaaaaaattctacagaaaaattaagagaagcacagccacttactatttgtgcttccattcactggttttacttacttttttcctcaaacctattctgcaccctgcctcacatgaagaaaagtgccatttactatttatgtttttattttatgtactattttatttaccaaaatggattttattctctgttgtattctcatagcatctaccattattctaggtaaattgtaagctcctagtaattgttgggtttgtttaaaggcggaacatttattaaagagtttgaaaacaacatatgttagtgacaacattcagcttactggatcctttgtcttctacaccccttctttcacctaggcaaaatgatgtaatagatatagggacctttctttttttagtttgaagatttcattttcttgtagttctacttaaactgttttatttctgttactgaaaaactcaagtgtgctttatattctaggtccggtttatcactaaaatatggcatcctaatattagttccgtcacaggggctatttgtttggatatcctgaaagatcaatggtaagagattttgaattcaccttctctccttctcatatgaataccaagactgtaagagtgttaaatgtgtaattgcctcaaaacatatattatactttatcttgtttgggcagtaactttataaagtctcttaagtgcataactgaaaatgcattataattgagatcacaatccatatttaaatagaaacttgttagataatgttagatgctagctttacactttgaaaagccttggatttcatttgttattttggtaaatttgattctttgctatcttaagaagatatttgtgaaagactaaaaaagtagaaagtaagtattgaagtagtcatatcccccttagatggaatgtaagttacaaaattgttgcaggttgtgttaattgagcacagttaagattttggtttatgaattctaacaaggagcacctttgtaggtgatgtcttcatttggatagcggtattgtgctttcactttttttgtctgatttgctctgcacagcattaaatgttttaagagttcctactctggagccaccaggttcacatcttggctctccagtttaccaagctgcatggttatgagcaaattacctaaagtctgtgtgccttagtgtcctcatctgcaaaatgggttgatacccacttcatagagctcagaggattaaataagttactttatgtaattcccttagaatagagctttgcttttgtttttgtttgtttgttttgagacagggtcttgccctgttgcccaggctggagtgcagtggcgcaatcacagctcactgcagccttgacctctaaagcccaagtagtcctaccacctcagcctcccaagtagctgggaatacaggcgcataccaccacacctggctaatgtttgtattttttttagagacagggttcctgttgccyaggctggaagctttgtgtagtctgacaatgataaagatgatagttaattatttagcacatgattttatagatggaaaaactaagaccaaaggtatgaaaagtaattggagtgggagaaaaccataaaactagaaaaaatcaattmagtgagtgtctattatgacctttccttctgattttactcttttacaagagaaggtataacagaacaaaatagaacagcagttggtaagaagacttggagccaaaactgtgtttaatgggcccagcctggctgcctaatcttctaaagattatatattatttttggtactagaatttttaagctatgtttttttgggtgtttttttttttgttttttgttttttkttttttgtttttttttgagacagagtttcactcttgtcacccaggctggagtgcagtggcacgatcttggctcactgcaacctctgcctaccgggttcaagcgattctcctgccttagcctcccgagtagctgggactacaggcgtgcgccatcatgcccagctaatttttgtatttttagtagagatgaggtttcaccatgttggccaggctggtctcaaactcctgagctcaggtgatccacctgcctcagcctcccaaagtgttgggattacaggcatgagccaccacacccggcctaagctatgtgattgatttgttaagaaaggggagaaaaaaaggtacctgaaagaaaatcaaataggaatgacagtatttagtgtatggccagtggtttacttagtaactggatgaacagactagagttacaggttttgttttgtttttttttctattccagtagtatatctgagtaaatcctgtccctcagtagatcatctcttgggatctggtttcttgatctgtatttcaatatattctatattccatatagatcaagactttctaacrtaaagcagtgtggaatagacttactttttatcttctctgttactcttttgatttgtgacttttaccaatttattgaacttcttaagtgtcagtgtttttaatccattaggttatcgccaaggcctctaaaagctctaagattcagtgatatgaatacatatttgcagtattagagacattgtactgttttcacttggcttctaggacattagattttctattctccctttcctatgctcactcccagattccttaaccagttccttgcatctttgtgtattagaatgcctcagggataagtcttggatttctgctcctttctagctgcactcacttccttggtaagctcatctgatttcatcataacttcacctttacatactgcaractcacaaattatcttccctgaacttgagactcctatcctgctgcctgcttatcatctttacttgactatataacgaacatatcaaacataaactgaactgatagtctcctaacctgaaacctgcttctatagtcttccccaactaagttattggcaaatacgtccttgcattttctcaggccaaaatcacatcatgatccttggcatttctttctctggtaccccatgccctgtctgcagatctattggcaaaacctcccaacatcttaacagcagctttactaccacacttttccaaacggattacctctagcctgcatgattgcattagtctgcctccctgcttctggcttttacctactcaggctattcccagcacccagmatgacaactttgaaaacaaagcttgccgccacgtgcagtggctcatgcctgtaattccaacgctttagaaggcggaagtgggcagatcgcttgaggtcagaagtttgagaccagcctggccaacatggtgaaaccccatctctaccaaaaataaataaattagctgggcatggtggtgcatacctgtaatcccagctacttgggaggctgaggcaggagaatcgcttgaacctgggaggcggaagttgcagttagcagagatcatgccattgcactctagcctgggcgacggagtgagaccccatctcaaaaataaaaaaaaaaaagaaagaaaaagtttgcagatgaaaacttcccattgacttctctttttgcccagagttaagccaacagtactattacttgtaattatcttcctatatagctagttgaaagattatggtgtgtatatatagagagagaagttgaatttttataccaaaacaytttctcctaatatgatgtgcaggaacaaaacattttttacatcaactattcccttttcctaaggcaggtgaataatcttgttttttatctgtacaattgaaatattagaatataccaaagacacattagataaaataggtgagactagatattcatgaagtcattactttattcccagagctttactgaggtataattgacatttagtgcatatccatatttaaatgtggatgtttaggtttcagaactggaatttgatagagaaaaatacagagtcttaatcataggaaaaatgaattacataaataattttcagcaggcatactagaaaataattggttaatcttggtcttttattaatgcatctaggggtgatgatatacctttattaatatttaacttattttagtatatttgtttattattattatttttttttgaggcaaagtcttgctctgtcacccaggctggagtgcaatggtgccatctctgctcactgcaacctccgcctcccgggctcaagcagttctcctgcctcggcctcctaagtatctgggattacattacaggcatgtgccaccacgcccagctaatttttttctatttttagtagagacagggttccaccgtgttggccaggctggtctcaaactcctgacctcaggtgatccaccggcctcggcctcccagagtgctgcaatgacaggcgtgagccactgtgcccggcccctggtttatttcttaattccacaacttgtgctgtgtggaaactattttctaatgttttccactgacacttactatgactaatggtgtctacttacctggggaagaaaatggcaacacataaaaatttcactcagtgacgctgcccttctaaaagacacaaacaggcacagaatatctgcctggtcgataaggtatgctcagcatcattactcatcagggaaatgcaaatgaaaatcacaataagataactactacatgcctgtaaacacaaatacctcatgcattgctggtaagaatgtggcttaaccaggcagggcacggtggctcatgcctgttatcccaacactttgggaggccaaggtaggtggattgcttgaggtcaggagttcaagaccagcctggccaacatggtgaaaccccatctctactaaaaatacaaaaattagccaggcgtgggtggtgggcacctgtaatcccagctactcgtggggctgagacaggagaatctcttgaacctgggaggcagaggttgcagtgagctgacatcgcgccattgcactccagcctgggtgacagagcgagactctgnnnnnnnnnnnnnnnnnnnntctgctcttcctctgctgtcagaatcctgctctccccaaagccaaatggcagtgcaggccatgtgtgtgcacaatggcttcctcttgtttctacctgttctggaatatctgtaattcctttcatccttctatatgaactgtaaaatctaggtaactgtgacccttaaaacacaataattgtcagtaagatagaaatcatgcatcagtgaagaataaggtcttcagagggctgggcacgggtggctcacgcctgcaatcccagcactttaggaggctgaagcaggcggatcacgaggccaggagttcgagatcagcctggccaacatggtgaaaccccatctctactaaaaatacaaaaattagccaggcgtgggtggtgggcacctgtaatcccagctactcgtggggctgagacaggagaatctcttgaacctgggaggcagaggttgcagtgagctgacatcgcgccattgcactccagcctgggtgacagagcgagactctgtcacaaaaaaaaaaaaaaaaaaaaaaccagaaaaaaaaaaaaaacaaataatgtggtttaaccacttaaagccagtaatatctaccaaagctaaacatacaccttcagtatgccctatcagcttcattcctaggtatatatctaaaagaaattagtgtctatgcctactttttaaaagacatgtataaaagaatatttatggcagatttattaatagccccaacgggaaataacttagatgtctcatcaacaagaaaattgatacattgtgatcacacaytggagcactacataaacagtaaaaaagagcctatcattgacacaaacaacatggatgagactcagtcatgttgagtgacaaaagccagacacaaaagaatacatactgtatggttcaatttttatgaaattgaagatgaaccagaatttatggtgataaaaaatacgatagcccagcgcagtggctcacgcctgtaatcccagcactttgggaggccgaggcgggcggatcatgaggtcaggagattgagaccatcctggctaacacggtgaaaccccgtctctactaaaaatacaaaaaattagctacagcgagactccgtctcaaaaaataaaaattaaaattaaaaaaaattaaaacaaataaaaaaatacgatagtggtgagggtgggcaggagttgtgagtaggaggagcagaagtgaggctttgtaatgctaaaaatactctatttttatccaggcggtggttacatggatatatacagatataaaaattcatccagctgcatggtatcttaactttgcttaaactttaacaaaaaaatttatagcagctgggtacaatggtgcacacctgtagtcccagctactcaggaggctgaggcaagaggattgcttaagaccagcaagtctgggctgaagtgtgctatgccagtcaggtgtccacattaagttgggcataagtatggtgacctcttaggaacagaggaccaccagattgcctaaggagacgtgaaccagacaaggttggaaacagagcaggtcaaaactcctgtgctagtcaatagtgagataacacctgtgaatagccactgcatcccagccttgacaacatagtgaaacccaatctctttaaaaaataaaatctttagtataaaagctgccatcctctttaagtagcatttagtgttttgaatgaacgtggtttaattattgatgatctgttggaagatccttaacagaaaagttagtcaacggtatgaacaattcacatgattattctacatagtaaggcctgagtccttatgaatgaatatatgaatatttacatagccacattaactatgtcttactgatttgagacttgagcaaratttatttaccggacatagatttatgaggtactgatttattcatattatcttctaaattataaagattgacacattttgaaatttcatattcctgtttgcctgytaggatttgttataatagatttaagttgattgtatatactgatcctaaagatatcagtacaatatagatttgatcactactttgtaaatagaagaagaaatggaacaaaagcatgttttcagttatatactttttcacattactgaatttagattagagcagtccaaaattgcacacatttctttatattatcgaagatacartttctatagtattcattttttttttttaaagttttaggccggttgctggccggatgtggtggctgatgcctataatcccagcagtttgggaggccgaggtgggtggatcacgaggttgggagttcaagaccagcctgggcaagatggtgaaaccccgtctccactaaaaataaaaataaaaaattagccgggcgtagtggcatgcgcctgtaatcctagctactctggaggctgaggcagagaatcgcttaaacctggaggggcagaggttgcagtgagccgagatcgcctcactgcactgcagcctgggctacagagcgagactcccatctcagtaaaataataataataataataataataataaatcttgaaatttattttatttatttacttattgtagagatggggtcttgctatgttgcccaagctggtctcaagcacctggcctcaagtgatccttccaccttggcctcctgaagtgctaagattacagacttgaccccctactcctggtctatagtatttagggttagaaaaataggtgwggtaggctgtttttgcattgccataaaggaatacctgaaactgagtaatttataaggaaaagaggttccatttggcttctgattcttcaggctgtataggaagtgtggtgccaacatcagctcaatttctggtgaggcctcagggagcttatgatcacagcagaagatgaaagaggagcctgtttcacatcatgagggtagaaaatagagtggaagcaacagagagcagggaagttgccacatacttttaaaacactttgtttgagacagtctcacactgttgagcaggctggtgtgcaatggcacartcttggctcactgcagcctccgcctgctgggttcaagcgattctcctgcctcatcctcctgagtagctgggactacaggtgcgtgctatcacgcctggctagtttttgtatttttagtgagatggtgtttcactatgttggccaggctggtctcgaactcctgacctcatgatctgccctyggcctcctaaagtgttgggattacaggcgtgagccacgcacccggccaaaaaacactttttttttttttttttttttttttttggagactgtcgcccaagctggagtacaatggtgcaatcttggctcactgcaacctccacctcccgggtttaagcacttctcgtgccctcatgcctcagcctcctgagtagctgggattacaggcacgtgccaccatgcccagctaatatttgtgtttttaatacagatagacttttgccatgttggccaggctggtctggaattcctgggctcaagtgatccacccgccttggcctcccaaattgctggggttaaaggcatgagccactgcatccagccttaaaacacttttttttttttctttgagacagagtttcgctcttgttacccgggctggagtgcaatgtcacgatgttggctcactgcaacctccacctcccgggtgcaagtgattctcctgcctcagcctcccaagtagctgggattacaggcatgtgccaccacacccagctaattttgtaattttagtagagacggggtttctccatgttggtcaggctggtctcgaactcccaacctcggatcatctgtgcacctgacctcccaaagtgctgggattacaggcatgagccaccacgcccagccaaaacacttaaaacaaccagctctcacatgaactcagtcatcaccaatggggtggcactaagccattcatgagcgatttgcccccaggatccaaacacctctccccaggctccaccgccaacactgggaattacattgcagcatgagatttggagaggacaaatatccaaactatatcaataggttttgtttggatatttatttttatttttattttttgagacagaatctcactctgccacccagactagagtgctgtggctcactgcagcctcaaccttccaggctcaattggtcttcccacctcagccttctgagtaactgtaactacagtcacgtgctaccacacttggctaattttttgtagagacagagtttcacctcattgcccaggctggtcttaaactcctgggctcaagcgatctacctgcttcagcctcccaaagtgctgagactgcaggcgtgagccatcgtgcctgacctcaattattgaactaattttcttacaattaattattaaaactggctgtgtgcagtgactcaaacctgtaatcctagcatttgggaggccaaggcaggaggattgcttgagcccaggtgtttgagaccagcactggcaacatggcaagaccctgtctgtacaaaaaattttaaaattagctgggcatggtgttgcgtgcctgtagtctaaggtgagaaaatcacttgagccttgaaagtcagggctgcagtgagccgtgttcacacattctgtgaaaattcaatcaggcagaaaagtgacaacgttttctctttgacattgttatgaattgtatctaaatttgcagctctagattttttttcaattttgagggttttgagagcaaactgcctttttttttttttcttttctctttttttcttttgcccctgccagacatggtttttctctgtcgcctaggctggagtgcagtgacaacgatcacagctcactgcagccttgaccttccaggccccaagcattcttcccacctcagcytatcacaggtgcacaccaccatgcctggctaattttttaaaattactytttgtagagatgggtcttgccatgttgcccatgctggctggtactcaagcaatacccctgttttgacttcccaaagtgctaggattataggcatgagccactgcccccggctgatttctttttctttaacctcctcttcattcaagtttctgattcttgaaatggtaatctagagtctgtagtagattgtgtcgtcacaataggaagacagtgcaaatagaggaaatagacagtatttataataaggatttttgaatctctaagaacttattaattttttttttttttcgagacaagagtctcactctgtggcccaggctggagtgcagtggcgcgatctcggctgactgtaagctccgcctcctggcctcagccattctcctacctcagcctcctgagcagctgtgactacaggcacctgycaccactccaggctaattttttgtatttttagtagagatagggtttcacygtgttagccaggatggtctcaatctcctgacctcgtgatccgcccgccttggcctcccaaagcgctaggattataggcgtgagccactgtgtctggcctacttaaaactttttaagaaaatttttgtaaagtacacagcataaaatttactaggccaggcatcgtggctcatgcctgctgtaatcccagcactttgggaggccaaggtgggtggatcgcttgagcccaggagttcaagaccagcctgggcaacatggtgaaactccatctctacaaaaaatacaaaaattagccaggcatggtggcgtgagtctgtagtcccagctacttgggaggctgaggttggaggatcgcttaagctcaggaggttgaggttgaagctacagggatctgtgatcacaccactgcattccagcctaagtgaccgtgagaccctgtctcaaataagcagggccaggcgcagtggctcacgcgtataatcccagcactttgggaggccgagatggatggatcacctgaggtcaggagttccagaccagcctgaccaatatggtgaaatcctgtctttaccaaaaatacaaaaacgttagccaagtctggtagcatgcgactgtagtcccagctactagggagaatcgcttgaacctgggaggcagaggttgcagtgagccaagattgtgccactgcactccagcctgggcaacagagggagactccatctcaaataaataagtaagtaggctgggcgtggtggctcttgcctgtaaccccagcactttgggaggccgaggcggatggatcacctgaagtcaggatatatatatacatacatacatacatacatacatacatacatacacacacacacatacayatacacatacacaaaagccaaacattttgttgatccattcatccatccatggaaaccttaagttgcttctaccttctggctattgtgaataatattgttatgaacatttatatattaatactccagttactgctttcagttcttttggatgtatacccataagtggaatcactggattatatagtaactctgtgttttttgtgtgtgtttttgtctgtgtgtgtttttgttttttgtttttttttgagggactgccatactgtttcccatagagttttcaccattttacattcccacaagtagtgcacaagagttccatttctccacaacctggctaacaattaccattttttttatggtagccattctaatggatatgaagtgataggtcattgtggttccaatttgcatttccctaatgattagtggtgttgagcatctttttatgtgtttattgacactttatatatcttctttggagaaacgtctgttcacatcccttgtcgattttttaaccaggttttttttttttgttattgagttgtaggagttctttatgtattatggatattaagccctcaccagataaatgatttggaaatattttctcctgcaacacagaagtttttttgttttaagtagtggggtcttgctgtgttgcccaagctggcatcgaactcttgggctcaggtgatcctcccacctcagcctcccaagtagctgggactacaggtgtgtgccaccacaccagcttcacaggagtgtttatttttatttctaatttttattattttctttctttctttttttcgagacagagtctcgctctgtcgcccaggctggattgcagtgacacaatctcggcttactgcagcctctgcctcctgggtgttcaagcagttctcctgcctcagcttcccacgtagctgggattacaaacatgcaccaccatgcctggctaattttgtgtttttaatagagatggtgttttaccatgttggccaggctggtctcgaactcctgacctcaggtgatccacctgcctcagcttcccagagtgctgggattacaggtgtgagccactgcatgcggccaggagtttttaactttgataaaattgtcgtgcatattctcgtattttttgctttggtttcctgtacctttgatgtcatatccaaggaatcattgccaaattcagtgtcatgaagttttctcccttatgtttttgctttctagctcttacatttaggtctttgatccattttgagttaatttttatatatggtataatgtaagggtccagcttcactaatttgagagattatcagttttctttttttctgtttttttttttttttgtgtgtgtgttttgtttgtttgtttgtttgttttttgagatggagtctggctctgtcgcccaggctggagtgcagtgatcttgactcatttcaagctctgcctcccggattcacgccattctcctgcctcagcctccagagtagctgggactacaggcgcctgccaccacgcccggctaatttttttgtattttagtagagacggagtttcaccatgtttgccaggatggtctcgatctcctgaccttgtgattcacccacctcggcctcccaaagtgttgggattacaggcatgagccactgcgcccggcccaggattatcagttttcaagaaaagtgttyattgccttgttgagatatatgttagactacctatgtgatagtatgaaggacttgcaagatttagatgcttttattttacatgcctttatgtttttctttcaaattaaaataaatattatgagtttaatagttgccttagtattaaatacttcctttgagtgaaaatttttctttgctattcaggtaaatttcctttaaataaataattttattaaaaattacataagattttgtttcaggtgacaccatggattttaaaattagattgcttagaaagtccattggaaaattaaatagtgcacttaagtgttgtrtatttcattggttatattttgtctttgtgttccttatgttatttttggtggtttaagtcagctttatgctgataacatctaggtagcttttgatatgtatgtgcctttaaacattctctttgaaattactcaaactatcaaatgaaattagagaaagaatttccccttgttattgtgagactagaaagacgggccattgcggtgtcttacacctgtaatcccagcactttgggaggcagaagtggacggttcacctgaggtcaggagtttgagaccagcctggccaacacggtaaaaccccgtctctaccaaaaaaaaaaaaaaaaaaaatcagccaggcatggtagcaggcgcctgtaatcccagccacccaggaggctctgaggcagaagaattgcttgaacctgggaggcaaaggttgcagtgagccaagattgcaccactgcactccagcctgggggacagagtgagacttcgtttccaaaaaaaaaaaaaaaaaaatgtaaaaaatggtgagtagaaagacaagaatgaacatttgaggactgagtttggctttttgttttgactcatgtcttaaaagaatattgtgcatttaaaagagatgaggtttcaccatcttgcccaggctggtctcaaacccctgggttcaagcgatcttcctgcctcagcctctcaaagtacagagattacaggcatgaaccaccgtgcctggtcctatttttaattttttgaggaaactccatactgtttttccataatggttgtactaatttgtattcccaccagcagtgtgcgagggtttcctttcctttacatcatcaccaacacttgttcattgtttttatagtagccgttctaacgagtgctaggtgatatctcattttggtttrttttttatttatctatttttgatggagtatcactctgtcacccaggctagagtgcagtggcatgatctcagctcactgcaacctcagcctyccaaatagctgggattagaggtgtgcactatcacggccagaaaatttttgtgtatttagtagagatggggtttcgccatgttgcccaggtaggtctcgagctcctgacctcaagttcaggtgatctgcccacctcagccttccaaagtattgggattacagacatgagccaccatgcccaccctaattaacagtatttgtcaaattttaatgtgcatcagaatcacctggaggacctgttaaaacaaccctggagtttctttttgttttttttttttttcgttttgttttttgttttttattttgtggaaaacaaaagtagaaaaactaaaaccccaaactccagaaaaaatcctaaaaaatgttttttcttaaaaaatactgtatgtctctactcctctccctccctcccaacagcccttcttgtgttcttttctaagtgccttacccccccacccccatgactatccattgttcttgctattgtgcccccacttcccaatatctatccaggatgtgcaccccatgttctcttacctggcgtcttacttttttctccctcaaatttcagcaagcctcatacttgcagtctcatttcgccagcatgcaagaactgtctcccccttccttttctgggactcaataatcttttccccttaccactccctcaccccaggcmtatattataagcaggagcatgtcctcctgccaaattccctccctgttcccacccaccccccmacccttcttatctcgagaaatgtcagaaccttcccctgggcaggcttagccaggaataaaacatttttgtcttccctcgttctataggacccttttccctccctccacatacacatgcgcctctaagagaaggaaatctttctctgggaccccgtattcccctggcctactccaagaaccctgtcccccgctccagcttcttgcactctcaagagcaacaacagtcttctctccaaggaatcatcttccctctctcaggatgtgtgcatctgctcagcctcccactcttacctttctgccccagaccccccacccaccaattctcctgggccaaagagccctttccccacctagcccagggaccccagcctccgggcctccacgcctgcgcggctagcggatgaggacattaatctcggccacactggtctccagcacgttctcggcggtggtcttgccgtgttgctccttgagatgccgcctaatggcaggcttgtgggcgaagcgcatgtcgcagtaggagcagcggtagggctgcgctcccgagtgcaggttgaggtggtcgtgcagggtggacttctgtgtgaagcacttgccgcagatgccgcacgagtgtgacttgacaccacgatgcacgttcctgtggtggttgaggttgttgctgtggttgaactccttgccacagcgagggcacatgaagatgaagtgctgctgccgcatgtggaagaccagcttctccacgccctggaacacttccgggcacttggtgcacttgatgttctttaaggggtttccacctgagaagctcccaggcaggggtccctggctgccccccgccccccgggcaaccatggccgccgctgctgcttccaccaggcccgaggtggcccccacgctggcccggcctcccggagtcaacagcaggctctccccttctgcgttctccgacaggctatagcaggccttcaccacaccctgcggtggggccacagtgctggggggcacgctgctctgggccagctccccaaggtggccacccacggagcctccaatgcccaggccccctcccaggcctccagggggcttgagccggtgtgcgatgtccagggccgactccaccttgacgatgcagatgtcagatacgtcctcatcctcatcctcttcctcggctttcagctccaagtcctcatccagtgggaactccagcttcactggccgcaggagtggaggggatagaggaggtggggggtgggggcttcggggctggctttggggtcctggctggagggaggagggacttgttggcgctgacgctgctcacaaggctagcctcacggaccccatcctctttgaggcctattttgggctcagtgaactggctgagggcattctggcatttctccaccacgtgctccatctgcaggtaggaggtggctgtaagatagttgacgatgtccctaacagcgaattccagggtgcccgtgtagcaggagagaagcaggtcggccacgatgcgtgcactgtgcatcagggagacctgcagctccgagctggggttaagcaggaactggtcccgcaggaacggtgagcaggcggctaagatgaccttgtggcctcgaaacttgaggctgtcggccacaatggtcacgtcgcagaaccactcctctgcccggagcttgttcatgttccgtagcgtagcggcctagtggccgggcagctggaagcgcaggacttcaccccagaggccattgtggcgggggtgggcaaccctggcccggttccgcgcgctgtttttttttaatcccctattttccccacycccgcggggccggaagcgcccccyacacacgggcagagccagggcagcatgtaggcgcagggcgggagggtgtatrgggcgcgctcgcgctggcggggccggctccacgtgggcgtaaaggggtaggggcgggagcggctcgtgcggtgtgttccaggcctcgcgcgcgcggcgacggcgtcggctaggactcaaaccctggagtttctgattcagtagctctgggatagagaaaacttcccaagggatgctgatgctgctggttggatgaacaacactgagatcattgctttaagacatccattgttggttgttggcaataacttaactttttggctaggggtggaggtgtaggagacagtctggctgtctccctcaggctggagtgcggtggcgccatctggactcactataaccttcgcctcccaggttcgagcgattcctgcctcagcccctcaagtaactgggattacaagcatgtgccaccacatctggctaatttttgtatttttrgcagacagtgtttcgccatgttgcccaggctggtctcaaactcctggcctcaagtgatctgcctgcctcggccttcctaaatgctgggattacaggcgtcagccactgcacccagcctaaattaacttttatcgtaggcatctagggaagtactatttatgtaccaaacttgggaaaattgagaaaacagtcactaattttttctattttgtggttcaaatcaggaacccagttgaaaaaggctggtttagagtaattggctagttgtcgtggctcacacctataatcccatcactttcgggggctgaggtgggaggactgcttgagctcaggagttcaagaccagcctgggtaacatggtgaaaccctgtctctaccaaaaaaaaaaaaaaaaaaattgtttttaattagctgggcgtggtggtgtgcacctgtagtcccagctactcaggaggctgaggtatgagaatcacctgagccaaagaggtcaaggctacagtgagccttgattgtaccactgcactttagcctaggcagcgtgagaccctatctcaaaaaaagaaaaaaagaagaatgatctaatttacatggtaaaaatgggcattctctttacatgtaacatttttaatatgtccacatatttatacatacctctattaattgataaagcaacttttttttttttttgagatggagtctcgctctgtcgcccaggctagagtgcaatggcatgattttggctcacggcaacctccgcctcccgagctcaagcgattctcctnnnnnnnnnnnnnnnnnnnnnnnnnnnnnnnnnnnnnnnnnnnnnnnnnnnnnnnnnnnnnnnnnnnnnnnnnnnnnnnnnnnnnnnnnnnnnnnnnnnnnnnnnnnnnnnnnnnnnnnnnnnctcccaaagtgctgggattacaggcgtgagccaccgcgcccagccagtgagacaacttttttaacagaaatgccaagaattattgctagacaggtagatactattttttagacaaatattagctttataaagatattttccttataaatacatttagaatcataaattaagtgatgtagtttaatccaaaaaacttgtcctgtttcagaatgttatggaatgatttcatattttcttgaaaatatggccgggcgcggtggctcaagcctgtaatcccagcattttgggaggccaaggcgggcggatcacaaggtcaggagatcaagaccatcctgtgtctcacggtgaaaccctgttctactaaaactacaaaaaattagccgggcatggtggcatgtgcctgtagtcccagctacttgtgaggctgaggcaggagaattgcttgaaccagggaggtggaggttccggtgagccgagatcgcgccactgcactccagcctcggcggcagagtgagactccatctcaagaaaataaaagaaaagaaaaaagaaaatatatttgtttcatagtatcttgtttttagagtgccattgaaagaaagcctcacatgctattagtactaatgatttatcactttaactttgtttagagaaatggatagaaaaataagtgagtggataaaactaacaagaaggtggctgggcgcggtggctcacgcctgtaatcccagcactttgggaggccgaggcgggcggatcacgaggtcaggagatcgagaccatcctggctaacacagtgaaaccccgtctctactaaaaatacaaaaaattagccgggcgtggtggcgggcgcctgttgtcccagctactcgggaggctgaggcaggagaatagcatgaacccgggaggcggagcttgcagggagccgagatcgcgccactgcactccagcctgggtgacagagtgagactccgcctcaaaactaaactaaactaaactaacaagaaggatcttggcaacaagaaaaacaaggacagttcagaattcgagttgtcttaagaaatagaaaagctggccgagtgtagtagctcacacctgtaaccctaacctttgggaggccaaggtggatggatcacctgagctcagaagttcgataccagcctaggcaacatggcaaaaccccgtctttacgaaaaaaggaaaaacaaaaaaaatgctgggtgtggtggtgtgtgcctgtagtcccagctactcgtgaggctgaggcaggagaatcgcttgagcccaggaggcggaggttgcagtgagacaagatagtgccactgcccactccagcctgagcggcagagcaagacactgtcattaaaaaaaagaaaaaaggccgggcgcaggtggtttttcatgcctgtaatcccagcacattgggaggccaaggcgggcggattacgaggtcaggagatcgagaccatcctggctaacactgtgaaaccccgtctctactaaaaaaaaaaatacaaaaaattagctgggcgttaaggcgggcccctgtagtctcagctactctgaaggctgaggcaggagaatggcgtgaacccgggaggcggagcttgcagtgaaccgagactataccactgcactccagcctgggcgacagagccagactccgtctcrggggaaaaaaagaaaaaagaaataggcaaattgtaaagtaaggaagaaaatatatgataggcagatacataattataaatgtctatgacttaactatataattaagataaagatctaagtaacttttagctctacaattttttaatttttattaagaaaatactttgcttttgcctgcagagccctcttaattgggatattttcatgttttgcattttagggcagctgcaatgactctccgcacggtattattgtcattgcaagcactattggcagctgcagagccagatgatccacaggatgctgtagtagcaaatcaggtaagatggccgcttttgaaagactttcttatattatgtatgagtctctagccacttcagtgntttgcacattaacacatgagcatactctattgaaactaaattttgaaatggttttctttcttgtggtaggattattttgtcaggtgtaatagtgaaaatagacttttaacatcctagtttaattggatatagatgctgttttcctaacatgagtattttcaaacacataaagtcaaaagaattacatagtgaacacccatattcctaccatctagattctatgattaatgctcgtgtatgtgtccatctttttatccttcctttcagtgatgatccctccctgctaataattttaatcacctcctatcatgggacttatgtgacatggcacagtttccratgaccttgtaatttgttgaacagaataaatatttttcatttcgctttctagctacagtggctgagtttattagttacaacrgagactggacctaagttattagtatctgacctgttaagaaacagtttgctggccaggtgtgttggctcatgcatgtaatcccagcactctgggaggctgaggtgggtggtggatcacttgaggtcaggagttccagaccagcctgaccaacgtggtgaaatcctgtctgtactaaaaacacaaaactagcctggcgtggtggcacacacctgtagtcccagctacctgagaggctgaagtgggagaatcgcttgaacctgggtggcagaggttgcagtgagctgagatcacaccattgcactccagcctgggtgacagaacgggaccctgtctcaaaaaacaaatttgccaacacctactctaagccattggaatataatggacatttttttttttaaacttagaaagtttttcttctcttgacttctaagatattaccctcttttcttcctcacttcatagctgttctttgttagttcccacaattatttcccttcttactcgtctttcttaaatgtagttcctcagttctgaccttgttacctttactttctgtacacactcacacttggatgatcatatctgtactgatgttagtacctgtacattgataaaatgtttaggcttgccctctctcctaagcacgagagcctggtgtttaactaaattggtaggtgatggtatcatagaatgataggtttgtaggatttatgatactgcattcagttttggcagtgttacattcaggtatccaaggaacattcatatggttaaccacccaagtcacagcctttggagtttttctctgtgtctcctttgctcctgttgataaccattccctgtatcattctgtcactatatttacataattactctgattgccataggtcacttttaaaaaattgtttcttttcaactgctctgatagatctccttttctcaacctctttcttcctttctccatcttctacattgctatcaggtagctttataaagtgcaaatcttacttcactaacaaaaacttgttcgtagctctactgtcatctacttgagtccagattctttagtttgcagagtttttccatgatctgaactctgctttatttcctaaattcttgttttcttcaaactcatgctttttcaagcattgcattcatttttacatattgtatccaatctaccatatttcctctgcctgaggaaacttcctcttggcaaacttctttaacctataagattttaatttatatattatctttcttcttttcccttgaagatctgtttatgtatatatgtatatatccttgtcaatatattctgttatttgtctcagagtacttccaattagggttttccatgttttatatatgtgctatttgttcatatttgttgttataagcatggcttgtgttccagctttgctttcctattgagctctaagccttacacgttgaggttggactcaagggtttcttttagctcctaaaatagttcaataatttgacttatttccttgtgatgaataagtggtagaaactagatttatcgttttaatatgtaatagatttaaatatataaattacttttaaaagaaatattaaagtgaattgaatagttagtaatttatactttgctttactaagtaatggtggttccaaagtatttgataaatttacctctttccaatgcatatgggaagtcttttaataaaattactctattgtgagtttataatcatctcaagttatgtaataagttaggactttgcatgtggggtttccataaatcactgtacactaatgcagctgtaagaaaacagaagaatctagttgtattctagcctgggctgtgggtaatacaaaagctggttacatygtaaaaaattattctaatgtccacatatttttataagctagtaatctgtgttcagttgtataatgtttgctgctttccagtgtttggaacatctcttaatacctcacttaacctaattttagtcttgctagttatatttgttgaatttggagattaaagtagattaatgttacttgtctttattattgtcaacacaaattgtgagtcgaagcttcaggttaagtggtcttttctcgagtgacataggttgtctataatgcaaagtgaatcacattttaaatgtagatttgttttatttggaaaagtaggattgtaggcgataagagctgaaatatatcaaatattataactgtaatgtcatgtcaatcaatttttccccccatatagtacaaacaaaatcccgaaatgttcaaacagacagctcgactttgggcacatgtgtatgctggagcaccagtttctagtccagaatacaccaaaaaaatagaaaacctatgtgctatgggctttgatagggtaagtacataagggcatgttgattttgatatattgattgattttaaattattgcaaattcttggctgacaaaagtggtttagaaaataagagaaattcgcagcctgggcaacatggcgaaacccatctctacaaaaattagctggacatggtagtgagtgcctgtaattccagctactctgaaggctgaggtgagagaatcccttgggcccaggaggtcgaggctgcagtgagcgatagtcatgccactgcactccagccttggtgatagagcaagaccctgtctcaaaaaaaaaaaaaaaaaaaaaaaarggaaaataagagaaaatctagttttggtaaacatattttctgttttcaaagtcagkgatttttttatttttactaattactgtcattgattttagaagctttccatgcactgcaaatgtaaatcaacttacagaaaagaaacaaggtgttaattcccagtataaagagtgaatgattcagtattgtttaaatgtttccttgagatttaatttcctgtccccttttcttctctacagaatgcagtaatagtggccttgtcttcaaaatcatgggatgtagagactgcaacagaattgcttctgagtaactgaggcatagagagctgctgatatagtcaagcttgcctcttcttgaggagcaccaacatctgttatttttaggattctgcatagatttcttttaaactggcattcttgcctaatgatgttatctaggcaccattggagactgaaaaaaaaaaatccctgctctgtaaataaagctaattaaacgtctgtgtaaatttaaaaaggggaaatactttaattttttttcttaatagtgtaaaaattccctgagctaagctaaaaccatggaagaaacatgctactttagtgtttagcagtgtaccaagactagcaagagtttgcttcaggattttgttgaataattaagataatattttgagtgtgtcagggccattcaaattgttggtgttgcatcacagctaccttaactgtttttaacatggatcctctgtgcctgtgaatttacttgcatgcttgtacttgacttcttaggatgggtagctgaaaagaccaccattttaagcatttgagaattcttaaatatgaaatttattcagaattgaagatggtgacctattcagagcctttttgtccttgtcaacagactgggacagtgtctgattcccccttcaccccccccacccccgccttgscacacacagctaatattctaatggtaaatttctctgtatcaggtggggaaatgtgctgaaggacagtatgtatcccttgcttcatttttaggtcgtaggtttggaatgtcttgtcccagttcttcaaacactcttaaatttttcttaagtaatgtaaaaatggaactgccaattttatttctcttgcaaaaatagtaaatacttgatgttacattattcccaggtttaatgaaagaacccaacttagtttttcagtgaatttgacacctattttttagtgatgaaatttttctttgagaactggcaaggatgcagtcagctgtttgcagtttttagcctgattttggggtctatagagattgctttattggatacttcaagtcattcttgcttgcacttcccctattgacacatgaaagctgtgttggtgttttattgtacatacttcagatgcacataggaatagaagtgtgttataaatctagctttctttatgatgtttctgataatacgagaattgaaaactttaccttctcttgtacatagtcagactatttgtattaaatttacatttcattctaagttcaaaagtttgaaaattattagttttgcaagatcacacactaatgtaaccattttatgaaggttgaagtggatttatgcaggcagttctatatatagaaatacaattctttttaaatttttaggaccaatacaaaataacaaaaatgtaatggaatcagactgaattaaagtaaggctgtatattgaaagtcatattataaaaggtttgctttctttaagtgttatttatcttaaattataatcgttaaatgtttggaagataatttttgaatcataacgtcagcataacttcatttgacttctcaataatcttgatactagaagcaataaaagaaccattattaaatatattgtaatgttaaagatgtgaaggttcttccaaaaatttgtaaggctttcctaattaacagtaaactcttatagctgatattattacatactaaacacaagttgctgttttttccccatatgtttgcttacgcatgtctttatacaatcacctctttttattgctgtagtttattttctaaagatgccaaaggaaacaagatttttctttatttattttaaatacctgaaacctcgtactttatattttgaagtaaggtgggattgtgtgaaaatgtggatggtttttctccagtgttggttagaactactttttttaagtggagggcaacttggtagtattagtagaatttgggtttaaaaatatcagacacatctacccagtttattttttgcctgtattatcagggtatatttaattgtcctgtggttaaacaaaggtgagagagctcagaggtttctaaaggtcaagcattttacatatatacatacatacatgctcttggaggcagctatatcctgctttgatttttatgcacatgagccctatagggttatatactcatctaactacacttcagcatccccagtgcccaagaaattggaaagtacaatatttggtttgagacattcttcataaaagattctttattataaaaatttacctcatttacatttaatgtgatgatcttttttttcctttctggtatatttcccactgtactgtttggtttttgttattctcttgtctgtgggtagatttagttacccaaacatagaaactaaagcaattgcttttttcctctggtcttaaatatgtttggacaaaaagacactaaaaggtcaggcctaggggaaaagtaccctggtggaaattatttttgtaattcttaatatttttgagttggctccgtttgtcagttttaaaagcctcaaaaattatgttaaaaaaaaaatccagtgaaatcccatttagggcaggccgatttgttagaagtcactgatgctccagtaggcttttgttataatcaggcctgtttcctgagtatgtgcctcttttaaaagaagaaataattagctgtatagtatttcagtactgatgaatgaatgaatgaatgaatggcagttagtggacccaaataagtattcagtggtatataaatatttgaggaactaggtactgaattaggtgctctgagttggcaccccgaaatgtttggaatcacgactatgatttacttaaacacgtaacacattcaaggatatataaatggagtctaagtattttgcttttgaagagaataatctatgaaatggaagacttgatttttttttcattttttagaagtaatacacatttatgattgttggcacataaaactatgcaaaataattctttttaagtatctgtaagaaagaattggcagtttaaacggattttgcttatttatgcactacagaatgcagcatactgtattactgttgaggctgcttaataagtttaccaatgtgaaaagcagatcttgggtataagtgtatgcctgatttgagcttttaaaactgtgcagtaggtgtatggtaatgttttacaatcctatgtagcaaaataggaaattatgaatttttgttgttattgttttaaagatttaagatggattggggtagggaacagctggagccaggtataccttctagtatgtagagggaaacaatgtttagataggaaaaaggaagccgtctgtttacagttaactttatttcatggacttctacaaaatgttgtattaatcactttttctagttcaaggaatttcaattccagggtacaaaccattgatttaaaaattacgtttccattctttttagtatcagtttaaagtaaatgcttaccatcagccagttgctgtcactgggaagaaggcaacttgaagtatttactgataaaatagcctttattcccaagtgtgacttttcttcagtgtctacatattatgtcacacgttctatttgcactgctgcaatatagatcaaagatcttgtggcataggggtaggggagtgttagtatctcccttgtcccatttgttctgttactgcttcattggactgatataccctcatgaacttgcaatcacctaaatggaagtcttgaatgtgtcaccttttgcttggttatttcaaccatgctgctatatataatcaggtgtggcacagtttgtcagtttgattataggtgtgagtggatagaaatcattacactgtgctgttaacgatccttgtctgcttgctgttacctactttttacaggcatcataataaaagctagactatttctttggggggaaagagacttatttaatgtaatttaaaaaacttttccaatagaaaatgaaatattattgaaaataatatctattttttagctttcagcaattgatggtgctttgttgtggtgtctgctggaagtctactgccattatagggaaccttgcttgttagcttctctagatctctattctaaacaatctgttagtgatgataaattctgtaggagggtctattctgagccgttaacttcctgtaaggggaaaatgggtgggttaccagaaataccattgaagcagggtgggctgtggggtggaaggttggggtatttgtcttgagaattaaaaactacgaaacacttttgtacacaactgattttttaaaaaataaacacatttttaaagatgttgaatttttccccccttattgggaattcttaaaaataaatgcatgcatgttttcccctgaaaatggtttatatcttatttctgggtgctcatctgtggacaagcaattaagtcttactctaaataagaaccaggcagatatttctccttcacaaatttcatagtgattgacatataaatgcagtaagttgtatcagatctttgaatttaaaaacattgaaatttagttctaattaaatttactaaaagaacatatttgcttaggttctaatccaaaatttagagtaattaagagttagttaagtaatactttgtattctgtttccatatatgctttctggaaagttgctcggtactgtcaaaaagactgaattgtttcagaaagtccagggtttaatcccagcttttactcaagagcagagagcctggacttttctgagcctcagtttcctcatctaggtaagatatttgcccagtacttcgtagcgtgttggtgaagatcaaattaaatgattgatgtagctataaaactacttaattgtatagacgttaatataattctaacactaaattttggctaaactatgaaagtattactctgttcctaatctgaaaccaccaagaggataccttgtttgaaaattgtggtttggcaaagtagctattttttgttatgtctgactatttcaaaggtccattgattggttattatctgtagattgacccttcctccataaatgctgataattagaagacactttgtcagggtttgtacaaattattttacatggcaaaactgatcgtgtctttatggtatttgtaaccaactcacagcaggcctataggtttctttgccaagaaatggaattcctcctgacctggaatatcaatataaagtgttctttttgtggagtaagactgggtctttaggtactaaaaatccaggataacaaatagaattcaaagctgggtgtggtggctcacacctgtaatcccaacacctgggggggcagaggcaggtggatcatctgaggtcaggagttagagacaagcctggccaacatggttaaaccccatctctactaaaaccaaatattagctgggcatggtggtgcgcgcctgtaatcccagctactctggaagctgaggcaggaaaattgcatgaaaacctggggagcggagattgcagtgagccaaaattgcaccactgcactccagcctgggcaacagagtgagaatttaaggagctctcatgccctggcaatagatactcaaatttaaagagcatcagacatttggcacttgttttgttttgatcatcagtgaattagttttccagtgaataatatgaaaattattaaggataactttcttaaggtatcagataaagtcaaatggcaaagtttgcaaaatgacacaaattcgggataattgctgaagtgattattagctggagcatggttgattatctttgccagtgtggtggctcacaactgtaatcccaacactttcggaggctaaggagggaggatcacttaagcccaattggaggctgcagtgagccatgatccaccactgcacatcagaatgggcaacagaacaagaccctgcctccaaataaaattaaaaaaaaaaaaaaattattccagtcctggtatggtggctcacgcctgtaatcccaacactttgggaggctgaggtgggtggatcacaaggtcaggagttcgagaccagcctgacccacattgtaaaacctcgtctctactaaacatacaaaacaaaaattagccgggcgtggtggcgcgcgcctataatcccagctactctggaggctgaggcaggagaatcacttgaacccgggaggtggaggttgcagtgagctgagattgcaccattgcatttcagcctgggcgacagggcgagactctgtctcaaaaaaaaaaaaaaattaggccaggcgcaatggctaacgcctgatcccacctgtaatcccagcactttgggaggccgaggggtcacctgaggtcgggagttttacaccagcctggccaacatggcgaaaccccgtctctactaaaaatacaaaaattagctgggcatggtggcaggcacttgtaattccagctacccgagaggctgaggcaggagagtcactggaacccgggaggcagaggctgcagtgagccgagatcgtgccattgcactccaggctgggcaacaagagtgaaactccgtctcagaaaaatgactgttattccaaataaactcattgcttttaaaaagtcagtagtaagagttcatagtgaaaaaaactaattctctaccaaactttactactagtacacagaacagtttttaaataatggatttttgtttttaggttacctccaggtcactaaataatatgcttattcctgtttaagtaactcatttctgttctgtcagttacacctagttatctcttgactccatgtttttatccccaactttatcttcactcagcaatggagtttaggttaaaggagggctgtcaatgcagaaaaccttgagaaaatcagatggttttgggggcaagtatgtatagttaaggggcatccactcactgaagtaaaattgctttggactgagggcagaggaaaggaaaatgagtaactgcaacaaggggactatggtacctagataaaggtagtaattagaagattaagagataggctgggtgccgtggctcatgcctgtaatcccaacactttgggaggccaaggcaagtggatcacttgaggtcaggagttcaagaccagcctggccaacatggtgaaaccctgtctctactaaaaatataaaaatcaggccgggcgcagtggctcatgcctgtaatttcagtactttgagaggctgaggcgggcagactacatgaggtcaggaattcgagaccagcctggccaacatggtgaaaccctgtctctactaaaaatacaaaaattgtagacgagtgtggtgacgtgcgcctgtagtctcagctacttgggaagttgagacaggagaattgcttgaataggcagaggttgcaatgagccaagattgtgccactgcactccagcccactccagcctgggagacagagtgagactccgtttcaaaataaaaataaaaatacaacagtcagccaagtgtggtggtgggcatctgtagtcccagctactctggcggctgagtcaggagaatcgcttgaaccccaggagcggaggttgcagtgagccaagatcatgctactgcacttcagcctgggcaacagtgagagttcgagaccagcctggccaacatggtgaaactccatctgtactaaaaatacaaaattagccgggcttggtggtgtgcgtctgtagtcccagctactcgggagactgaggcaggagaatcgcttgaacccgggaggtggaggttgcagtgcgctgagatcgcgccactgcactccagcctgggcgacagagcaagactgtctcaaaaaaaaaaaaaaagattaagagataggcgagagagattataaaaagaacaaaaaggcaaggtgtggtaaaagaaaatcaggttatgaacctattgagggcagagtaggaaggataaaagtgcctatgtgggaagattctgtgtagagagtacagctaaaaatcttggccccaaatgctttgttaatccttttaatttgttaaaaatcattaaagggtcgggcgcagtggctcatgcctgtaatcccagcgatttgggaggccgaggtgggcggatcacctgaggtcgggagttcgagaccagccaggccagcatggtgaaaccctgtctctactaaaaatacaaaaatttagctgggcatggtggcaggcgcctgtaatcccagctactcaggaagcggaggcaggagaatcgcttgaccccaggaggcggaagttgcagtgagccacgatcacgccattgcactccagcctaggcaacagagggagactccatctcaaaaataaataaattgttaaagtc

SEQ ID NO: 95783 - DNA, 40816 bp, Homo sapiens
ctatcacattgtcaggctgcaaatttcccaaacttttatgctctgcttcccttataaaactgaatgcctttttttttttctttttttttgagacagagtctcagtctgttgcccaggctggagtcagtggcatgatcttggctcaatggaacctccacctcccgggtccaggcgattctcctgcctcagcctcccgagaagctgggactacaggcgcacaccaccatgccaagctaatttttgtatttccagtagagacagggtttcaccatattggccaggctggtcttgaactcctgacctcttgatccaccctcctcggcctcccaaagtgctgggattataggtgtgcaccaccgcacccagtcaaaacagaatgcctttaacaacacccaagccacctcttgaatgctttgctgcttagaaatgtcttccactggccaacatagtgaaaccgtctctactaaaaatacaaaaaattagaagggcgtggtggcggacgcctgtaatcccagctactcgggaggctgagacagaattgcttgaacccagtaagctgagatcagaccattgcactccaccccaggcgacaatgcaagactccgtcacaaaaaaaaaaaaagaaatgtcttccaccagataccctaaatcatctccctcaagttcaaagttccacaaatctctcgggcaggggcaaaatgtcaccagtctctttgctaaaacataacaagagtcacctttgctccagttcccaacaagttcctcatctccatctgagaccacctcagactggatcttattgttcgtatcactattagcatttttgtcaatgccattcaacaagtctctaggaagttccaaactttcctacattttcctgtcttcttctgagccctccaaactgttccaatgtttgcctgctacccagttccaaagtcactttcacattttcaggtatcttttcagcaacaccccactctactggtaccaatttactgtattagtccatttccatgctgctgatagacatacccaagactgggcaatttacaaaagaaagaggtttatttggacttacagttccacgtggctggggaaagactcacaatcatagtgagggcaaggaagagcaagtcacatcttacatggatggcagcaggcaaagagagagcgcttatgcagaggaactccttttttttttttttggagacagagtcttcaattttgcccaggctggagtgcagcggtgcaatctcggctcactgcaacctccttctcccaggttcaagcaattcactctgcctcagcctccctagtagtttggattacaggtgcccaccaccatgcccagccagaactcttttaaaaaccatcagatctcatgagacttattcactatcacaagaacagcacaggaaagacttgcccccatgattcaattacctcccactgggttttaagatgagatgtgggtggggacacagccaaaccatatcacagctactgtgaaagcagagttggagggtcacttcagcctgggaggttgaggctgcagtgagacgtgttcatgccaatgcattccagcctgggtgacaaagtgagaccctgtaaaaaaaaaaaaagaaaggaaagaaaggcttatgttttacccaaacaataccttactatgactggctctgtgtccccacccaaatctcatcttgtaggtcccataattcctacatgttgtgagagggacccggcagatgataattgaatcatgggggcaggtctttcccgtgctgttcttgtgatagtgaataagtctcatgagatctgatggttttaaaaatgagagtttccctgcacaagttctctcttctcttgtctgctgccatgtgagacatgactttcaccttccaccatgattatgaggcttccccagccatgtggaactgtaagtccaataaacctctttcttttgtaaatttcctagtcttgggtatgtctttatcagcagcatgaaaaagaactaacacagtaaattggtaccagtagagtgaggcactgctaaaaagatatccaaaaatatggaagcaactttggaactgggttaacagccagatgttggaacagtctggagggctcagaagaagacaggaaaatgcaggaaagtttagaactccctagaggcttgttaaatggctttgacaaaaatgctgataattatatggacaatgaaatccaatcaggtggtctcagatggagatgaggaacttgttgggaactggagcaaaggtgacttttgttatgttttagcaaagagactggcggcactttgcccctgccatagagatttgtgaaactttgaactggagagagatgatttagggtatctgacagaagaaatttctaagcagcaaagcattcaagaggtgacttgggtgctgttaaaggcattcagtttttaagggaaacagaacataaaagtttggaaaatttgcagcctgacaacatgacagaaaagaaaatctcattttctgaggagaaattcaagctagctgtagaaatttgcataagtaaggaagatccgaatgttaatcaccaagacaatggggaaaacgggcatgtcagagatcttcatggcagctcctcccatcacaggcctggaggtttaggaagaaaaaatggttttgtgggccgggcccaggatccctctgctgtgtgcagtctaggaacttggtgccttgtgtcccagctgccccagctgtaactaaaaggggctgaggcatagcttgggctattgcttcagagggtggaagccccaagccttggcagcttccacttggtgttgagcctgtaggtacacagtagtcaagaattgaagtttgagagtctccacctaattgatacaaaaagcagataaacaggccaggcatgatggctcatgcctgtaatcccagcactttgggaagccaaggcaggtggatcacctgaagtcaggagtttgagaccagcccggccaacatggcaaaaccctgtctctactaaaaacacaaaaattagcgtgatgtggtggtgcgcacctgtagtcccagctatttgggaggcctaagcaggagaatcttttgaacctgggaggtggaggttgcagtgagctaagattgcaccactgcattccagcctggatgacagagcgagactccgtctcaagaaaaaaaaaacaaaaagcaaaaaacaaaaaaccagataaacagagaaaaattgaactgccattagagaagatggggagatgtgggaacccagagccttgtctttaacttcctactgattctctatcctcacagatttctgacacactaccagaggattcagggctccatgaaacataatttgaaaataactagcctaccttggcagttctcaaagtttgtagtatcaagaccccttggcatgtttaaaaattgaagactcaaagaagtttttttcatgtggattgtaactattggtatttaccatattagaaatgaaaactgataaattatatataaaagattaattccttaaaattgacaataagcccattacatgttaacataaatatcatattttaatgaaaaattactatattttaaaaacaaaagataagattggcattgttttacatttttgtaaatctctaatatctgacttaaaaaacagcttaattctatttgctttgatagcacattatagtctccacaaaacttcattgtacacttctgagagaacaagagtgaaaaaagcaagtaacacatgaaaactttttgacctcatggatcccagaaagaacctcggagattgtctacagtccccagctcacatttggagaacctctgtcctaaatccaaaggtccattctagctggcactgaaaattgacttaatttctgaaatcctattaaccgttttgaagagtctgattctaccaaaatactaaaaaagaatgtgaggtgaatactaaatagaaaaatgttgaattcaaaatgaagggactaagataagtggtttttattacaaagcaaactgtattagataacttaaatctatgtatgttcaaaaagatgtacttgtcatatctagtgcaattacttgtttacatatctcttctacccaacctgtgagctttgcaagaaggaaatgagtcttttttgtttggttatttttctgagacagtgtctcgttctgttccccaggctgcagggcagtggtgtgatctcggctcactgcaacagggagcctcctgagcagctgggattacaggtgcccaccgcctcacccggctaactttttgtatttttagtggagccggggtttcaccatgttggccaggctggtctggaactcctgacctcaggtgatccgcccgctatggcctcccaaagtgctgggattacaggcgtaaaccaccgtgcctggccaaaggaattgagtcttaatcccttttgcatcttcagtctttaggataacgtctgacacacaacaggcattaaatatttgttggatgaatgaactgaactgcatagaatgcagaaagcctacatatactggccaggcacagtggctcacacctgtaatcccagcactttgggaggccgagacgggcggatcacctgaggtcaggagtttgagaccagcctggtcaacatagcaaaacccggtctctattaaaaatataaaaattagccgggcatggttgtgggcgcctgtaatcccagctactcgggaggctgaggcaggagaatcgtttgaatctggaaggaggaggttgaggtgagccgagatcgcaccactgcactccagcctcggcgacaagagggagactccgtctcaaaacaaccaaccaacaagcctacatatcctgccacacgtgctacaatccacagcaaactgtttcatccacattcaaccactttcttaaagtcaccatcatgatcctatcaagaaaaccgtaatttatatggtattttaatgtgcctttataaattactaatcactttcttcatgatgtatgttaaaatggcttatgtcacctgatgtaatccttaatgagggaaataaaaggccatgattatgcctggctttttttcttatatgttagatttgagtgttaaaatgacctcgaagcggcgaaagaaaggaacggaactgccctccacattaaaaatgagcaggctccataggttaattttactcttcctcacgcacggcacttacatgttgcaaactctctgctccacagcacgcacagacatcccaaatcccggattgggcctgaggaacatctctgcaaagagcgccaggagggcgtgggggtcccgcctctctcgccagggaccagggagtggacactcactggtccagtcatgaggaactcagcatcctcctgacgggaggcgcctctttcccagaagcggtgggtcaggaggaatctgactaaaccctgggttgccggcccggagggcgcggttgaccycggggcctcgaggttgtgggcgaggagtaatccgcccgccgagaccgacccgcagatccaggagaccgaaacccgagggcggcgctccagggtgctgaggagaccggaaaggcggccaggaccttccggtcgcctcggcccaccacccacccagtgtccgcgcagccctaaagcctggcagacgcggagcgcacgcggcctttgcctcggccaggacagggcagcggggagagggctgctagacaacaattcttgacccctcctcgacccacgaccgccaggtaggcgcgcaaagctcctacacctgcggcgcgcccccgtcccctggtccagcggacacgccacgcacgcagccccgcccagcgccgctcgcggtaggggcggagccgctgagctggccaaagcggatttgcccagctaggccaggggcggggcaggccctcccagccaggaccagccccagtctccccgcccctgagccgtgaaggaaatagggacctggccctgggccttgtgtagcgggagggggagctaggaagcagctgagggcagaatccaggagggcctggctgcgggggaatgaagcctccgccttcgcaggcaaaagcctttaaatacgggctcaggcccgggactcagagtgtaacgcgtggcagcctgagggaggggcgtgcgccgagagggagctcagatcgagcggggcgcgggtggagaagctgcggcrgcgcggcccgtaggaaggtgctgtccgawcgatcgggataggagcggtccctgcgcttgctgctgggaagtgggtaagcgccgctcccaggctggccccgccgcccgggcgggatgctcccaggtctgggcgggatgtggagggagcggggctggggtgtgcgcgctgctcccggtcgctcgctgcgctgggtcccgggcttcccgtctcacgaccttcgtctytttggggcttagggcgggaaccgcattttggaactgctgtcctggggatgtggtcgtctgggcttcttattcaagactcgtgagtcttccagccccttctctttctgcctttacccactttcctgacttggatgagatttccctgccgcctccaaagccgaacgcccaccacaggaagcggttctctcgttggggacctcattttggccgcagagtcgtagtcttttgtttgtgtttaagagtctgctcacctgaggggctcctgcttttctcatgccgcccctcttaagaaaccaaagagaaacgaagccagaaagccctcttgagagcaaaatactaagactgccgtgatatctgtccgggatgtcctggaatccattgttggccccctacaccacagaattgctctgtttgatgtcggggaaggcctttcctgggtgcctcgggagaccatgtttgtgtgagatcttgaaaaattatacgtcctataaatatataggaagataacttagtagggttaggaattctagtatagagaaaagaggggttcgctggtagggatctattcatgggcatacagagcagtagctgtctatcgacagacctcaaagacacagtgagcctttgagtttcttcaaatcccttaagaaatggagaacagtagtctttcttcaggggsgttctggaaatgaaagagctgactgtctgctctgagatgtgcttattagtggccaggatccagtttaaggtaaggggtagacaaccctgattgaaaagatctcatttcttctcccgttgctgtactcctttttctaacaaaatctataactggataagcataatccatcttccttcttgtttacttccacagctttacatgataacccttagacataaaattaataccggctttcttactgattaaatatttttctctggtcaggcatcttttactgtttaatttctggaaatgattaaaatgtgtgaagctgatgtatccaactataatgcccatcgttagctcctgggtacctatgcaaaatatgctgtagagagctggggctagaaggattatattccgtttagattgtagtagggcatttgttatttgttagtgaccccttctgggttggaatgtttatttgaatttatgaaattttacatgaagagtagttttggaacggtttggtttgttgtgactctcccaaaatacagaggtaaaaactcatttcaaaataacccatttaataaggaaacactcctatgtctctgacagcagaatagagggccagagggtacataaaagtagaaatagaaaatgggggccgggcgtggtggctcacgcctgtaatcccagcactttgggaggccgagacgggcggatcacgaggtcaggagatcgagaccatcctggctaacatggtgaaatcccgtctctactaaaaatacaaaaaaaaattagccgggcgtagtggcgggcgcctgtagtcccagctactcgggaggctgaggcaggagaatggcatgaacctgggaggcagagctttcagtgagccgagattgcgccactgcactccaacctgggcaactgagcgagactacgtctcaaaaaaaaaaaagaaaaagaaaagaaaatggggctgggcgcagtggctcacgcctgtaatcccagcactttgggaggccaaggtggatggatcacctgaggtcaggagttcgagaccagcctgaccaatatggtgaaaccccgtctctactaaatatataaaaactagctgggcgtggtggtgggcacctgtaatcccagctactcgggaggctgaggcaggagaattgcttgaacccaggagacggaggttgcagtgagccgacatggtgccactgcactccagcctcggtgacagtgagactccgtctcaaaaagaaaaaagaaatagaaaatggagttggcagacatctgtgtcatgcaaagtgtgtcactaacactatgtcaaactccatgttaaagcttattgaagattttattgaaacttccaagtgagcatttatttggacttgcacagattgtacatcagccttttcattgattctcccattgtcatcggtaagccgtatttcatgggaaatagcaaggcgagaatacccaaaataaagcttgtgtaaaacacatccagttctgtgatacaagttcacctgccatcagtagtctatcccagctgatgtatgtaaagcaagttgaaatgtggtctcacaatcaaggcagataagaagtaactctggggaaacatgctgaagttctttaggtaactcaaaaaaagaacttggccagatgcgatggctcacacctgtaatcccaacactttgggaggctgaggcaggtggatcaactgaggtcaggagcttgagaccagcctggcccacatggtgaaaacctgtctctagaaaaaatacaaacattagctggacatggtggcggacacctgtagtcccaggtacttggtacttgggaggctaggtgggagactcacttgaacctgggaggcggaggctgcggtgagcccagattgtgctgttgcactccagcctgggcaacagagtgagaccttgtgtcagaaaaaaaaaaaaaaagttgatagtattctggtcaattactgcaaaaatactatgatcggcaatctgaactaaagctatttacacagaagtcttcatctcaaaaagagacgcccttgtggagagttactcattcattcaattaataatcattgagaggctgctattctaggagtcaaggatacagcagggagcagcagcaaataactgttagcctggctgtgccttattaaactatgaactccttaagcccaggagctgcaacgagtagacactgattctacatttaataaatgtgttagcagaacctgtcctggttgagattaagagtaaaggctgccctaataaccttttggctaggagattaagtggtaaccttaaagatcctctggtccaacattactttgagattctactctttaggtattctagatatactgggtttaattaagtgaaaaaagccaggtgttaatagtatatatggtattctattgaatttagaaagacaagattattagaatatatatgtatatttacttgtagctgggaggatatacaagaaaacggattgcttgtgtggaagcaaagtaggggatagcaaagtagataaggaaggggttggagtgagacttctcatgtgtaccttgttacaacagatttaattttgaaccatatgaacattattcagaatcaataatttttttttttttttttgagatggagtttcgtgcttgttgcccaggctggagtgcaacatggcacgatctcagctcactgcaacctccgcctcccgggttcaagcgattctcctgcctcagcctcccaagtagctgggattacagacatgtgccaccatgccccgctaattttgtatttttagtagagatggggttttgtcatgttgatcaggctggtcttgaactcctgacctcaggtgattcagcctcctcggcctcccgaagtgctgggattacaggcatgagccaccgtgcctggccagaataaataatttttaaaaatttatttcatatggctaagaatactatttgaatacagattcaaatagaatactgttctatttaattgaatcatataattcaaaattctgtccatttttactattttaccaaagttctatttcttttaattgttttttaaaagtcatgaggggcctggcacagtggctcgtgcctgtaatgctagcactttgtgaggctgaggcaggcagattgcatgagctcaggagttcgagaccagcctgggcaacatggcaaaaccctgtctctactaaaaatacaaaaattaacctggtgtggtggcatgcacctgtagtcccagctacttggcgggctgaggcacgagaatcaaacccaggaggcggaggttgtaataagtgcagctgagatggtgccactgcacttcagcctgtgtgacaaagtgagattctgtctcaaaaaaaataaataccgtggtggctcatgcctgtaatcccagcacttttggaggctgaggcgggtggatcacgaggtcaagaaatccagaccatcctgaccaacatggtgaaaccccatctctactaaaaatacaaaaattagctgggcatggtagtgtgtgcctgtagtcccagctactcgttaggctgaggcaggagaactgcttgaacccaggagacggaggttgcagtgagccgaggtcacattgtactctagcctggcgacagagcaagactctgtctcattaaaaaaaaaaaaaaaaagtcatgagggatcagactccatgagttgatatctataccactaaagatcaatgcataagccagattggtagtttattaacacaggctacaaacaatccaggatacctacatggattagtcagctcattttcttctagtagggaaatctatccagagaaccaaacgaaaatttagaatattgtttaatacagattcaaaccaaaaagaattggataatcttaattatatgatttgtcttttttcataatagggatattcttcttgccaggcattcaaattaggccagccttccagagtgcgttctctgatccatacaggagtatactaaaaaattcttaaactctctgattaccattttccttctctttggaatctgtgaatgggttagattagatgatgtctgaggtcttggcaaggcaaaaccattctttgcttttaagaatctgatcagtttgacagttctcattataacggataaatgagcatacttatgtataaatcagttccttgtcattttgattagtgtgaatcagttcacctaatgcttttgaaaatctatcaaaatctgtgtaacccacttttctgctggcattgggaaggaaaaaaatctgtgtaacagctttggtaattacagaaattacattttctttaaccaccttatggtttctgattaaagttgaaatggagtttaagattattgcctagtacctaaaagtaaactttgaaagccaaagtagtgtgtagggcatataatctcatcagaggccaattctggactgtggaactaatcttattctatatcatcgtaatctaaacctgttataaactcatctttgtacactagcatttatttaagcaagaatcgtacaagtatgttcatcctggagctttctctcagcaatcaaagttgtcctagtgtattatagacctaaggaaggttttactttgattctttactttctaaatattaggtcattataatctttgtggctccccttcagtaatatcagttactgtaattatttccatatgtttcatgctagtgcagctgagaacaggctaggtcatccaattggaatgttattttttaaatcactatttccataattcctcagagcgaatgtaggaaatctttccagatatctgtcaccttgacagtttttataaagtataattaatgtacaatattatttctttaaattttctgttttcaatactagaacagtcttactgttttccttctagtacaatcatgtttgaaattaagaagatctgttgcatcggtgcaggctatgttggaggacccacatgtagtgtcattgctcatatgtgtcctgaaatcagggtaacggttgttgatgtcaatgaatcaagaatcaatgcgtggaattctcctacacttcctatttatgaggtaaacatattaaacatctctttgtttttatgcttttttcttactgtctttattatatcatttatatgcactattaatataaaaatctataacagcaactrgtaagaaattaaatgaaaaaaatctggatacaaaacacatggacattaaaacacattacttcgggtaatgtgggtaggaaaaatgaccagaaagaagtctatcagaatggtgtattagtgcagtgagattatggataattttttctctttcctgttttcttttcttttttttttttttttgagacggagtcttcctctgtcgcccaggctggagtgcaatgacgcgagctcagctcacggcaacacccacctcacgggttcaaacaattctgcctcagcctcttgagtagctgggattacaggcgcccaccaccacacccagctaatttttgtattttagtagaggtggggtttcaccatgttggccaggctggtcttgagctcctgaactcaggtgatctgcccgccccggcctcccaaagtgctgggattacaggcgtgagccactgcacctggccttcttccctgtttcctaattttgtctgttagtatcattaccatattataataaaattaaaaagtggtatcctgtaaaaataaaataaatacaacttttaataatattaatataaatttaatatatttttggattattttactaacatcacataaacattagatggacaaatggcatctttcatatttagagtttggtgccacaaatatttttaactggaatttcaaaattttgtgaatttagagaatttagaaaaatatgcttctaactattttactgagctatctggtttcctttttttttattatttcactgtaaaatgagttcatcatattatgcttttgaaactcaacagaaaagcatttgcaaatttgatggtagcattttctagctaacattaatatgtttatatttttccccaagaaaagcttggttattttttatttgttttttgagacggagtttcactcttgttgcccaagctggagtgcaatggcccgaacttagctcactgcaacacctgccttccgtgttcaagcgattctcttgcctcaatctcgttagtagctggaattataggtgcccaccaccactcccagctaatttttgtatttttagtagagacgaggtttcgccatgttggccagggtggtcttgaactcctgacctcaggggatcrcccctcctcrgcctcccaaagtgctgggattacaggtgtgagccaccatgcccggctgaagcttatttctttatgactattatcaaccatagactttagttgccttagacttttagaaggaaagtctcaatccagttttatctctaagataggtctgcctgctatctataggaatataagatatggaaatctatgaaaaagcatctatagactaatagtcactcaaaaacacagatttacttattatatctgaatcagatttaggattgaaatattggcggcacggtggctcacacctgtaatcctagcactttggaagaccaaggcaggcggattacctgaggtcgggagtttaagaccagcctggccaacatggtgaaagcccgtctctactaaaaatacaaaaaattagccgggtgcagtggtgcgcacctataatcccagctactcgggaggctgaggcaggagaatcgcttgtacccaggaggcagaggttgcagtgagccgagatcacgccattgtactccagcctgggctacagagcaagacttcgtctcaaaaaatatatatatatattactactatatttggtttagggtaatttttaaaaatgttttagaaagataacttgatggtgagttctataatgctgatattgataaaagggttgcaagtcatttgaaaccccataaaccatacttatatccaaacattcagtaatgaattctgccagcagtgtattctagtcttcacaaataagccaggcatggtggcatggccttgtagttctggctactcaggaggctgagacagaaggatcatttgagccaagggtttcaagtccagcctgggcaacatagtgagactcccatctccaaattaaaaaaaaaaaaatacggccaggcacagtggctcacacctgtaatccctgcactttgggaagccgaggtgagcagttcacttcaggtcatgagttcgaaaccagcctggccaacatggcaaaacctcgtctctactaaaaatacaaaaattagccaggtgtggtggctcacgcctgtaatcccagctactcaggaggctgaggcgagagaattgcttgaacctgggaggcagaggttgcagtgagctgagatcgcaccactatactccagcctggttgacagaatgaaactctgtctccaaataagtaaataaataaattagaataatgacacccatcagaatggttaaaatgatattactgacaataccaagtgtttagcaattagaattttatgcactgcttggtaagaatatcaattggtacagtcacttggcagacgtgtttgatagtatctactaaagctgaaaatataggccaggcacagtggctcatgcttgtaatcccaacagtttgggaggccgggcgagaggattgcttgagcccaggagttcaagcccagcctgggcaacattgcaagacccctgttccttttcttttttttttttttttttaaaggccaaccgcggtggctcacacctgtaatcccagcacttttggaggccgactccatcctggtcaatatagtgaaactttgtctctaaaaaatatttaaaaattaactgggcattgtggcatgtgcttgtggtcccagctacttgaggagttgaggcaagagaatcacttgagcccaggaggctgaggctgcagtgagccctgttggcgccactgcactccagcctgggcaacaaagtgagaccctgtctcttgaaaaaataaaaaaaaactattagtctgtgatccagcaattccaagtgtatatccaacagagatgcatacatatgtgcactaaaagacagaaggaacaacctaaatattaatcagcaatagaatggatgcatgaggctgggtgcggtggttcacgcctgtaatcccagcactttgggaggctgaggtgggcggatcacctgaggtcaggggttctaaaccagccttgacaacgtggtgaaatcccatctctactaaaataatacaaaaattagccaggtgtagtagcacatgcctatagccccagctactcgggaggctgaggcaggagaatcacttgaacctgggtgggggaggttgcagtgagccgagtttgcaccactgcactccagcgttggtaacagagtgagactccgtcttaaaaaacaaacaaacaaacaaaaagaatggctacatgaattattttataatactgcaacaaaatactgtactgtgttgaaaatcaatgaaactactcctgcacttaagaatatggttaaaatcttacaaaagtagtgttgccagacacaaaggagtacataccgtataattccatttgcgtaagtttcaaaaataggcaaactaatctatgattatagaattcagcatgatggtaatttgggaatagtagtgactaggagagggcatacagtgggctttgacttactgttaatgttctttcttctctcattacatgaattactgagaaaatagtagattctattaatatttaacagttaaaacacttccttttgtgttgtcgtgtttattgaatagacattgctttttaaactttgttctttaaaaaatacagtttaggccgggtgtggtggctcacacctgtaatcccagcactttgggaggccaaggtgggtggatcacctgaggtcagaagttcgagaccatcctggccaacatggtgaaaccccgtctgtatttaaaaaaatacaaaaaaaaattagatgggtgtagtggctcgcgcctgtaatcccagctacttgggaggctgaggcaggagaatcgcttgaacccaggaggtggaggttgcagtgagccgagatcgcgccactgcactccagcctagcaacagagtgagactctgtctcaaaaaaaaaaaaaaaaatttagtagtaactactttaaaaaaaaatggataatttgctttgctttttttctgggtaaaatttttattttactgaggataattttaccctgtgaaaggatttgagttcttctaataaaagtaccatataaattctaaataccaattatgataattacataatgaacctaataacagatagaacctatattattaactgcttctgcatcagttttggctttaatataattatgtaagtcttcattttgaggttttattatatgtatatgaattctgcattgctctgattttagtaactttaaatattaggagattatacacaggactgaattaaattttattctctgcaaatcctgactctataaaacttttccctcattttctagaatctagccaaaataaccaaggaaacccattactgtgattggtgacatcatattcatggttgtagtggttcatatatcttgcttgtcctgttattttaatcaaactaatggaaattcatatgtacatttttcacatcctccaattacttatgttaagagacctcggaaccattgaagaaaagggagttgcctctatatgtaatgccagacctatggcccctgaagggctttcactttgctatagacatagttttctaaacatccataatattatggatggatattgtttgaagtttctcccctaagagtgagcttcagtggtttaggtatgttttctttttgctttttgttgtggaagatttcaagcatgtaattaaagataacagtacaatgaatctccgtgtgcccatcatcttgtttcaacagttatctacgtggccagtcctccttcccaactaccaccatgctgattatttataatttcatccataaatactttatcatgtatctctaaaagataattttgtttttctttgagacagggccttgctctgtggcccaggctggagtgcagtggcccgatcttggctcactgcaacctccgcctcctgggctcaggtgatcctcccacctcagcctcctgaatagttgggactacaggcaagcgccaccatgcccagctattttttaaaatttttttagtagaaatggggtttcgccatgttgcccaggctggtagcccacaatagttgtgcttcaaccagtatctattggttgaagaaaccagtttgtttattggctagaaattatcacagtctaggccaggcacagtggctcatgcctgtaatcccagcactttcggaggctgaggcgggtggatcgcttaaggccaggagttcgagaccagcctggccaacatggaaaaaccccgtctctaccaaaaatacaaaaattagccaggtatggtggtgtgcgcctgtaatcccagctgcttgggagtttgcggcacgagaatcacttgaacctggtaggtggatgttgcagtgagacgagatggtgccactgcactccagccagggtgacagagcaagactgtctcaaaaaaaagaaatttttcagtctagattttgctggttcagttccttggagtttttcaacttattctttatttaatgtaaattggtagttagatctaaaggtacaggtccaatcagatttaggcttgattttttttttataagaatatttgttaagtggttttatacccctccatattcttaacataaatatatctcctgttaaactgggattttttttttaaataaaagggttccttgcaataggacttagaaaaatttatatttatttaagcatatagaaaaatttatatttatttaagcatatatggagtaaattgactttcacagccagttctatggcctgaattattgggagtaaaaatgtgcattcataatgacaatgcaaaatcatatatttgcttgaaatcacagaagaccttgaattttctgaaaattgtgttgatactcatagttaatggttaactcttatgagttagtcacatggtaaacaatgacaaagcattaaatgagctgctcttctgattgtagcaagtttaatggcaatttccattttactttatttacttaagtgtacttatgaggcagggcgtggtaacttactcctataatcccagcactttaggaggaggagcagggaggattgcctgagcctgggaggtcaaggttgtagtgagctgttacgcaactgcactccagcctggggaacagagcgaaaccctgtatgaaaaaataaaataggccaggtgtggtggcttgtgcgtgtaatcccagaactttgggaggccaaggcaggtggattacctgaggtcaggagttcaagaccatcctagccaacatggtgaaaccccatctctactaaaaatacaaaattagcccagtgtggtggtgcatgcctgtaatcccagctacttgggaggctgaggcaggagaactgcttgaacccaggagacggaagtcgcagtgagccgagatcataccactgcactccagcctgggtgacagaaagaggctctgtctcaaaaaaaaataaaataaaataaaataaatgggctgggcatggtggctcactcctataatcccagcactttgggaagctgagatgggaggattgtttgagcccaggaatgtgagaccagcctggacaacccagtgaaaccccaaaaccccatctctgccgaaaaaagatacaaaaattagccaggcctcatggctcctgtggtcctagctacttgggaggctgagatgggaggatcatttgagcccaggaggcggaggctgcagtgagctgagattgcaccactgcactccagcctgggtgacagagtgagaccctgtccctatttaaaaaatgagatgtgcacttatggcctttggtatatgatccttaacttgtctacaaaggtaatttgagcacaacctagacctttaaattacaatattaccatgccctttaacaaatgtaattctatactattaggttatctcrtatcactggcaagctatatgtacaattccttttcttttttctttttagccaggactaaaagaagtggtagaatcctgtcgaggaaaaaatctttttttttctaccaatattgatgaygccatcaaagaagctgatcttgtatttatttctgtaagtattttcctttgttgtgtgaattttaatgtattcttgtctatrtaaaagtttcatcatactttaatagtaaatccattggtattaagcctcaacattgcttagtatagagttgtccggtgaattttggttgtcactttgtctgacagttcacaaaaccccgtaatcatctagtcaaatatgtcattacaagtcattgaacaagtaaactcaaagttctaatttgagatttagaactaggaaatgggcgggtgcggtggctcacgcctgtaatcccagcattgtgggaggccaaggtgggcagatcacaaggtcaagagattgagaccatcctggccaacatggtgaaaccccgtctctactaagaatacaaaaattagctgggcgtggtggtgtgcacccgcagtcccagctactcaagaggctgaggcaggagaatcgcttgaaccaaggaggcagaggttgcagtgagccgagatcgcgccactgcactccagcctggtgatagagtgagactctgtctcaaaaaaaaaaaaaaaaaaaaaaagaactaggaaatgctggtaacatgagagcacatgtgatgatagtatatttcatatttatttcattatttcttgtttccagtggttggcagaggtgagatgaagaaaatcagtttgcaaacttacaggcatctcctctctaaatgaattttacattaattgtttgtaacttggcatatgttggttagattatcaggctaaccaacagacacctttacctcataatgtggctgaactgtcctacctttataatgaaaaaaacagaaccaacacttgagattaaactctagtaaaccactatttgaaccaaagcaacttacatcttgctgtcctagtaaccatctactcaaatattctgtatgtaatgatatagctatcaccagttggaagctgagtgagggtgttatatgacttaagatctttacgagctgggcatgatggctcatgcttgtaatcccagcactttgggaggccaaggcaggcggatcgcttgagcataggaatttgagaccagcgtgggcaacatggtgaaaccctgtctctacttagctggccgtggtgctgtatgtctgtagtcctgactacttgggagactgaggtgggaggattgattgaaccctggaggttgaggctgcaatgagccattattgtaccttgcactccagcctaggtgacagaaggagaccctgtctcaaaaaaaaaaaaaaaaaaaaattcagtctcttctttttgacctccttaatcacttcagagaaattgatgcagcttttatgacttacctacccatcccctatttaaacttgcagaaagttagagtggaggcataaaaaaataagaaaatattttggagtagctaggtacctggaaaaaatcaatgagttacttagtctaatttttaggtgaccagagcctagaatggtaatagaataattttctgcagaaaggacatttaaaaataatctgtttttgaatgccagacaggaattattttgtagcaatcagttttcaactgttgttttcaaagctcctttaccaggggaagctgtctgatcatctcccatctctagccagtttcaccctacatcatgagctgtctttgcctttccgtacaccattacatgtaactcttgccctaagttgttccatgcatgtaaacaactttttcctcctgcttttcacacctcaactcaatcttcaagttttgatttattttcacttgattcctttatttagtctcccattgggttataatctcatcaagagaagagagttagtactacttactattagttcaaaaataattcctattccctttaagttttagacttttcagagcactttcatttttgtcagagcattataacattcatgtgttagtttttagagagctcactatcctcattttccaatgaggtcactgaggcagaggcagccacacttctccaaggttacatgtaatccaaaactaaatgcctagactctgggcccatgatttttttttttttttttctaaatgaaagtcttcgcccattggccaggtgcagtggctcatgcctgtaatcctagtactttgggaggctgaggcaggcagatcacttgaggtcaggagtttgagaccaccctggccaacatggtgaaaccccgtctaaaaatacaaaaattaggcgggtgtggtggcgcacttgtaatcccagctactcaggaggctgaggcaggagaatcgcttgaacccaggaagcagagattgcagtgatccgagatcgcgccactgcactccagcctgggtgacagagcaaggctccatcttaaaaaaaaaaaaaaaaagcaagtctttgtccacatagtattctatatcctgaagatgataggtaatgtctagctttaatgaactcagaaagcatttgtaaatgatattgcaatattttaaaagactgttgatataggactgtaaaaataggggaataagaaaggaggccaggtgcggtggctcacgcctgtaatcccagcactttgggatgctgaggtggacagatcacctgaggtcaggagttcgagaccagcctggacaacatgatgaaaccctgtctctactaaaaatataaaaaaagtggtggggtgtggtggcgcatgcctgtagtcccagttacttgggaggctgaggcaggagaatcgcttgaacctgggaggcagaggttgcagtgagccgagattacactactgcactctagcctgggcaaagaacaagactccatctcaaaaaaaaaaaaaagactttaaaacttatttttaaggactataataatatattatgtacaataaagaaagggaataagaaaaggcttacatttcatttcagattgtgaagtcctttaggataaccgtctcattcatttatgtatcttcagggcttagctggaatctgcctgccctagttatcyggcatatagatagtagcttcctaacaaaaatttattgaatgagttctctagatgcttcaagctatttcttctgattattatatttataaaatgtattatttctatggaactaacagaggattaaatcagggctactgatgattgttaactccacactttaaccagtagttcagggtatatcttgaaatccctatctcacaggcactctgttctttatcccatatacttacatcaggtgaatactccaacaaaaacctatggaatggggaaaggccgggcagcagatctgaagtatattgaagcttgtgctagacgcattgtgcaaaactcaaatgggtacaaaattgtgactgagaaaagcacagttccrgtgcgggcagcagaaagtatccgtcgcatatttgatgcaaacacaaaacccaacttgaatttacaggtataaaaaatgaagcattagaatctggttattcttatgtaaatactgatgtgttaaagttgcccataattaattctagcttaaaactttcctttgcattgggattctaggtgctgtccaaccctgagtttctggcagagggaacagccatcaaggacctaaagaacccagacagagtactgattggaggggatgaaactccagagggccagagagctgtgcaggccctgtgtgctgtatatgagcactgggttcccagagaaaagatcctcaccactaatacttggtcttcagagctttccaaactggttagtatatagcattcaactcttcattaaattaaagccaaatatttatttatttcaagcctgataaactacacagatacttttttaatagtagtaagaggttatgcttttgaagatcatattcttgcacattcaaattatgaaataattttcacaagggagatcatatatgagggtataaaagattctgaaaaattctgaaatcttaaaatagtaatttggtttttatcactctttccctctttaccctttttcttaatcatctgtcctctctaatttaaaacattttccctttctaacccatccattgtctcctcaaattgagctcatcagtatcttatatatctccctcagtaatttgcgtcaacgcaatgaaatataaactagatgtataaaattgctgttttagcttatcttactcttctctatgttttttttttttaaggcagcaaatgcttttcttgcccagagaataagcagcattaactccataagtgctctgtgtgaagcaacaggagctgatgtagaagaggtagcaacagcgattggaatggaccagagaattggaaacaagtttctaaaagccagtgttggtaaattcaaatttttctctrgtagaaagagctagtgtttatttactgaaggcatattatttgctggtaccagcgctttrtatatctcattgaatccttataacctgttaggtagatgctgttattttcttttttagagatgattcagactcagggaaatttgtgcaacttgctcaaagtcatgcagctgagtgactagatgtttctaacgccaaagccatattattccttactgcatactgcattgcactagagcaagggtgggcaaactatggcctttgggtcaaatccagcccacaacttgtttttgtaaataaattttattggaacacagccatgaccattagactacatattgtctatggctgcttttgagctacagtggcagtttaatagtctcctcagaaactgaatggtccacaaaggctgaaatacttactgtctggccctttaccatgaaagtttgctgacccaggccaggcacagtagctcatgcctataatcccagcactttgggagtctgaggccaaggcgggcaaattgcttgagcctaggagtttgagaccagcctgggcagcatggtgaagccccagctctgcaaaaaaaaaagacaaaaaattagtcaggcatgatggtgcacacctgtagctccagctacctgggaggctaaggtaggaggatcacctgagcccaggaggtcaaggctgcagtgagccatgttcatacccctacacttcagcctgggcgacagagggagactctgtctcaaaaagagaaaaagtttgctgaccctgtgctaaagaatgtggggcagtcatactagatgaatgagaaaaaaaaggagataaaaggaaacaatataaaaagttaaacgtagccataatgaaattttagttagaaaattatttggaagttacttgtggagttgtttagttgcctgcaaattttacataatttataagcccattatttatccatctgaattttattattaaaaaatcttagtataagctttctgatttagtataaagaaatttgtcacatgattgarttttctcgttcttacatgaaaatattgttcatttttttctttctgcagggtttggtgggagctgyttccaaaaggatgttctgaatttggtttatctctgtgaggctctgaatttgccagaagtagctcgttattggcagcaggtattaatctctataggtaataatttctgtttagccaggcatagtggttcacacctgtaatcgcagcactttaggaagccaaggcaagagcatcacttgaggccaggaatttgggactggcctgggcaacatagtgagaccccatctctacaaaaattttaaaaattagccaggcatggtgttgcacacctgtagtcctagctacttgggaggctgaggtgggaggatcacttgagcctaggagttggaggctccagtgactgacttatgatcgctccactgcactgtagcctggacaacagagtgagaccctgtctctgacataataatagtaacagcaataataatagcagtttctgtttagcttctcattaagcatgtcactttttgtccatgaaatgtttttgatggaatttatttattccaggaagtcaaaaattagtatattcaatttgcttattttatgtttatttattgggtatctgtgtttttaatttatctttcctgctaatcaatgttgatggaagtttgtgataagccagtattctaatttgctcccagagtaaaacaaaaacaattatccttaattataactcttctctcttttttttttttttttttttgagacaagatctcactttgtcacccaggctagaatgcagtggtgccatcgctgctcactgcagtgacctcctgtgctcaagcaatcctcccacttcaacctcaacttcaggaacgcaccaccacattggctaatttttttatttaaaaaattttttttgtagagacaaggtctcactatattgcccaggctggtctgaaactcctgggctcagcagtcctcccatctttgcctcccaaagtgctgggaatataagtgttagccagtgaacctagcctaattcttctctatcttgaaaggcataaaatcaaaataaaataagaacctatattataacgttggtcgggcatggtggttcacacctgtaatccctgtacttcgggagcctgaggtggacagatcacttgagggttgggagttcgagactggcctggcgaggctgaggcatgagaattgcttgaacccaggaggcggaggttgtagtgagccaggattgtgtcactgcactccagcctagatgacagagcgagacttcgtctccaaaaaacagaacctatattgtcatgctttcaagtggttttgtatctgctgatatttgttttggacctttcagactcacagagctaaaattagaaaccccttccaaattggaagcattaagtgagctctgggaagtagagttgatgtttattgaatgcttaccctgtactgggtactcttttgggcactttgcatacagtatctcatttaatcctcatcactaacattatcctctttatttgatgagggaactgacatggagatattaagtaatttgccccaattactagtcggtatatgtgcctttcccaaatattttccccgagtttataatttttcaggtttcagcagtagatatgggagggaatctaaagaaatgcacgtttctttttttaaaatgttttactttttagagacagggtctcactgtgttgtccagcctagattccaactcttgggctcaagtgatccttccacctgagcctcctgagtagctgggactacaggtgcaccaccctgcctagccggaaatgcacattttaaagtgaaaacagatacaattagtgtcattccagtcaatccatcatgatggctttatctcactgttcattgtgtgaaaaatgcagataaactcttgattttccaacactttgggctaattgcttaagctctcagggtttgattgagatggtccctgaaagcttaaagccttaaaaaagtttcttttgcttygcccaccyggttaccaacctaaatttaacagattaagtgatcagagactcttataacatttagttagttaaaaaaccttgtcaaatagttgtggtgttatggttcatccagaggcagctagaactctgcacattgtttgttgcctgtccactttccactgaaactgaatttttgtgaatagtggggcacaagcaaatgaaggaatactttggggtttcattgcttgtagcttgtttccacagaatttggagacacggrctaaggakagtatggtttcctatgtgccttatttaggttggtctcatagctgaacctcaaatgcgcttagaattaaaacttggttgtgcgctccacttttggcatccatcctagccttatgcatagaaaatcaagccaaatgaaattagaaatttttagaatggctttttttttttttttaaatttacggcagggtctggctctgtcgcccaggctggagtgcagtggcatgatctcggctcactgccacctctgcctcctgtgctcaagccatcccacctcagcctcccaagtagctgggactacaggcacatgccaccttgcctggctaatttttgtattttttgtagagacagggtctcgccgtggtgcccaggctggtcttgaactcctgagctcaagcaatcgcccacctcggcctcccaaagtgctgggattacaggtatgagctaccactgctggcctaggatggctttaaggaaggggatgagtgatttttttttttttttaatccataggcactagagtttggttaatttttgcctcttgttaatatgtaagcattgtatttgtacaatagcactcaccataaaattctgagtaatgtgtgtcataggctgtgcctcttttaactaatcattgcacaattgtacatgtaatttcaggtcatagacatgaatgactaccagaggaggaggtttgcttcccggatcatagatagtctgtttaatacagtaactgataagaagatagctattttgggatttgcattcaaaaaggacactggtgatacaaggtatcagtttttaaaaatatttcaacccttttgagattgtgttaactcctcatcttaattttttgattggggtaggtgtacataaaatacatgtatatatataaaatataaagaataaaaataaatatccatatcttcaccactctaccagcttcagaaatataattttacctgtatcttaaactccctggtattagaatataatgccacataaagcttaccaatactgattttttttttcctatagagaatcttctagtatatatattagcaaatatttgatggatgaaggtgcacatctacatatatatgatccaaaagtacctagggaacaaatagttgtggatctttctcatccaggtgtttcagaggatgaccaaggtaaggctttgagtctcatgaatcattttgagtccagacctgaaaactttttatcttttggaaaccttaggttgttcagttttatcatgtatatcattggtaggccctcttttcaacctcatttctctgaaattaaagtcttaggcataatgtcatcaacattgatttgaagtgatcagctgtggattggtccattgatttttccaacatactccacaaatccccaaaattccaaagagatgcttccaaagcagggtttggggcctcccaccatcactcccattgatactgcaatcagattattcccaactcttcctgcagtcctagtgttagaatacctatagtactatccccttatgtgtggttttgctttccacgggttcagttatctgcggtcacttgcagtctgaaagtactagaaggaaaattccagaaataaacaattcataagttttaaattgtgtgctgcttcatcctgcctgggacatttatcattcctttgtccagcatatccacattccatatgctacttagtcacttagtaacttttggcaatcagattcaaaaaacaggtatgtgtgtaagtatatatagggttcagtactctccacagtttcagacatctactgggggtcttggaatgtatccctgcagataaggggggaactactgtaatgtcatataactcctttcttatttctgtttttttgttrttgctattgttacagtgtcccggctcgtgaccatttccaaggatccatatgaagcatgtgatggtgcccatgctgttgttatttgcactgagtgggacatgtttaaggtaaggtaacagaaaagatactaaggaaaattctagaggtgttccactatcagctggggttgagtatgtgttcatgtatgtgtttttttgtttttttgtttttttttttgagatggagtctcgctctgtcgccctggctggagtgcagtggcgcaatctcggctcactgcaagctctgcctccygggttcacgccattctcctgcctcagcttcctgagtagctgggactacaagctcctgccaccacgcccaactaattttttgtatttttagtagagacggggtttcaccatgttggccaggatggtctcgatctcctgacctcgtgatccacccatcttggcctcccaaagtgctgggattacaggcatgagccactccgcccggcccacgtatgtgttttaattgttcctgtggtttgtctttacaggaattggattatgaacgcattcataaaaaaatgctaaagccagcctttatcttcgatggacggcgtgtcctggatgggctccacaatgaactacaaaccattggcttccaggtaatcatgatcctggattgttttttttctttttgtttggtctttagtgtttgattcaacaactggggactataatctagtcaagttgacatcaaaagaccatcacagcaggtcagaatatgtttggctaattaagatgataccttctttctagggaagttcttttggggaaccaaatcaatatcagaagtttatttcaacaattaggaaagtgctcatttgctttttaaacccattgtgtgggttttagaattttcttattttctttagcagtaacgtaactctggggcaacatgtcagttctttaggaagtccctatgggatttttctgactactctacttctctacttcctccctaaatttgcgatctaaaggtagagaaagaaagaggtcttggtcaatcagcaggtgttcatcctataccttctgagtactcagcactgtgccagtgctgtgaggggtctgaatgaaacatatgggagtttcaatggtactggccctcttctgattcaaagtttgtcaactggccaggcatagtggttcacacctgtaatcccagcactttgggaggctgtggaggtagaccacttaaggccaggagttcgagaccagcctagccaacatggtgaaaccccgtgtctattaacaaatacaaaaattgctgggcgcggtggctcacgcctataatcccagcactttgggaggctgaggcgggcggatcacaaggtcaggagttcgagaccagcctggacaatactgtaaaaccccatctctactaaaaatacaaaaattagctgggtgtggtggcacacacctgtaatcccagctactttggaggctgaggcaggagaatcgcttaaacctgggaggcggaggttgcagtgagccaagatcacaccactgcactccagcctgggtgacagagcaagactccgttttgggaaaaaaaaataataaaaattagtcaggcttggtggcctgtgcctgtaatcccagccacatgggaggctgacgtgggaggattgcttgagcccagcaggcagaggttgtaatgagctgagatcatgccattgcatgccagcctgggtgacagagcaagaccctgcctcaaaaaacaaaaaacagtttgtcaattatggaacatttggaaagctgacagaagcctccacccagaacagtgtttttgtatgttacatctatttcagttctccaaggagtcccaaaggtattaataaggagctattttccatttcctcagagcagtatgtatatggggataggaggatggggaggtggagtaagttagggagaataaaaaaatatgccagggggttgttgtcaatgtagtgcccaagcaagcagaaaagcagcagtgtttgacagcttgctatgcacatctcagcaccagctatcttggagaggtatcagtaaggcctaatctgctattcaaaaatatctgatctggttctcttaacctctcaccaacttgttgaaggtccttatttagaattcagtgcccatttctcattcatgagagatttacttgtggaaagaatcaaatggcatccttgtctgtgaactcttccatccaagaccttggggactcttctattccacccctccctagtgagtaacaacatgactgtttttcccagtcatgactaaactcaggaatgttatttttaaaaggttatttgcaaggcatagacacattttctctcattcctgttttactcatctaagggaaaagatatgtagagaaatacatattttaaatgattttaagttattgtaaaagttaaytttcctagtgagaaattaaaaaaaaacaggaatggaatcactaaataaggagaatttgtaagtcactgagacaactggttaatataaagcagaagccctttctttgtggtacgagtcagaattaaatattagtttttaattcaaaagacatgaaaagtgagtagtatgtttatctctgctgtggaggggagataaattcatgactgttgaagtagtagtgtttttaatgataagatgatgattttgaatatatggaataaatgaaaaatgtaataggcaaaaccaaaattgattatcatttagtgaaggctggcttgctgtatgctaagcactttacctaatttaatacttaccacgaccctttgagttaagtggtggtaacacaatttacaagtgaggaagaaagacctagagagtttaggtaatgcagcaagtgccagtcaggattccagctggggcctttcagactctgaagtctgaattcttaagaattatgctggccgggtgcggtggctcacgcctgtaatcccagcactttgggaggccgaggcgggcggatcatgaggtcaggagatcgagaccatcctggctaacacggtgaaaccccatctctactaaaaatacaaaaaaattgccgggcgtggtggcaggcacctgtggtcccagctgctcgggaggctgaggcaggagaatggtgtgaaccgggaggcagagcttgcagtgagccgagatcacgccactgcactccagcctgggcaacagagcgagactccatctcaaaaaaaaaaaaaaatttatgctgttggcagggcacagtggctcacgcctgtaataccagcactttgggaggccaaggcggatggatcacgaagtcaggagttcgagaccagcttggccaacatagtgaaaccccgtctctactaaaaatacaaaaacattagcctggtgtggtggcgggcgcttgtaatcctagctacttgggaggctgaggcgaggagaatcgcttgaacctgcgaggcagaggttgcagtgagccaagatcgtgccactgcactgcagcccaggcaacagggcaagactccatctcaaaaaaaaaaaaagmattatgctgttaccattcgggcacagtggctcacgccggtaatcccagcactctgggaggccgaggcaggcagatcacttgaggtcaggagttcgagaccagcctggccagcatgtaaaacctcatctctactaaaaatacaaaaattagccaggtgtggtggtgcacgtctgtaatcccagctactcagaaggcagacaggagaattgcttgaacctaggagacggaggttgcagtgagccaagatcaggccactgcactccagcctaggcgatagagcaagactccatctcaagaaaaaaaaaaaaaaaaaagagaattatgctgttagcttttgcaggttttttagtacaagggaaattgaaatgagaatggagtttgaaataaaatatgaactcactggaaactggtaggttaatttcatacatgtttctaaagacagtggtggcacataattgactactttgagggagtcaggtgtggggaatggcaggagtgagaaagtctagatatgaatattacgatggagtayagattaattctaggaacaaaaaatagggaagaaaccaaagatctctcatagcaactcagacaacttgagaatccttttctaagaaaaaaatctagattccccctgctcccatttcagtacattataaattcttacacttatataattgttaatagttctcttaaattttatttttttttcagattgaaacaattggcaaaaaggtgtcttcaaagagaattccatatgctccttctggtgaaattccgaagtttagtcttcaagatccacctaacaagaaacctaaagtgtagagattgccatttttatttgtgattttttttttttttttttggtacttcaggatagcaaatatctatctgctattaaatggtaaatgaaccaagtgtttttttttgttttttttttgagacagagtctcactgttgcccaggctggagtgcagtggtgcaatctcggctcactgcaagctctgcttcccaggttcacgccattctcctggctcagcctcccaagtagctgggactacaggcacccgccacagtgcctggctaattttttgtatttttagtagagacagggtttcaccatgtgagccaggatggtctcaatctcctgaccttgtgaaccacccgtctcggcctcccaaagtgctgggattacaggtgtgagccaccacgcctggcccatgaaccaagtgtttttaaggaaacaaaactatttttttaatcatcagatttatactagctatatggatattagcatatctggtaattatgaatctagaatttttttacatatttttataatactgttagctcagttattggatgagtgaaagataatcatgttggttttaatagtgtcaatttttgtaaaataaaaattaaacttcaaactctttactttataaattgtccataggccacactttaatatcacattataaagggaaggacagtcttcattyctcctggttattggtttgtttgtcattaaagatatattttgaatccatgaaattgctatgctaaacagcctttacatgtatggtctggttaaagttcctttgttccttttgttttaataaaatgtgtcactgattttttagctcaaaatcatcactgttaatttccagtcaccccaaatatggttaaaagattttttttttaatcatgaagagaaaattagtagcatttctttctctccccattatttattggttttcctcactaatcttttttttttagtccaaaagccaaaaatatttatcttggttttacattttaatttccattcttaattgtaatttttttctttaaataaggaaaccaatataatctcatgtataaaaacttaaatattttacaagttacatatagcatcattctaaaataagaattttttttgttttctgtctgcttttttcttatgtctcttgttgagttttatattttcagtggttatttttgcttgtgttagatcattattaaaatatatccaatgtccctttgatacttgtgctctgctgagaatgtacrgtttgcattaaacatcccaggtctcatccttcaggaattttgcagttcaatgagaagagggagacaaatataaagatgaggacagaagcatctctacagatgaaaattacataaataaaacattctccatcaacaactatatgggtgtaatttttgtcaattcacaagtaactgagtcatgacagcctgacattagatgggaaaaaaatgacacctcactttttagagaaaatggtatatcattctctcaaatgatgcaacaaagggagggaatttagcaaataaacattggcaaactgtagcccctgggtcaaatctggccagccatgagtgagctaagaatggttgttacatttttacatggtcatatgttaaatggtttgaccaggcatggtggctcatgcatgtaatcccaccactttgggaggccaaagagggaggatcacttaaggccagtttgagaccagcctgggcaacttactgcctaggcaataagtaagaccccatttctacaaacaaacaaagcacaaacattttaaatggttatacaaatccctacataatatcctcaactttacctcttggctggcaaagcctaaaatatttcctacctggtcctttaagaaagtctgcatacctctgaaagagacaaatgctagagttcgaacataaggtgagcctttactcataagactttgaagtgaggatgagtttattaattagaatttgctttacatttctgcttgaaaatattattgtattctgcttagtaattttatattctagtaaaggcattgtaagtccaaagatgtatgaagatgtatgctaaagcagatagaattaggcacttgtcctgtccaaatgaggaatttttaaatttttaaatggtttttttttctatttttagacatctaatgctatagattcaaactttttctactcttgtctagatatgccaaatgctggcaaaaaattgcttttgttgttgttgttgttctttttttttgagacagagtcttgttttattggccaggctggagtgcagtggcacgatctcggctcactgcaacctctgcctcctggggttcaagccactgtgcccagcctaagaattgctatttggatgttgccgaatttgtaaaaacacagcaataagcaaaatccttttgaacaaagaagtcctgagttcatctcattggtggactgaagcaattctgtagcaaataaatcctttgaaagagctccaaaaagaagaaaaaaagaaataggtacttgtgccgggtgcagtggctcatgcttgtactttgggaggctgaggtgggggatcacctgaggttaggagttcgagaccagcctggccaacatggtgaaaccccgtctctactaaaaatacaaaaaaactagccaggcgtagtggcacgcgcctgtaatcccagctactcaggaggctgaggcaggagaatcacttgaacctgggagcagaggttgcagtgagccaagatggcgccattgcactccagcctgggcaacaagagcgaaactgtctcagaaaaaaaagaaaagaaaagaaaagaaagaaataggtacttgttttaaattgcaagatgtttcaatgcctggaactgataagtaaacaattattgtaagatataattactggccgggtgtggtggctcatgcctgtaatcccggcactttgagaggtcaaggtgggtggatgcttgagctcaggagttcaagaccagcctgggcaacatggcgaaacctcgtctctaaaaaaatacaaaaaattagccatgagtggtggtgcatgccagtagtccaagctaactgggaggctgaggtgggaagatcacttgagcccaggatgtcaaggctgcagtgagccgagattgtaccactgcactctagtctggatgacagagtgagaccctgtctcaaaaaaaaagaaaaaagttactggtaaatggaggaaaatgggcaaaagagggctcatagagccagataaacttgctgtttgaaatgggaggaaaaactcagtaattaggcatgtaacttaacagcaatttgagactttcatgtgaaaagttgaaagaaggtggttagtctttttttctctcctcaaccagttaaagacaattgttgtttttttttaatcatacaaactttcagtttttaaaaatatatatatttaaatttttatacctgatccctaccaccaggaaaagtttcaattttttattagctaatatatttttggtagggcagaggaatattggtaagattactaactgtacttaaaattgaaaataataggccgggcgctgtggctcacgcctgtaatcccagcactttgggaggccgaggtgggtggatcacctgaggtcaagagttcgagaccagcctgaccaacatggagaaacctcgtctctactataaatacaaaattagccgggtgtagtggtgcatgcctgtaatcccagctactcagggggctgagacaggagaatcgcttgaacccgggaggtggagattacggtgagccgagatcatgccattgcactccgacctgggcaacaagagtgaaactccttctcaaaaaaaaaaaaaaaaaaaattgaaaataatatatggacatggtaaaaagacattcacatagatacaaaaggataaacaaaatctctctcctacaattttctctcctacaattccacttaagacttcttggctaagctacctgaaagccttatttttcccatctgtaaaacagataatccatctccaactcgaagaattgttataaagattacatgagatgaatgtttacacaaagatcttcttggcacagtgactggcaggcaatgagcactcctgttagcaccataacaagctggtcccactgcaccagaaccacgtgtaggctctggaatcactagaaggacagtaattaacactgaacattttggacaggcactatgcaaagtcctttaggtgcattttctcatctgttcctcacataagtctttatttcatttcattttttacttccccatgttattctaggactcatttaagtcttttgaggtaagttctgatcctgtgattcagactacaggcagaaggctcggaagatttagcagcttgctcagggtcacaccttaataagtggcagaaccagaattcaggacagactatgtgacttttctctccagcttttaatattagtcattctgcttctctggatacataaaggtgcccaggtaaaagtcattcttctcaaatgcaaagaattaaccaggcatcaggccaatacttgtcatgcagacttaagccaatactttgttatgcagtacttgtcactggtgccttatcttcctatttctcaagaaaaagctaaaaatctggatttggtggtgtggtgttttttgttttttgagacggaatctctgttgcccaggctggagtgcagtggtgcaatcttggctcactgcaaccttcacctcgcaggttcaagctattctcctgcttcagcctcctgagtagctgagattacaggcacccaccaccatgcccgactaatttttgtaaaaatctggatttttatataaaatctctcaatttataagtgttggcacgatgtttaaaaacaaatttttacactacacacaccaaaatatctgtgaagggtagatctagatcaaaggttgctagtttttaaaaaaagaaaaccctaaattctgacataattttagatttacagaaaagttgaaagaatggtacaaaaatgctgtatacccttcttattcactaaatattaatattatatttgctttgttttatccttcctgtatacatcacacataaaatttatatttatataaatttttttcctgaatgatttgagattaagttgcaaggccaggtgcggtggctcatccctgtaatcccagcactttaggaggctaaggtcaggagtttgagaccaacctggacaacatggtgaaacctcatctttactaaaaatacaaaaaattagccgggcatggttgtgcgcacctgtagtcccagctacttgggaaactgaggcaggagaatcattcaaacccgggaggcagaggttgcagtgagctgagattgtgccactgcattctagcctgggtgacagagcaagactctgtctcaataaaaaaaaaaaaaaaaaaaaaaaaagagagtaagttggagacatgattcccttttcccctaaatacttcagggttatctcagtttctgtgggtcaggaattcaggaacagtttagccaaatggttctgggtcaaagtctggttgtaatcaaaatgtcaaccagggctttggtcatcaaaaggcttgactggggctggaagattgtcttccaagatggcttgctcatatgactatcaagttagtgctggcggttgacaggaggcctcagttctttgccaactggatctcctcatagcactgcttgaatatcctcatgacacagcatagcaagttggcatcttcaagagtgaaaaaaccaatagaggacaagacagaacctccaatgtcttttattatctagcctcagaaatcataccccatcatttctataatatcctattgtttaaccagatagctctattcactgtctgaagagacatggatatcaggaggtgataatcactgggagccatcttggaggttggctattggagttttatttcccaaaaaataaggaaatagggcaggtgcagtggctaacacctgtaatcccagcactttgggaagtcaaggcaggaagattgcttaagcaatctggcaaaaccccatctctaccaaaaatacaaaaattagccaggtgtggtggtgcatgcctgtggtcccaactatttgggaggctgagatgggaggattgtttgaggtggaggttgcagtgagctgagatctcaccactgtactccagcctgggcgacagagtgaaactgtgtctaaaaaacaaaacaggccaggagccgtggctcatgcctgtaatcccagcactttgggaggccaaggtgggtggatcacctgaggtcaggagagttcgagatcagcctggccaacatggtgaaaccccatctctactacaaatacaaaaattagctgggcgtggtggctggcacctgtaatcacagctactcaggaggctgaggcaagagaattgcttgaacccgggggctgaggctgcagtgagcagagattgtgccactgcactccagcctgggtgacagagcgagactctatctcaaaaacaaaacaaaacaaaacaaacaaacaaaaagattgttactcctttaaactttcatccactagttttagcatctactaatgattcctgtctgaatcaattattataacaatggtagcttccagtttttgatcaagtttgaatcttgcttttaccacttagtagaaatgggaccttggcccagataagtcaactttcttaagtcaatttcttcatatataaagcaaggataatacagtacacttcagaaggctgtttgtgaggattacattagataagagtgtaaaacacttggcacagggcgtggtacacaggaaacactccagaaatgttagggggactttgttggttgcccatccagaggatccattcccctttcttccttcctaacagagccccagtgttcagatgttcatccccacctgcttacctcaccttcagatccaaggatggtccgtcttacttttgtttaacaaatttcccttgccaatgatttttcttgccaatgattgcttcagaaacaaccttgtgaccaatgctggcgattgagaattgaggggtagtttgttagtaaggctcctgggacacattcctgaaacagctacaaggaaagttgccctctcttctccttctggatgttgtggctggatatgatccctggataacaggtatttggttgtgacagccacagccaccatcctaccagactggggtgaagccaacaccaaagatggcagagataatagaaggaaaaacctagatcctcgattactttgttgagtccctgaatcaatgaaccttgaagactacttcctgtttggtgacataaatgtcctccttaatgacacgat

SEQ ID NO: 95784 - DNA, 30580 bp, Homo sapiens
  misc_feature (1)...(30580): n = A,T,C or G
acaaccccatccgttatttctgagcaaatccgagatttatgatttcctccaaatttcttaaaaacctaaccaaatagtcatcaaacaacaagactccttaatgtatgttcaattagtgtacttgaatccagatctaagacgtatagggcatggtgacccatgcctgtagttccagccctctgggaggccaaagaggaacacttaaggccaggagttcaagaccagcctgggaaacatgagaccccatccatactttaaaaaaaaaaaaaaaaaagatgtgacggtgcctgcctgtagtccttgctactaaggaggctgaagcaggtaggattattgcttgagtccagtaggttgaagttacagagctatgactatggcactgtattccagcctgggcaactgagtaagacattgtaagatccaagataacatatatgccaactgatcgtgacctctgtccttatatttactttttctgataaagtacctgaccataccttacaatgaaggtacttagtacgttttcctgacgcatttgatcaaggatgaatgttaaattttgccttagaaattgcagtttccatcaaatgagatgtagaattcacaaaggtttgggggtcaccatgttgacctaagtctagttatggtggccttgtaccatatttaaagtataacacatggaattaagagattatggaagggttatcaatttttaaaagcaagttctagggtatggaagtaaatggctgaggtaaaggacaagattattgagaccatgaaccaaaccaactacaccttctaattctaactgatgctgtatcactctgttctactcctcagctgtttctccaccagtgactaagacaacatttgccttaccaaatattcaaattcatgcctcagcaaatttagacactttcagggtattcctaaagttctatatgcaatgatgaatggcctcatgtttgcctgtcactggtacaatattcctcttgcctaaaatatatccttgctattccttcaagaaccagattaaagctccttgttccacgagggaaaaaaactagctaaaaaggataaccggtttaagaagaaggtccaaatcaataggtcttttattgcatcatttaaatatcacaagtaggtcttaagtgtcatctggcatcttctttctgtagccaggtaactgtaaaaaaagaaaaaaaatctgtaaatccccatcaatacacttgcccaggaaagtactaatcttttttctgtactattctaaataatctaaaacatacctcaagactatgacttactgattcatagtaaactatacgtagtaaaatgcatgccaattccatcttttattctgtcaaatttactgtgttccagaatgcttaactctccattttctattactacaaattcagtttaagtcttttagtaaattaagagcttcattcaactagagcagtaataaaacttaagacactgtaagaacttacctcttagatcttattcatcagcctgctgaacagttcctttttcagagacatagataccatccaaaaatttcctgatatccttgtttttaactgttgtggcttgctgaatcaaagccgctataggagtgaagataaagcaattaatacatcagcctaacccatcttaaaaagaaagtatttcattatgtgctgtacttaaaatttcagaatgtgacctttttattttcacaatttaaaaaactaatcaaataaaaattagcaaaatactgtattttaaacaagatttagacaaaatcttgtaggcatagttagacatagtaaacatacaaacctgaatttgaaacaagctcaatgtcatttccttcaaggattaattcatctttctgggcttgagatactgaacaagcaacacctaaaaggggagagggcatttgcacagcatcaaatctgtgtaaaaaatatttaaattgcagaggcactaatttattccatgtaaaactccatgcaccaaaagaaccttttcttaagattttgaggccgggcacagtggctcacgcctgtaatctcagcactttgggaggccgaggcgggcggatcatgaggtcaggagatcgaaaccatcctggctaacactgtgaaacccatctctagtaaaaatacaaaaaattagctgggtgtggtggtacgtgcctatactcccagctactcaggaggctgaggcaggagaatcgcttgaagccaggaggcaggggtttatttttaacataagcgttttcattaaatgttgctgaccatagctagtatcagagtatttctggacagccattattttgatactaagaatctcccttcttcccacccctccccaccccaatggaatcaaaatgcatcaagaggccgagccaggtatgttttaagaggccaagggggaagaactgcttgagcctgcaagttcaagaccagcctggacaacatagcaagaccctgcctctacaaaaaatttaaaaattagctggggccaggcaccatagcattccttgaaatcagcctgggcaacgtggcgaaacagtctctacaaaaaatcaaaaatcagctggatgtggtggcaggcacctgcagtgccagctagtggggaggctgaggtgggagaaacacctgagcacgaaggtggaggatgcaatgagctgagatcacgccaccgtactccagcctgggcaacagagcaagaccctgcctcaaataaaaagcactaagctttaaattttttttaaagctaccgtgtttactatgtattacgcatgcattgttgtttttcaactttaactcatttaatcaaagatgtttgcaattttaagctgcagagagatgacatgcccaaggtggacagtgagagctgaaatttacgctaggctattaaccactactcatgtagttttctctttagattttaaaggttcttaccacgaagaaataaatggagtgatggatgtgttaattagcctgatttagtcattccacagaatatgcatgtgttgaaacatcacattgtgctccataaatacacaccattatatacaccttttgtaaatttaaagtctttttaaaagatttcatttgccaagttaaatacaaccaccactgcaagctactccaatgtatcaactttctgaaattgtaatcgacataatgatataaacccttaagtagcaccaacagttgtaagtgtaatcaagagataattctaaaacaaatctggttttactcagcacaaacacaaaacaacagccaactaaagtatggaagttgggagtggaaaaggaggaaaaaaatatgaaggaaaaatttcttaattctgtctgagggtatgcacatacctggtctcatccgaaccctgcggatrtatttttcacccaagaaatttcggatttcaacaagagacccattctcctggataacaacgttgatggggaagtgagcatacacagacctcatcttgtaacggaagccctatgttaaataaataagcaagctattagcaatgctgaggaatatttttaatagttttaaaattttctaagatgcttatacttattttaaaacgtaacactcactgccaagattttctaataactgtcacctgaaccaagccttataaacattgttctgtctattcagtggactgtaaagctccttgcggaggctttatttcactagctcttatgccctcaatgaacaatgctgccttcttttaatgagaaccccaaagccctgatcttagacattagactaacatttactgagttactaaggtacagcacatggcaggaattgagaccaccaagccaaaggcaggccccctgccttcaaggaacttaaggctaagagcaagggtagatgggggaatcttaacagatttataatagatgtacagggtgccattatcaggtgcattctagaaggtataatgcaaagaaaaccatttcagcatgaactttttatcttgaggggagagacggtgggttggaaagaataatgacatacattatggcagcagacagaaaactcagaaactacatctttttctatcccaacaaggggtcctgatggtgagatttgactaccaactagtactgcaactgtagatttcctatcttaaagaattcggaaggtatgaaaattcatcattagcctactttttaaaagttgtacccatctagccatgcatggtggctcatgcctgcaatcccagtactatgggaggccaaggtgggaggatcacttgagctcagcctggacaaaatagcgagaccccagccttgattaaaaaaaaaaaaaacccaacaacagaaaaaaacaaacatgttgtacccatctggtctttgctctcagctctatcgcttaaagacccacagatgcctatttttgccaagttcttgcgtattacaccaaataaaatacatgacccattctctgaaagagacacttacgctgtataaagcacaggtttgagaaacctccctttccaaaacaaggaagtctgatacatctgcttaccagtgtaacacccttgatcatgttctgtacatgactacaaatagtccgaacggtagccagttcctttctgttaccccaccatttgtcaacccggagctgtaacagaacaaaaaatgtattctttccagaaatatgcaggcttaaaagacaacagaccacttaccgaattactttaagattctagaattaacccttatcaaagcacatggttttcaactggaaaaatccaaccacctataaaacctcccaacagttaagctttgtagaagttgcaacaaacttcccttctggaaaattaaatcatcaggtttaaatgacctactgccggttcctgtgatttttacaaagcaatcactaggaaaataaaccaaacttctaacaccattaagacgtgtcactgatgaccactattacatttgagctttatataattggctgtgttcagaatctggtttttcaatttcactgaacaggctggtattctggacagcaacatttaaagctgaagcactgaacctcaattcgaaaattgttaaagcaaccaaatgtgatgctgttataaaccaccttccaacgagcaactgaattatcagaagaaaaaccctcaccctcttttttttctttccaagaaggctgagttctacattgatgtgattgaagtccctccgcagggttcctctggggcccttcacgataactgtgcgtcccttcagagtaatgtcgactagaagagagaacacactcgtcaggccacacaacgcttggaacgtgcagtaaagatgtaagtaaaagacatcaagtctcataccattttctggaatgtcgacagtctgattgctgagaatagtcttcattctgaaacacaaacactgggggtgaggccgacgcaaggcccgtttttccaccaaactacgccgcacagagctccactcctactggagactgccaggcggaagttccagacaagatgtcggaggacgggagaccgacagcgggccccagtgtgtcccagcctggaaggagcagccccaaagcgagaattacgaggcccagcagtcgaactcccactcagcccaaccctggaagtcctatgcgggcrgtgccatcccggcaagactgaggrgcgggaataggccaaaaagcccacaacaggattcgcatctggcgccgccaggctcatatggcgcttgccgagctgggggacaaamaggacaaggttccgagagtgggagccgcgccgcagcctttcccagagcagatggtttcagattcccagtacccccacgagcacagaaacatccttacctcgcagtagacgcagcaaagaaagaacgtctgtcgtcattacgtacttgtatcgcgtaagrggcctgcgtattgcgtcatgagtgcgcgacgcacgtaaggctaaagcagccaatcgtggagcagcttggctgcttgtcataaatggagcgacgtaatttcgacctgtcctttcccgggagttagcgatccctcaacccctgcactgcgctagtcctaaagaggaaatgtctctacgctgcggggatgcagcccgcaccctggggccccgggtgagcggcggggcnaacgggtttgggcgtggggtggggggatcctatcccttcagagcgcccatgcccaataataaaggccagtgcatttactgaacatttactactagccaacggcagttttaaacgtttttcgtgtaatctcatgtaattatcccgcnagccccatgatatagagtctctggcatcagtttgtttgcaagtctctctgggccagcaccgaggacttattttctgcttagagtggtttgtaccctatatttatggagcactgcagtgagcaccccacatagctattctgtcttggactcttactgtgtgtgagacaccactctagccgcagagaacacaaacctgtccgctaggcttcagcggcagacattgagaagtgcagtagcaatcgtgcaacaccctaacaggcactctttgagttgtcgaaggttcttttgagatacatgtgcagactcgtggattttgtagtgttttggctrtctcatacacgtttgtgttcagatgtaaaagccgaataccatgatttcttatgttcttgactgccacgttcaaacacagaaacaatgtaacctagaaagtaaaaacgttcatcctggccaacatggtgaaaccccgcctctattaaaaatacaaaaattagctgagcgtggtggcgtgcgcctgtagtcccagctactcgccaggctgaggcaggagaatcgcttgaacccgcgaggcggaggttgcagtgagccgagatcgcgcaactgcactccaacctgggcgacagagcgagactccatctcaaaaaaaaaaaaaagaaaaagaaagtaaaaacgttaggcttggttttaaccttccagttgtctgaaactaaytgggcattattaacctacgtttcaacaattattcaaagctcgagagatttattgcacacttcactttaaacgcccctgattcaagtcaggaccagaacagttttaaactgtggcaccttcttcagttattgcagttcaatcttgttgaaagacaaacatctagttcctggtaggtggagtacatgaaagtgtgatatatgttagttccagagattttcgggccgggtgcggtggcttacgcctgtaatcccagcactttgggaggccgaggcaggtggatcacctgaggtcaggagatcgagaccatcctggctaacatggtraaaccctgtctctactaaaaatacaaaaaaattagccgggcgtggtggcgggcgcctgtagtcccagctactcaggaggctgaggcaggagaatggcgtgaacccgggaggcggagcttgcggtgagccaagattgcgccactgcactccagcctgggcaacagagcaagactccgtctcaaaaaaaaaaaaaaaaaaacagatttccaaatctattctaaactcagtagtaaacagtcaactcttactctcttttaggtttggttccttcagtcatcttttatattctaatgccctagaatactagagctcctagtttgacataatttctgaatcacttttttggctttacccttccgtttaggtgttatgatgggttaaaactaaattattacggactccactaaataaacgtcataattaactctttctttaggtatttgggagatatttttgcagcccagtcagaccgttaagctccttgccagataaaaaaaaggaactcctacagaatggaccagaccttcaagattttgtatctggtgatcttgcagacaggagcacctgggatgaatataaaggaaacctaaaacgccagaaaggagaaaggtaattgaaaatttgagataattttaacrtcccgttcctttattgtgcattattttcagatataaccaagccctagaatctgtttttaatatcagacttgttaaatttagctaaaaatcattagaaagatgtgataacagaactagatagaacaagtaagcagatgaaatttttggaatctttctcttttctcttgcccttactatgttacactgccatctccccattttctacccagcatccaacttcttcagagtaaagattactgctttgctactagtctgttagatctgggttagtagctgttgatgatctarcttgtgcttctcctagtcaatttacatgtgacctatggataccttgccttaatttaaaagaatgatggaattttatgtagaaggtagattgagttgaaagataacttaatcctgctccttctatatcrcaagtggatggaagtcatggagaaccaaggatacacagtctccagtccaaattttagatcttttttccattgagtaaccactataaaatctagaatgtagagcagacagtgcacagttgtgatctttcctcagtctaaacaagtagagtactttttggcagtatcattcatgagggatgagatatttgaaaacttgctcattctcttattagaatagtgtaactctgcctttgcaaaaaaggtagacgtgagtatagcgccctgttacactccattattggtgttttctttttgtttgtttgttcttgagacagtcttgctctgtcacccaggttggagtgcagtggcacaatcttggctcactgcaagctccgcctcctgggttcaagggattcttctgcctaagcctcccaagtagctgggactacaggcgccygccaccamgcccggctaatttttgtatttttagtagagacagggcttcaccatattggccaaactagtctcgaactcctgaccttgtgatccgcccacctcggcctcccaaagtgctgggattacaggcatgagccaccacatccggccattattggtgttttctaaagtggtttgagcaaggctaaatttgattctgtgttcttactcctatgacagaaattataagagttattctaaggttatagaaaaaattattaactaggaattgtaatagaagaaattaacttcaaagctgtgtaattatttggcagcatatttgttaatagatagttatgtttggctttccttaggttaagactacctccatggctaaagacagagattcccatggggaaaaattacaataaactgaaaaatactttgcggaatttaaatctmcatacagtaagttgtcaaagtgtaaactatccctcttcaccaaaagccatgtttctacgtttatataacttaaaaattattaataaatatataaataatagcaaagaaagtaaatatgttaagtgatacattactaccaggaatggaaatatatttagaatcatttttccggcaaacaaagagattttttgccctacgagtttggaaacaaggctttgtttgttttatattgcaaattagatatatgatttgttggaaagaatataaaattaaatatgaaggtatgtcacatacgcaatgccatatataaaccatactcctttacctttaactcttcagtatataatctttcagacttttttatttgcacatatgaagtatatacattcgtaaagtttttaatttaaaaattggattttggccaggtgcggtggctcacacctataattccagtacttcggaaggccgaggtgggaggatcacctgaggtcaggagttcaagaccagcctggccaacatggtgaaaccccgtctctaataaaatacaaaaaaaattagctgggcgtggtggcgtgagcctgtagtcccagctacttggaagtctgaggctggagaatcacttgagcttgggaggtggagattgcagtgagctgagatggcaccactgcactccagcctggacgacagtgagactccatcttaaaaaataaaaattcaagtctgtccattcttacataattatgtaagggagtacacctctataggacatgctcactacactctaatcttaatatagagttgggcagtttaacagccttttttttttttttttgaagacagggcattgctctgttgtctatgctggagtgctgtggtacaattgccttgacctcccaggctcaagtgatcctctctcctcagccttctgagtagctgggagtataggtgcacattaccacgcctgactaactttgattttttgtagaggcaggatttcactatgttgcccagactggttccagactcctgggctcaagcaatcctcctgcctcagcttcccaaagtgctggaattacaggcatgagccagcgcacttggtcttaacagcatttttgaatagtgaatgtcttcaaaaatatgttgtaaacaatgagaagtttaaaatgtctaatcacagtcaccaactgtttagttggtggatattgtcaacctaatggtgttccatttccttttgcatacaggtatgtgaggaagctcgatgtcccaatattggagagtgttggggaggtggagaatatgccaccgccacagccacgatcatggtagggcmagcctcaacctctatggctttagtctagaaactgaamgggactattttgtgtcttcctcctaaaaatgtgcattatgamtctctggtcagatttttcattacatttgcatttatgaaaaatattaagaaaaaacctgatggaataatccaacctgttgtaatctcacccttctctgaataaatctattattggttctttcatttatgtgatagttaatcacgtgctgccttgagatacctctcctatcaatgtttggaaacattattcatgattgcttagctttttatgtgttttctgtttaacatattcaacaagaaggagctgtgctttctgtttttacatccatagagacctgtacattgatctgtcatatattttatgtcttttaaaatcatctttttttattattgaatagatataaaagtatcttcataggccgggtgcagtggctcatgcctgtaagctcagcattttgggaggccaaggcaggcagatcatttgaacccaggagttcaagaccagctgggcaacatggtaaaaccttgtccatacaaaaaaaaagtttttaaaaattagctgggcatggtggcacttgcctgtatacccaacttctgaggaggctgaggtgggaggatcacttgagcccaacaggttgaggctgcagtaagacatgatcatgccactgcrtcccagcctagactacagagcaagaccctgtttcaaaaaaaaaaaaaaaaagtatcttataaactgtgtaagttataaagaataacacaacagacaccctcatacctccagtttgagattaaaacgttagcattatctttgaatacccctctgtaccccctaaactgtatattagaatcccatttttcagttgtgtttctattttgttttaagaaatgggggtctcactctgtcacccaggctggagtgcagtggcacagtcatagctcactgcagcctcgaactcctaggctcaagtaatcctcctatctcagcctccctaaatacctgaggctacaggtacatgccactacactagctaatttttagagacagggtctcaccgtgttgcccatgctggtctcagactcttaacaatcctctcacctcagcttccagagtagctgggattacaggagcaagccactgcaccctgctttgtttttaaatttaaattttgcgtcctttcctgatcccatcccctttcccctgaacactattcttattgctgagtttattatttccctttttagttttatcacatatatttatgttccttgactatcatttagttttgaatgtttcaaatttcttataaacagaaccaaactgtatgcattctttgcaacttgctttattctctcaacattatgtccttaagggtcatctgtctatttcrtttaaattgtaacatttctattctagttgatgggtgacacatgtacaagaggttgcagattttgttctgttaagactgcaagaaatcctcctccactggatgccagtgagccctacaatactgcaaaggcaattgcagartggggtctggattatgttgtcctgacatctgtggatcgagatggttagtgtgtcatcatggcctctaccagaaactggctctaaatgatgacatcatcctgagcagtggattcttttgtttctagatatgcctgatgggggagctgaacacattgcaaagaccgtatcatatttaaaggaaaggtacttatttttgcatttgtgtaatttaaggacctttttggacccatatgagttaagtttaagttcattaccttgaaacagggattattcactttttgaggagtttcatagttttctgataattcactggaaattatgtacacatttctttggaaaaagcatatttgtatgtacagatacatatttgcagagaattttaggggctcagtgacatgaacttacccatagacctttagcccatagaatccctccctcatattagagcattagtctaaactttgaataattttctttaaaaagtataaacctggtcttcttagtaatgatttttttttttttttgagatggagtctcgctcttttgcccaggctagagtgcatggcaccatctcactgcaacctctgcctcccagttcaagcatttatcctgcctcagcctcccgagtagctgggattagaggcccacgccaccaagctcagctaatttttgtacttttagtagagatagggtttgaccatgttggccaggatggtctcaaactcctgacctcaattgatccacccacctgagcctaccaaagtgcgggattacaggcctgagccatcacgcccggcctgtttttttgggtttgttttgttttttcttttaagagacagtcttgctttgtcatctaggctggagtgcagcggcctgatgatcatagctcactgcagcctcaaacttctgggctcaagcaatccttctgcctcagcctcccaagtagctgggactacaggtacactaccacgcttggctaatgtttttacatttttttttagagacggaatcttgctatgttccccaggctggtctcaaactcctgacctcaaccaatactcctgcctcgccctcccaaagtgctgagattattctaattttctacagctcagtactagtttggcacctaagcgcacttagtaaattttttaaatgattccctagtattttctattttctatttactatagttcatttttgaaaaatctgtttgcaatccactaggtttattttacaagcttcagtgggtctcagctttcagtttaaaaaagcaatagaaccaagcacagtggttcacgcctgtagttctagcactttgggaggccaaagcaggaagattgcttgaggacaggcgttcaagaccagcctgggcaacatagggagatgctgtctctacaaaaaataaattaaaaaaaaaaaatagctggatgtggtagcatgtgcccatagtcctacctgcttgggaggctgaggcagaaggattgcgtgagcccaggagttyaaagttacagtgagctatgatgcactgggcaacagagcaagaccctgtttttatttaaaaaaaaaaaattataggatatgttctttgaatatctcttatattcatgataagggtgtacatgtggtcttttctacatctgttctttcagggaacaactccagacactttgccagtgggtttgtgaaaaaatgtgtcagctgtttcagtcgtttttgctggtgtcaaagggaacagctctgtgacccagttcacattataatacttggatgaatagatatagccacaatataaataggaagattaatgtttagctcgtacttcgtttaacaaagctcatgactcagcaacccagaaaatagtttttaaaacccgtagcacttgtgaaatatttgcctagaggaagggaggagagcatgatttgatgactttttaaagaaatcaaaattaaagcaatcaaataatactcacatttatataagaaatacttcaatttactttccaatgagtaaagttttatatttaatgttttaatatttcatattttagtttcttgcaattatttactttttctaaaacctacttaaattaggtttaaaagtctactatatataatttgaaattttattcagtttgcctacaggtgtgttttaaccactgtgtacatagtatttaayggtctgcttttttttttttaataatggttcatgtatgaacatctgtatgttcatacttytcttgacaaagttctaaaggttactgtgttgaagcatactgaacgattactgataatttctattttgaggaacaggtatgtcagttctttctctctgtttgataattctctcttttccccttaggaatccaaaaatccttgtggagtgtcttactcctgattttcgaggtgatctcaaagcaatagaaaaagttgctctgtcaggattagatgtgtatgcacataatgtagaaacagtcccggaattacagaggtgaatacgtgtwcaaagtaatgttgggaagttaggcgggtcaaaatatgccatatattcttgccttttccagggctgaactttgccattgacttttacaaagtaaactctattcttttttgttttttaggcaaactcaatctatgtctcttacataaaaatcagaaaatatcaccaacaaaatcagcataaatatcacccataatagtatttccacccagcaatatcagttactaacaccttagtgtttatattataaacactatatttatactacatatttgkatttttatatttataatatacttaatttttatattacaaacattaagatgttagtaactcatattactaagttactgtgtgtgttttaatacccacaaataattaacatcttttttcttttgttttaaaataatatcatactgcaaatttcaataagttgtttgtttccccctccccacaaataaagttttcaaaggagggaaaaaattacactagagcaattgctttggttgtaattctaaagaaaagacttcaaaaatatatttggctggatgctgtggctcacgcctgtawtctcagcactttgggaggcagaggcaggcagattacctgaggttgggagttcgagaccagcctgaccaacatggagaaaccccgtctctactaaaaatacaagatagccaggcgtggtggcacatgcctgtaatcccagctactcggtaggctgaagcaggagaagaatcacttgaactcgggaggcggaggttgcagtgaggtgagattgcgccattgcactccagcttgggcaaaaagagcgaaactccatctagaaagagaaaggaaaaaaaaaatatatatatatatatatttttttttatattatatatattcatatatatttatatatatatattcagcactaatatgtgtaataaatgatgcagaagaaaaactcgtggctcacgcctataatcctagcactttgggaggccgaggcgggcggattacctgaggttgggagttcaagaccagtctggccaacatgatgaaaccccatctctactaaatatacaaaaaattttagctaggtgcagacctgtaattccagctactctggaggctgaggcaggagaattgcttgaacccgggaggcgaaggttgcggtgagccgagatagtgccatggtactccatcctgggcgacagcaaaactttgtctcaaaaaaaaaaaaaaagaaaaaaactcatatcattcagatgtactttttaaaaaaagtagacactatgctttcttattcctaataatttcagtaattaagactaatcattggcaagtaacactgatgtaagaaaaaaagtaaggattgttatccacatccattcaaattttagaaaaatgaacattttaagcttcgggcaagagtaatatcatttttttctttaattttagcatttagcagtgattttattagcttctacatatgatctgtgtcatagagcctgaaagaagttacagtaaacaataaccaccattttcactaaatcataaacagtagagaccataacttaatttcagtggagaaattctgttaaaaagtgatttctataatgtcagtttcagttacttttaagttcataaatttgtttcttctctttcctgttaactagtctccaatgaaaaacaattacagaaaataaagctgcattagaattgaaatgaaatccagtttaacatcagaagctttctggccttttggcttaaaggataagtcatttaagccatggtggtttggccattgttgaagtctaggacacagcctgttccaacctcatcatgataccaccaccagtgggtgccagtttccctggtttcacttaaaaacatgatcctttccagtgaaaattccagaatcatgcatttctttacctaatatgtggcagtgttgtatacttaccagcagagggcagcttagtcttcagaaaagaaatgaacttgaaagtttcaaccctctgacatgtgggttcagcttatttttttctttgttcagtatggagactctcttacttctgctttttttcctttctcttctaatttttcgcttcagaattctggtttctcaatgcataaactgaagtaatttcttccattctacttttctctgccccaggcttgagatagaactagggagcccagtgaggccttttctttcctaaattaacaggcatctgtgcataaatgctacctttgaactatgtgatttaagataatgtgcagaatgtacttctctggtctttcaggttgcttgcataactatgtacttggttgaacttgtaattcttgctgacaacagtcctgctgttttccagtaaggttcgtgatcctcgggccaattttgatcagtccctacgtgtactgaaacatgccaagaaggttcagcctgatgttatttctaaaacatctataatgttgggtttaggcgagaatgatgagcaagtatatgcaacaatgaaaggtaaagaaattgaaaaatgaaaaatctttcccatgtaatttgagtaatagcaggaacccactcactttgaaggcccttctaagaacaaagaaaagtatatggttatagatggcagcatgaaaaggaaaccaacttgcacatgcaccctcaaatctaaaatacaagttaaaaaaaaaaaagcaaaggaaataaattttcttggaatttcatggagtgatatgcatgacgctcaggatacaaaatttatatcccattttattccccatcctttgcatccactgaaagcatgatttcatccacttttctcattctatcattggacacttttggagagccagcctggtaccaggcactgacagttcatagatcaatgagactaatccaggcctctgagaaagagcttacttgtagcattgtcacataacatggtgtgctttggactttgctgaactttagtcccgtaagtccatttgctttgtgattcttggactttttaaactttggaatttcaaagttttaattttagytgaggacccttggactacttgtagttatttagtggttcaaagagtaataagttcatataataatcaagacctgctgtttaccacattgcacacagtttattagaaagattctgatatgtcatagtttaaatcacagcccccatagcatatcttgtgcattgagtaaaagcctaatgcaacatatttgctctataatataggtgcattgaggtttttgcatataccatttcccataccttttctaccagactcctactctaaaataccctccactactattttagcattgattccatagtattagaagtatttatccttgtatgtatcagccctacatgactgtcttaattattattgttttcagtccttaccacagtccctggcacataatacttttgaatgaatagatgttgtcttattccccaacatgaagattatggactgtcataaagttcacaccgtttttaaatattccttaggaaaattatgcttagatctacaattaaagtatttgctaatgtaatttgtgcwtttcttcctacagcacttcgtgaggcagatgtagactgcttgactttaggacaatatatgcagccaacaaggcgtcaccttaaggtacatgtatcttgatttgcttttttttttttttttatttttaaagatggagttttgctcttgtcgcctgagctggagtgtagtggcacaatctcggctcactgtaatctctgcttcctgggttcaggtgattctcctgcctcaycctcctgagcagctgggactacaggcgggtgccactacatccggctaaaatatacatatatataatttttttttttttttttttttttttttgagacggagtctcgctctgtcgcccaggctggagtgcagtggggcaatctcggctcactgcaacctccacctcccaggttcaaatgattttcatgcttcagcctcctgagtagctgggattacaggcacacactaccacacccgactaatttttttgtagttttagagacaagattttgccatgttgcccaggctggtctcgaactcctgagagctcaggcaatccacccgcttcggcctcccaaagcgctaggattacaggcgtgagccaccgcacccagccaattttttatatttttaatagagatggggtttcatcattttggccaggctagtcttgaactcctgaccttaggtgatccacccgcctcagccttccaaagtgctgggattacaggtgtgagccactgcgcccagcccatgtatagcttttgactcccaaaaaaacataactactaatagccttctgttgaccggaagccataccaataacagtcaattaacacacattttgtatgttacatgtacttatatatatacgtatgtgtgtgcgtatatctgtatatacacacacacatatacacacacacacacacacacacatatatacacatcttattcttatgataaagtcagctagagaaaaaattttttaaagaaaatcataaggaaaagaaaatatatttactagtcattaagtggaagtggaccatcataaaggtcttcatcctcatcatcttcatgtagatgaggacaagggagaagaggaggagttagtcatgctgtctcaggggtggcagaaatggaagaaaatccttgtataagtgggcctgtgcagttaccatgttgttcaaggctcagctgtattcttataagtcccagttttcattttattatctacataaatcagctacgtttgcacatatttgctgcctcccccattctcttcacaaatttcacaactcaagtgaacctagagaaaaagaatttaaaagttgggaaatggcactcatttacacttggttattgtgtaacttgtttttgttatgttagagccagaggcgaagaaagaatgggaaaccattctttctatttctatcatggacatttatccattcattcaagaagcttgtgttgagcagtgaccatgtgccagtcacagtgctaagcagaagatacaagttgagtaagacagtcttgtcctcaagaatcagataagcatgagtaattcttgaatttagctgttaacgaaggaaaaatatagataaataatatctgtagataatctcttctttctctgtcctttggaatagccattgtagcacaaaattgatatgcttccctgtctctgtaattccctgtatttacatcccaatagagtggccaaaaagtaaccagtaaacacgtagtcagggaggagggagaggacaaaagcctgggggtgggggcaagataaattacgcagtgaagagcattctgcatacataggtrtagactttctgcagaatcaaagtggaattctaaaatctgatcagaagtaattatttaaatctaggttgaagaatatattactcctgaaaaattcaaatactgggaaaaagtaggaaatgaacttggatttcattatactgcaagtggccctttggtgcgttcttcatataaagcaggtaagttagattgtggggcatggtttcatttaggccrttaactttccacattaagttctaccaccagtcactaaaactcttgacaaattctaatacctttggtggtcttggtagagggcgtagtttttcttctggaacatccttaggagctttgctccatggggatcatattaagaaaagtttctcttaatcttttgtttcttaaacaaattcagccccctgctttgtaactcagctactatmgtaaaagcagaaacaattagtttattaattttttctatgtgtagatttcagtagtaggttattcagaaatgacagagcatgtcaarcatctaatagggttttctgagaaatacatatttatttggaaatgatgccagctgcatctccagactcagtttcaatcagtttaagcactgaaaagtatcttatttgatagcattgcttgcatcattaaatttctttgtatttttcccccagaggcaacagaaaaatatccataagattatttttctccgtaggaacgtttagttgttttactagctacaatgcaaattttttttacttttggaatttcagctcttattttaatcaatagcttgaattgatttatgaaaagaaaatcattttccaagggataaaaagtcatgtgataatgattgtcggaggatccaaaagaacatatctgaagaccgaatttaatctagaaagtgtttatgatgtccctgtcagttggacttaacaattataatgattaagaataaattggctggccaggtggggtggctcacacctgtaatcccagcactttgggaggctgaggcgggcaaatcacgaggtcaggagatcgagaccatcctggctaacacggtgaaaccctctccactaaaaatacaaaaaaattagccgggcatggtggcgggcacctgcagtcccagctactcgggaggctgaggcagcagaatggcatgaacccaggaggccgagcttgcagtgagccgagattgtgccactgcactccagcctgggcaacagagcaagactctgtctcaaaaaaaaaaaaaaaaaaagaataaataggccaggcaaggtggctcatgcctgtaatcccagcactttggaaggcagttggattacttgagcctaggagttcaaggatgcagtgagctatgatcgtgtcactacagctccagcctgggtgacagagcaagacactgtgtctcaaaaataaaatwaaaaaaagaaacagctaggccaggtgtggtggtgtgtgcctatagtcccaacttcttgggagaccgaggcaggaggatcgcatgggcccaggagttcaaatacagcctgagcaacattgtgagatctcatctctttattttttattttattattattattttttttttagatgcagtctctctccatcgcccaggctggagtgcagtggcacaatcttgactcactgcaacctctgcctctcaggttcacggcattctcctgcctcagccttctgagtagctgggattacagacgtgcaccaccacacctggctaatttttgtatttttagtagagatgaggttttacatgctnnnnnnnnnnnnnnnnnnnnnnnnnnnnnnnnnnnnnnncaccgcacccggctgaccttgtctctttaaaaataaactaggtattggccaggcgtggtggctaatgcctgaaatcccaacactttgggaggccgaggtgggcagatcacaaggtcaagagattgagatcatcctggccaacatggtgaaaccccatctctactaaaaatacaaaaattagctgggcatggtgctgcgcacctgtagtcccagctactcgggaggctgaggcaagagaatagcttgaacctgggaggcagaggttgcagtgagccaagatcctgccactccactccagcctggcgaaagagcaacactctgtctccaaaagaaaaaatatatatacaaaaattagccgggcatggtggtgtgtgcctgtagtcccagctacttgggaggctgaggcaggaaaattgcttgaacccaagagacagaggttgtggtgagccaagatcatgccactgcactccagtctgggcaacagagcaagactctgtctcaaaaataaataaataaataaataaataaataaataaactaggtattttttttttttatctaaagtggtgatgttttaaatgattgctttatatattggggtctaaatcttaaatatgtttaaattagacaaattctatttgaaaaaattaatgctccagtattagtaatattctgtatgttcctagttcctataaagacatttaaggccgggtgcagtggctcacgcctgtactcctagcactttgggaggccgaggcgggtggatcacttgagcccaggagttcaagaccagcctgggcaacatggcaaaaccccatctctacaaaaatacaaaaattagctgggtggctgagttgctgggtggtggtgggcacctctagttctagctacccaggaggttgaggtgggaggatcacctgagcccaggaggttgaggctgcagtgagctgtgatcgtgccactgcactccagcctgggtgacagaatgagaccccgtctcaaaaataaataaataaaaatagtaatttaaaacattttaatgaactagtagctcatcatagtttgaaaacccaagaatttgattcagcactgagtgacagaatgtggggactttgaaaaccagtaattgtaagtgatttagtcttcaagcagcactgctggcaagctaaaaatacatgtgaaggatagaaccactatcagcttctagaatggttagagtaatgtcctttgaaaggagtttttcttttgctaaagaaaaatttctaacataaaaggaagtaaattatgaactttctgatgctttctaaattaccaggaaaagatcagattctggtatatgatgagcattagactaaaatgatggattagggtctgataaagttggtgctactcccacgacatttggaggaggtatggagcagcatggattacttggctgggttatgagccttgggatttgcagagattatatgtagatagactcatcacagttctactcatatgtaagatgacaaagagaagttaatcagactcctcataaaatcaggcctctagtgctgcactctaccaataagcattgagtcatgctgtaagagcaatagactaaatggaacactaatggcctaaaaagagaatgtgccctctaagctgctaacttattgcgtaggcacaactcaggcggtggggagaaagcccattacaaatgaagagctcttgcttccctagaggggaataagctaaagagattccatcagatgcgtctgctcagctgcaacgagatctgttttataaacatcagatccagcctaataatgtagcaaaattgctcttggaaatgaattttgccaagagcaatactttgacagtgatgagggatagatagtgcacataaagtagaattaatgtgcagacccatatatacagtagggtcaccctttgtaatattggcttactagaaagaataatagtaggagactctagtcattattgctggggagaaaggccaaagataataggggatatttaggttagaaaaatattgccattgaggtttgagaagagagaagtgccaataaatacaaaagtcttctttaaagggggaacaccaaaaatataattctgaaatagttgtctcactgttatttactttaaattgatattaatgtgttttcctttttcctaaataggtgaatttttcctgaaaaatctagtggctaaaagaaaaacaaaagacctctaaaacttcaacaagaccttcaagatcacagaaatttttaaaatttgattccagttaataacagaggtggtgccagaatgcctggactgcagtggatgtrccccacctctttgcttaaaaaaaaaaatgtcaatagccaggcatagtggctcacgcctgtaatcccagcactttaggaggccaaggcgggtggatcacctgaggtcaggagttygagaccagcctggccaacatggtgaaatcctgtctccactaaaaacacaaaaattagtcaggcgtggtagtgggtgcctgtaatcccagctactcgggaggctaaggcaggagaatcacttgaacctgggagggggaggttgcagtgagccaagatcgctccattgccctccagcctgggtgacaagagcaaaactccatctcaaataaataaaaaggaaaaaaaagtcaataaactgtacaaatttaattacagtaattcatttggcttttagtgtatcttctttgtcccaattaaacagttgcttgctgtgatgtaatcttaaaatatctttgtaagaattttcttttaacataattttaaaatgcattaaaaacatggcatggtggctcacacctataatcccaacattttgggaggccagggcgggtggatcacttgaacccaggagttcgagaccagcctgggcaacatgatgagaccttatcyctacaaaaaattagccagacgtggtggcacgcacccgtagtcccagctactcaggctgaggtgagaggatcacttgaacctggaaagcagaggttgcaatgagctgaggtggtgccactgctctccagcctgggcgctacaactgctctccagactctgtcttgaaaaaaaaacccaaaaacttccagaagattttccaatccactgttaacatcattacatttcatttatgaaaaataaaaacttcatttatgttactgtgatgaaacagtcaacatagattgaaactcatcagtttagcatttcattcaactttagcattcattcaacgtagattgaaactcatcagattagcatttgtccttgtaatattggaataatttagaaaggcttaagagtgaatgttggccagatgtggtggctcatgcctgtaattccagcactctgagaggccgaggtgggcagatcacctgaggtcgggagtttgagaacagcctggccaacctggtgaaactccattgctactaaaaataaaaaaattagctaggtgtgttggcaggtgcctgtaatcccagctacttgggaggctgaggcacgagaattacttgagcctgtgaagcagagattgcagtgaggcgatatcgtgccactgcactccagcccgggcaacagagtgagactgtctcaaaaaaaaagtaaatgttgattttttacattggtgtgactacttcagaacctgcaaaatagttttatgctgattacatttagtccctctgaaaacaccaaggccataatgctgcctaagacatggaaatagaacctagaaatattaacccttatttgtatagtagcttgctaaatccacatgccctattcctttcatttctcacattggttgtattatatgatggtaaaggcctgagaaaggaatttccttccaaaatactaataactcagattcatcttttgactgaatcctgcctttctactttttctgcatatctaaaaggacacttttaggtggccatgttgtaaaatatgtaaagtggatagccaattctgttttgaattcttataacgagccagtattataaaagtaatgcacatccttgccaggtgtggtggctcacgcctgtaatcccaccaccttgggaggctgaggcgggtgaatcagttgagctcaggagtttgagactagcctgggcaacacagtcagacccccatctctaccaaaaatacaaaaaattagctgggtgtggtggcacatgcttgtaatctcagctatttgggaggctgaggcaggagaatcacttgaacctgacaggcagaggttgcagtgagctgagatcacatcactgtactccagcctgggtgacagagaccgtgtctcaaaaaaaatttttttaagtaatgcatgggccgggcatggtggcttaatgcctgtaattccaacgttttgggaggccgaggcaggtggatcacctgaggtcaggagtttgagaccagcctgaacaacatggtgaaacactgtctctactaaaaattaaaaaattagccaagtgtggtggcgcatgtctgtaatcccagctactcaggaggctgagacaggagaatccttgaacctgggaggcagaggttgcagtgagctgagatcacaccattgcactccagcctggacaacgagtgaaactcctcaaaaaaaaaaaaaaaaaaaagtaatgtatgtctttatagatgctagtaaattttgggatgcaaatttaaccctaccaactttcttttgttttgagacagtctcactctgtcaggctagagtgcagtggcgcgatctcaactcactgcaacctctgcctcctgggttcaagtgatcctcctgcgtcacttcccaagtagctgggattacaggcgcacaccatcacgcccagctaatttttgtatttttagtagagacggggttttgccgtgttggccaggctggtctcaaactctaggcctcaaacgatctgaccgccttggcctcccaaaatgttgggatttgtgagccaccaccgggcctaaccctaccaacttaaaatagaaacatctcaagctaccttaacttattttacaggaaaaaaatggattacttttcaggctaattttgtgacatttctagatattatctaatagttaggccctttgcacagtgtaggccaatggcaggtaaacatttgttagcaggagacccatttggtgaaataaaattctcagccggcgcggtggctcacgcctataatctcaacactttgggaggccgttgcgggcggatcacctgatatcaggaattgacaccagcctggccaacatggcaaaaccccatctctactaaaaatataaaaaattagctgggtgtggtggcacgtgcctgtggcactgaggaggctgaggcacaagaatcgcttgaatccaggaagcagaggttgcggtgagccgaaaatgcaccactgcactccagcatgggcaacacagtgagactgttgtctcaaaaaaaataaatgaataggccgcgctcccgcccagggaggatgcgccgacgccccgagcgcccggccctccgcagcagcccggcagactgcctctgtcatcaggaccctccgtccacgtcccctgtgcggccagcgtcagagccatggcgatggaggagaggaagcccgagaccgaggcaacgagagcacagccgaccccttcgtcatccaccactcagagcaagcctacgcccgtgaagccaaactatgctctctaaagttcacccttgctggccacaccaaagcagtgtcctccgtgaaattcagcccgaatggagagtggctggcaagttcatctgctgataaactcattaaaatttgggggactcatatgatgggaaatttgagaaaaccgtctggtcacagcctggtcgtcagattctaacctttttgtttccgcctcagatgacaaaaccttgaagatacgggacgtgagctcrggaaagtgtctgaaaaccctgaagggacacagtaattatgtcttttgctgtaacttcaatccccagtccagccttactgtctcaggatcctttgatgaaagtgtgaggatatgggttgtgaaaacagggaagtgccacaagactgctagctcactccgatccagtctcggccattcattttaatcgygatggattcttgatagtttcaagtagctatgatggtctctgtcacatctgggacaccgcctcaggccagtgcctgaaaacgctcactgatgatgacaacccctggtgtctttcgtgaagctctccccgaagggtggatacatcgtggctgccacgctgggcaacactcaagctctgggactacagcaaggggaagtgcctgaagacatacactggccacaagaacgagaaatactgcatatttgctaatttctctgttactggcgggaagtggattgtgtctggctcggaggataaccttctttacatctggaaacttcagacgaaagagattgtacagaaattagaaggccacacagatgttgtgacctcaacagcttgtcacccaacagaaaacatcatcacctctgccgcgctagaaaatgacaaaacaattaaactgtggaagagtgactgttaagtccctttgctcccacatgcgatagaccgtcaggaagttgacccggattggcaagaaacatgatgtctcggaggcggtcccctgggtctgtgcctgggggtcaggaccgggcctgatttgagcctcctttttgaagatgatttggccgagtgtggaccaccggaaagttctaaaagttgctggtgacatttcttgccaattctctaacactgtctagggaagagttcctagtctgttgtgttcaaacagagtcaacaaaaatttttaattttttgttacaaaagggtgaagttcaattttaaaaataaataataaatataataaaaatctcatggaacttcaatgtaaaataattaaaatggcattttattagcagtgtatgttaaagtttcagatttgtaacatttactctgtaaataaaaatagggaataagtaaaatgaagcaattttgatacatatgcaaaattgggatttatggataacagttgctgtcttcagcctcaagagtctacttatttgttttggttgcacagtattgagaacaattctaatatagctaaataatagtaaatttcagttaatagcatagcttaaaaagaaaaaaatagtaaataatttttaaaaatggtaaaacacctcatcttggaatgtctggatactttccagttaaatttaatacagaaacttgaaagaggaatagcaggagatgtttttgttttgttttgttttgttttgtttttgagacagagtctcgctctgtcgcccaggctggagtgcagtcatgcgatgtgggctcactgcaacctccacctcaagtgattctcgtgcctctgcctcctgaatagctgggattacaggcacgcaccaccatgcccagctaatttttgtgtttttagtagagacagagtttcaccatgttgcccaggctggtctggaactccaggactcaagtgattcactcatctcggcgactcaaagtgctggtattacaggcacgcgccaacactcccagctaattttttatatttttagtagagatggggtttcaccatgtaggccaggctggtctcaaactcctgacctgaagtgatccgccagctttggcctcccaaagtgctgagattacaggcgcgagccactgcgcccagctggggctgctatttttgaatctgcttttaaagagcaggtggtacctttcccttcctcttttcctttttccttgctggctagaatgaaaacatgatgcttagagtgggagcagccatcctggacatgagatgggagacttgtgtcaaggacagcagagcgaccagatgaggaaggcttgggccttttccagccctcgaccacctacctggacttttgtgtgagagagaaatacattactattctgcttaacacactataatattgggtccctcttggagcatccaagtttatatgctaatgcaatttataaattatgtttattctaatgcccgtaaaataaatgcctattaaaattaagaaagatatatatgcacctaaaataatctcccatgttactagcattatctagtgagtagtctcttacatgtctgtattcaagaaaaaggaagggaagaagggagcaagcggtcactgtatccaacttatcctctgcttatacatattattttgcaaggcaaacactaatgatatatttcttcctgagtttttggtctaaaacttgaacacactcccagtatgtggtgatgataacagctagttggggaccacatgctatggaaagctaggataagtctctaaaaagtgactaacaaagttcatgccttttttttttttttgagctagaatctcgctctgtcacccaggctagagggcagtggtgcgatctcagctcactgcaagctccgcctcctgggttcacaccattctcctgcctcagcctcccaagtagctgggactacaggtgcccgccaccattcctggcttatttttttgtgtttttagtagagatggggtttcactgtgttagccaggatggtcttgatctcctgacctcatgatctgcccatcttggcctcccaacattctgagattacaggcatgagccacagtgcctggccttttttttttttttttttttgagatgggatctcactctgttgcccaggctggagtgcagtggcacaatcttggctcactgca

SEQ ID NO: 95785 - DNA, 35135 bp, Homo sapiens
  misc_feature (1)...(35135): n = A,T,C or G
nnnnnnnnnnnnnnnnnnnnnnnnnnnnnnnnnnnnnnnnnnnnnnnnnnnnnnnnnnnnnnnnnnnnnnnnnnnnnnnnnnnnnnnnnnnnnnnnnnnnnnnnnnnnnnnnnnnnnnnnnnnnnnnnnnnnnnnnnnnnnnnnnnnnnnnnnnnnnnnnnnnnnnnnnnnnnnnnnnnnnnnnnnnnnnnnnnnnnnnnnnnnnnnnnnnnnnnnnnnnnnnnnnnnnnnnnnnnnnnnnnnnnnnnnnnnnnnnnnnnnnnnnnnnnnnnnnnnnnnnnnnnnnnnnnnnnnnnnnnnnnnnnnnnnnnnnnnnnnnnnnnnnnnnnnnnnnnnnnnnnnnnnnnnnnnnnnnnnnnnnnnnnnnnnnnnnnnnnnnnnnnnnnnnnnnnnnnnnnnnnnnnnnnnnnnnnnnnnnnnnnnnnnnnnnnnnnnnnnnnnnnnnnnnnnnnnnnnnnnnnnnnnnnnnnnnnnnnnnnnnnnnnnnnnnnnnnnnnnnnnnnnnnnnnnnnnnnnnnnnnnnnnnnnnnnnnnnnnnnnnnnnnnnnnnnnnnnnnnnnnnnnnnnnnnnnnnnnnnnnnnnnnnnnnnnnnnnnnnnnnnnnnnnnnnnnnnnnnnnnnnnnnnnnnnnnnnnnnnnnnnnnnnnnnnnnnnnnnnnnnnnnnnnnnnnnnnnnnnnnnnnnnnnnnnnnnnnnnnnnnnnnnnnnnnnnnnnnnnnnnnnnnnnnnnnnnnnnnnnnnnnnnnnnnnnnnnnnnnnnnnnnnnnnnnnnnnnnnnnnnnnnnnnnnnnnnnnnnnnnnnnnnnnnnnnnnnnnnnnnnnnnnnnnnnnnnnnnnnnnnnnnnnnnnnnnnnnnnnnnnnnnnnnnnnnnnnnnnnnnnnnnnnccaggctcggtggttcacacctataatcccagcactttgggaggccgagacgggtggatcacttgaggtcaggagttcaagaccagcctggccaacatggtgaaacctcgtctctactaaaaatacaaaaaattagctgggtgttgtggtgcattcctgtaatgccagctactagggaggctgaggcaggagaattgcttgaatccaggaggcagaggttgcagtgagccgagatcatgccactgcacttcagcctgggcagcaaagtgagactccgtctcaaaaaaaaaaaaaacaacaaaaacatgaagtcatgaagtcaggctgggcacagtggctcatgcctataatcccagcactttgggaggaggaggcgggcaaaccgcttgagcccaggagctcaagaccagcctgggcaacatagcaagaccactgtctccacaaaaaacttaaaaattagctgggtgtggtggtgtgcacctgtagtcccagttacctggaaggctgaggcgagagaatcacttgggcctaggaggtcaaggctgcagtgagccatgatatcaccactgtagtttagcctgagcaacagggcaagaccctgtctctaaaaaaaaaagtgaaataagatcatgttactcctctacctaaaaccctgcagtgacttcccattaagcttagaataaaatccgaacgtcttcttgtggtttaaaagaccctgagtgggccgaggcgggcagatcacctgaggtcaggagtttgagattagcctggccaacatggtgaaaccctgtctctactaaaaatacaaaaattagccggggcatggtggcaggcacctgtaatcccagctacttgggaggctgaggcaggagaaccgcttgaacccgggaggtagaggttacatgagccaaggtcgtgccattgcactccagcctgggcaacaagagagaaaaaaaaacaaaaaccctgagtgatctggcctctggccacttctccaatccccaccttcttcttcttttttttttttttttttgannnnnnnnnnnnnnnnnnnnnnnnnnnnnnnnnnnnnnnnnnnnnnnnnnnnnnnnnnnnnnnnnnnnnnnnnnnnnnnnnnnnnnnnnnnnnnnnnnnnnnnnnnnnnnnnnnnnnnnnnnnnnnnnnnnnnnnnnnnnnnnnnnnnnnnnnnnnnnnnnnnccttcccaaagtgctaggattacaggcgtgagccaccgcgcccagccttcccaacccccacttctgacactcttctcctacctttcacactgtgctctagccactctggcctttttcccattcctccaacactggaagattgttcctgcctcagggcctttgcacttggtggtccttctgttgggaatattcttcccctatgccaatccttcccatgactttctctttttcatccttcacatcttgactcaaatgtcaaatcctcagagtcctcctatgtggtcacatgaccctttctaattttctcacgaaatcgccactctctgaaattatcctcctcaaatggtttatctgttcccctctgtgtctttctctagactgggagctccatgaggacagggactaagtctggcttattcactgctatgtccccagcttctcacacagtgcctgacacccagtacggcctcgacaaacgttgcccaaaagaatacaagtgtctgccggtaacactacaggatgcagagatagaactgtggacgttgtcaaagagcattcacccgtattttttccccatggttccctcctttgtataaaacccctggaatatccagggaggtctagatttgcaggcaaacttcatcaccaacactcaacacttctttcttttcttttttttttttttttgagacggagtctcattctgtcgcccaggctggagtgcagtggcacggtctcagctcactgcaacctccgcctcctgggcttaagcgattctcatgcctcagcttctggagtagctgggattacaggcacccaccagcacgcccagctactttttgtatttttagtacagatggtgtttcactatattgtccaggctggtctcgaactcctggcctcaaatgatccacccacctcggcctccgaaagtgcgtgagccactgcgcccagccaccaacacttcttccaatcatctcaccacaatcctaatgctcattaaattggaaggacggagagaataaagttcatccccagccttctagaacagagttccaaattgctggcctagggccaaatgtaacccacagatatgctttgtctgcctcacactgttttagaagattttgagttcatgaccgactttttaaaattggaacatttaacataaaaatccatatgttcaagttttaccaaaaactcagaggatctggccacaagtggccccaggggactggagctgagaagtggccgcccccttggatgaaacgtgggctcagtttgctccagtccctacccagaggctgaattctttcgtattatcagccaggtccctttaggcactgggatcccccctcaaagcctaagtatcctcagagacactattgagtttccaatatttggccacagccactctcttctaatcatcagctccccatcatcttcagcagcccctaagaaagctctgtagagccaggaaagacagtttgaaaagtgcactttaatccactctcctcatttgacagataggcaaactgaggcctagagaggggaagggacattccatttattaggctgtatcctttctgacaggatgcttatatcaactcatctttggaaagccactggtgctgataatggcagaaaaaggcgaatagggaatcagtgctttcctccaccggctatttgctggttcctgggagctgtgagggcccaccctggtgagctatgccatgctcaggctcagagccagctaatcacttaggcatgtgccagcagaactgaactctggaggggagttgcccagcagaaaacaacctggggacagaggctctccccatgtcccagctcagtctgaagtcctcctccagccctgatgatgttgcaagaggttaacacacctgccattttgcatgaggaaaattatggcactcgtattgtgggcagagacacaattcagtcattccactgggttccaaattgatatgtgcccagtatgtgccagggatgtgaacactgctgggggttcactgccgggttttactgaatatgaacgagggctgtggtttcaggctgtcctgagttccagccctgactctgtaacttcctggctgtgtgaccttcagcaaccaccctagcctctctgtgcctcactttcttcatctgtaaatggggatgataggaataggacataattcctaggattatcttggggattcaatgagatcattttttggcacatactaagaaatgaacacagtagcattttttttcttgtttatttttctccactgcacttatcagaagctgatatttttatttgcatctttgcttaccatctgactgactaaatgactctccatagaaaaaagccttgtctgtcttgatcacccctgcttccctgtctagaacaatgcctggcacagagtgggtactccataaatatttgtctgctgaatgaattgctgtctttcatatttctaccctaaatgccattccgatgatgcaccctgccctggagtagcccaaagtcctgtggactccagcaagagccccccctgacctccatagccagatgttcacagcagcgctgggcaccaactccgaatgtcaccaactgggctcattgccttggcctgacaaatggcacttatgtgacttctggtggacagagctgtagcaggggaaagtgagttagtgcctgaggaaagtggatcgataggctgagttctgaaactcaagggccctgcaccagtagcgagggggcccaagtaaggggacatggagcccgcaccctgaggacattgctttggaagaggatgcctgggtggtgcaattacctcgtggcatactgagatggggattcgtgcatcctgcacgccttgggaaacaaaatgaatttctcggagagagggggctttgcaaaatgtaaagcgctgcaggaagcaacgtacatggaaaggtcaggaaagagagccgatctgtttgctgagtgtgggctgtacttccaaacccagccaaagtcgacgcgcagcccctggaggtggcacagtttgggggccccttggataggagtgccctcggggaggctgggaagccagagaggaatgggccaaagtttcttcgggtgtctgcagaacccaggaccgcccgcgcagcttgcatcttctcttcccgcccccggcctgcacgcgtgaaatctgcaaattccccttttaactgctgcacgcgctcgttcaactttgccctggctagaatcgggataaccgtcccgatgattacataactttccgagttcagggaagataaatccaagggacagaaatgataaaattttctttgagtatggattttttacccctaaagttacagaagtgcacaaaaaatatatatacaaatacccatatacccaccactcacaatgagttaactgttacattttgacttatctgaaagagggttttttctttttagttaccaaataaacctttctcttgtcccaagttccagtatatctgaatccaaaataagtcaaccttcttttctttattattcttttccatcctcaccccagatttatcttaaagggtaagttccaggacccccgaaatccctcggtgagctcccacctgtccaggtctgcaaacatctagactcaatgcacaagatccggcgatggccgcaaccggcggtgtgcacagctgcatttcctcccccagccccaactcccgcgtgcaactttgcaactctcgctcgggcccggcattgggggcgggcctatttactcggcccgtttggcggaaggatcccatgcggggacgcggttgcgctcagccatctgcgnnnnnnnnnnnnnnnnnnnncccgcgccccctatggcccataaagaagtcccggccgggccgctgcactccccgcgcgcatccgtgcgccgcccgaggctgtctaaggagtcggcggccattttgttcttctcgtggttccagtggggagagaaggaggaagtagggagcggggtggcaggggggggacccgccgcggctgctgccaccgccgccaccaccgcctctgctcgtggcgtgggaaaggaggtgtgagtcccgggcgcgagccggcggcggcgccgctgcgggagggtcggcggtgggaaggcgatggcggatttagataaactcaacatcgacagcattatccaacggctgctggaaggtaaggggggcggcgggcggctgaagggggaggcgggcctgagggcggcaggcggccccgggggctcgagggaggggagttgggaggccggttgggcttgcagcaccgtggggagtgagctcctcgagttggcccacgggccggggactgcagccggagggaggccagcccgggattcccaacttgtcgccagctgcggaccctccaggctccgctcattcattgcacgaggatgcaggcttcctcccggccgtggaatttgaaaactccgctccccacccccacgtttcccgcccctacccgtttgcccccgcgcactggacgggtctttggagcgatggttggggatcccagtccagcctcctggacgacgtgtgccgtgctgtgcgagatggacttttcggtgctcgtcctctcggaaggcagtttgatgagggcatgagttccgccgggtttgggggctcttttcctgcttgcttttatttttatttttcgtggttctggggtcttggggggcccatttcttgttacttggtaacaagcgttcatgtctcaagaggtgtgagaacctgtcttcgcctgccctccaaatccttttaagttgttctaatcttggagaggtctccgcgctcttttcctgagcgtgcatctgaagaggaagccaacgaggctgacgctatcattatctttccaatgtgccaggctctgtcttaagcactttgcgtccatgaattattactgtaatcataactgacgcttctaaagcgcttactgtgtgtcaggcattctttgagcacttaagacagatttcatttaattctcccacccattgcaagatatttgcaattttttttgtttttgttattttacagaagaaactgagatgaagtcacttaaccaaggtcacacagttagtgacagttggatttcaaatccacatagccgggagctagaaccctctacagacaacactgtcaccttatgtaggaaggaaggtggccagtggttaagtaaaggttaatagaaagctttaaatttcggctcatctaagacttgtgaggtgcctggcaattgattcatgttgatgtgggagaggggcgaggttcagcttttaaagacggaagctgaaatgagctgctttcagattcaagggcatgtcaacggatgctaacatcttatccaagactttgtaagaattcagtcatatcccctaacttggacacttcataatgggaacttggcagtttcaactgctttttgcctttatacagtcctaaaatattgttggactataaatgctgtgagtggtggagtcgagggcatgaacagttggacagctctggtgttagaatttacagatcttttaaagtaagttattaaaatgaagctcctgaaaatatctcgtccttttcttaatctgtgcattctttccttttatgctgtctttaaaaaaaaaacaacaaaaaaaacactaaatgtcattaaggacccctgaaatgctcttgaaatgttattgcaggtgaaaaccttgtattgtaggtgaaaaccttgtcattcttttaatgccaggtatttatataagaaccatactttttcatactagttaatatagttctttaatttattcgaggcagcagttggtcagaaactgattaaaatagtttgctgtaagaaaggaactttttgttaaatattttctttctaaattttaaaattctgcttatctctgcagggatatgtgtggctttatttctctgaggaaacaggaaaagttggaatttgcatggattagaaacattagaattttaagatcatctaaggcttgctaatttaagttctggtttgcccataactgcctctattcataaacagcttttgttaattttgatctttaaaattgtaataagtactttgcctggtaagtaatgatacatctaaaatgagatcattgtttcttaatagttcctcttgttatgtggcacttgaaaaccaggttttcttatatttcattttttgctgaaattaataaagcagtgcattttaatgccttgggaataggctaactgcaaagtatacttaaatttctttttttctcgtgggtgttaaattggcagagaaacagttgaagatgatccattgaggatatgtagatatctaagttaaatgatgttggtaataaattctgttttacaattttttatttaaaaaaattaaatttaataatttaaaatagaaatgagagtctcactgtgttgcccaggctgttctcaaactcctggtttcaagcagtcctcgcacctcgtcctccccaggtgctggggttatagtcatgagccaccgtgcccggcctaaattttattcttttcataatgcccccaaaaccttttttttccctaaataagatgtaagtatatctgaaagtagagggaatatgacttgtgactttggccagatttttttacgtgtttagaattgatcttttaagcttgcgagcagtataacctagttgagaagtagctgagtaatagtactaaaaagctaactgaaaagtgaagtcttaagaaaaacagcatgttggtttagatcttagtcactaacctttgcagttcttttcttctctgaactctgagtatttctgtaagcgaggcatcacctctgcaacccaccatggatgcttttatccaagctctgccttgctgatgataaaacttaaggttgttaactccttagtataactgatgttagttatttaaataactacacagtaaaacggcattttgagagaaaataagccagctgttgatttggtctgatgtattgaagacaagtgagatttggggcagttttactttgtaaatgacctccttcaaggagccatggtggctagcattttttttgcatagcaggtggttgtaacttacttcacatcttggtttgcaagaagcatctttgctttgaagaaggccattgtcaaagtgcaagaccatgtcaggctctgcagaattgcctgacttgttttagtgatttaaatatgatctctgccctggctcacagaaagtgcttacagatttaatcctctgatacataagggttgttctgaaggtagggagtgttcagatattctgaaactctaagattgtttaaataacccatatgttcatctttttgatgcagtataaaacgttcatattctggtgtttagccatccctggtcctaaagataataaaggacaaacataatggtttaaaaaggggaaggtttcttaatatgctaaccaaaaaaaaaaacaaaagtaatctttcctaatgaacacctgtaattatttatttttttattttattttggagacagagtctcactctgtcacccaggctggagtgcagtggtgggatcctggctcactgcaacctctgcctcccgggttcaagcgattttggtgtctcagccccctgagtagctgggattaacaggcatgcaccaccacgctcggccaagtttttgtatttttagtagagatgaggccaggctggttttgaactcgtgacctcaagtggtctgcccgcctcagactcccaaagtgctgggattacaggcatgagccaccgtgcccagcctgtaattatttgtttacagagcaggtaatttttacactcacatccaagttgtcagtttctaattccctcattgataagaactctgatgtgagcccttgcccttcctttcccatcagtatgttggtcatatgcccacttcctctcctcctaggcaaggtgggaaagctctgttggagacagatgatctgcagcttgcaggagtccttttttaaaccacagcattgaaaaaggattactctccttgtgcccgcagtgccctcttgcctgtcagtagcaggaggcagcagtgaaatctgacagaattgtgtgtgacgttgtgcttgcgggggatgtgacacacaggagcrcyctgcattctgagcctagggtgttcctcctcataactgggcaaatggacatgcagttgtagcccagcagtggtcagctgtagaaattagtgaggtgatttgatgtctttgaaagcacagtcctattacaacctgtaacctgttgtgcagaatcacagtaccagtcagcccacttgactaggtgaggattcctgatggtgaagcagggaaattattgatgttatgtggacttcaccatttaacttaatttacaattgaggccattagttgacctgagagattraaatatgaaggagataatattctgggtgtcagtcgctttgtagataaagaactggaaagtcattcaagaccaagaaggaaggatttcatttccatggagcttatggaattccaggatagagtttgatattttaagatcatacctctgtatccaaagcatcaagaacagatgatgtgtttgtggatcttggtgatttgtctgaaatctccagcttccccacttcactggggtttactgtcatccctcttctagaaggtagtggtcatcaccgacagtaaagcttacagcaaatgaaaactcaaaatgtagtctactcagtggtatattaccgaaatgtgttcttagactgtgaaaattaaagtttttaatggattggctttactcgaggtgtagaaaactcaagatgctttattgagaacagtagacagtgttttgcagccacatcctatctgccttgaaaaaaatggtgtcacttttattttttttactagagactgggtctcactctgtccccaggctggagacctgaactcctgggttcaagcgattcttcctcctcatcctcttggctagccggatctataggcacacaccaccacacctggctaatttttttttctttttctttttttcttaaagacaggggtgttgcctakgctgttctttaactcctggccacaagcagtcctcccacctcagcctcccaaagtgctgggattacaagcgtgaaccacagctccctgccttggtgtcacttctcaatgcctgaagtgtaaccccatctgttaggaaaatcaggatgggagagggcagggtgtggaaacaattgtgataatcagaacatggaagtctttctgctggtgactttgcagagaaacttaaagggttcttttttcttttcttttcttttttttttttttttttttttttgagtctttctttgtcacccaggctggagtgcagtggcaggatctcggcccactgctgcctccaccacccaggttcaagcgatttctcctgcctcagcctcagttgttgagtagctgggactacaggcatgtaccaccatgccctgctaatttttgtatttttggtagagatggggttttaccatgttggccaggctggtctcaaactcctgacctcagctgatccacccaccttggcctcccaaagtgctgggattacaggcgttagacaccgcatccggcccaaaggattcttgataacatttttgtggtttatactttttgcagaaaagaactcagtcgtttatgggaatgcttaatgttggaagtatttactgttttttgttttggtttgagtcttattttcctaaatctgtcaaatatcatgaggctattgatttcactgaaatgaatatgatgtggcatattgttaaaattatcacctactttttaacaggattattttaaaacagcaaaatcttcgttggcttatttttataccacttgtgcctttcttaggttctgaaacttcattagaattcagctagggcttttttagtatatgctatttctttaatatgtttttatttaaacaattaaggggcctttatgtggcaaggaaaatacttttttattccttataaataatctcaaacttgtcttaaatttccttccatagtttccatctttgctttgctttttgccagcagctaactttcaaaagttagtattgcttatgagaaagagctggtgttgtaaataatcaccaatgctattttatttatttatattttttgagacaggatctcactctgtggcccaggctggagtgcagtggcatgatctcggctcaatgcagcatctgtctcccgggctcaagtgatcctcccatcttagcctcccgagtagctgggactacaggcgcacgccaccatgtccagctatattttgtatttttggtagagactcaatttcaccatgttgcccaggctagtctctaactcctgagctcaagtgatcctcccacctcggcctcccaaagtgctgggattataggcccaagccaccacatctggctgctattcttttataattcaaatttttaccagtttgttttcaataaaaatgtgtggaagtttttattattgctcgtgtcagtgatttgccagaaaaatagatcagatacatttctacagagcaaccttcgcttttaacagtaataatacgttttcctgaatctccctttctagccagataaagaaatattaatacttctactgaaaagtcacatccttaggtctaagttggtgttgcttttttgttgttgtttgtttgtttgttttgagacggagtttgtttgtttgtttgtttgttttgagacaaagtcttattcttgttccccaggctggagtgtgatgatgcgatctgggctcactgcaacctgccccgtgggttccagcgattctcctgcctcagcctcccgagtagctgggattacaggtgcctgccaccacgcctggctaatttttgtatttttagtagagacggggtttcaccatgttggccaggctggtctcgaactccttacctcaggtgatccgcccgcttcggactcctaaagtgctgggattactggcatgagccaccgtgcctggccgagacggagtttctttcttgttgcccaggatggagtgcagtggcacaatctcggctcactgcaacytccacctcccaggttcaagtgattctcgtgcctcagcctcctgtgtagctggggttacaggcgtgcaccaccatgcccagcaaatttttgtatttttagtagagatggggtttcaccatgttggccaggctggtctcgaactcctaacctcaggtcatccacccatctcggcctcccaaagtgttgggattacaggcatgagccaccgtgcccaaccttctcctttggttttgaagttcaatgtagaacagattcttaattgggaattaagaatgcaccactagatgtagcatcgcggcctcgtgtccttaagctctgtgaccttggactaagtcactgtaaaatgggagatgacagtgcctgacttcctaggatcgttgacaggattgaatggcaatataaagcccttagtacagtgcctagtggataagtgctcagtaaatgttaactacaacgagtaaataattctgtttgatggacattgaaaatagtgaagtgggccaggcacggtggcgcacgcctataatcccagctacttgggaggctgaggcaggagaatcacttgaacccaggaggtggaggttgcagtgagccacgatcgcatcactgcactccagcctggcaacagagtgagactccatctcaaaaaaagaaagaaaaaaatagtgaagtgaatttgtatgcttttggctgatatggcaactttttttttttttttttttttcttgagatggagtctcactctgtcgcccaggctggagtgcagttgcacgatctcagctcactgcaacctccacctcccgggttcaagcgattcttctgcctcagcctccgcagtaaccagccaccacgcccagcctgatatgacaacttttaagaactctccagtgttcacttggactgccaagccccatttgaaatctctgttagacaattcaacgtgaaatttaagagtaattctagattttcatactttgaaaaatactccagtaaagcctggtaagcaagtggccctattgttttataattttatagtgcagaaacaggctttttgctcatcaaaagtatatagtctgggctgggcacggtggctcacacctgtaatcctggcactttgggcgccgaggcagtggatcacctgaggtcgggagttcgagaccagcctgaccaatatggagaaaccccatctgtactaaaagtataaaattagctggatgtggtggcgcatgcctgtaatcccaggtactcgggaggctgaggcaggataattgcttgaacccgggagacggaggttgcagtgagccgagatcgtgccattgcactccagcctgggcaacaagagtgaaactccgtctctaaataaataaatatatagtctggaatatatgtttaattctaatgccaccagtcaacactacttaaagacttatccagatttcagtcatgcaacaaattttgagcacctgctgtgtgctggctatggctggtgtacactacagagcaggactgctgctgtgggtttacattctaccagtgggtccagatgagccggcagaagcaaactggcaagtataaaacaaatacaagcatggttgagggggtgtggtgggtagtgacctgatgttgagagagcctttcaaaaagcatgcagcaagcttgtgaggggagaggagatggatgagagaagcttttctccagggtgaagtgtggtatctgagcagaggcctgaagtctgagcagttgtatgataactgatggaagatggttttggcagtttctatctttatataacttttttctttctgctaattttagggaatttaagaagctttcagaccatgtttgttgatgtttttcataagcaccattctttaaatacaaatctttattttctctggaaaagctgcatctaatcttaatattaagagtaatttttaaggccaggtgcagtggctcatgcctgtaatcccggcacttggggggccagagcaagaggatcacttgagcctggaaggttgaggctgcagtaagccatgatcatgccactgcactccagcctgggcaccaggcttcttcaaaaaagaagaatttttaaattgttgttagtattgcttttgctttttactgatctctgaatgtccccacccagaggacaaacagaaacagaataaaggagttaaaacaaatataaactatgttcaaaggtgacagtggagagcgtccaaagccaaaaaaaaaaattgttagcaacattgatttcatctgatggcattgactaactgcaatagcattcataaaacaaagcttgccattatatggtatgagctatttatcgcagaaatactctcctagaagacttagagtcagctattcattcataagtgtgggactctgctgaaaaaaattcacgttgaaaccagaagcttctaggatttccttcctagccaaaaataaagcttcctgctgggcagtctgcccaagtttttggttaacttatggtgaaatcactaatgattggcattttctggccaatgaagtggggatcccatctttcaccgggagtatttcctgagttctaactctgtatgtgtgtctagagagaaaaaaaattacttacgaaaaaaacatttttgttgctcagttgctgttttattaaatatgcatctgtttcatatctttcctcgaagactattattactatgcttttattgcttcttgttgtataatatttttatcagaacgagacttagttacatattttggggtccaaaagtgaactttataactgtaaaattaaggtacatttagcagttccgtgctactttatctgtatctaatgactatccagtctgttacaactggaaccaaaacaaaatttctttcccacaactacctacgtgctgacaagtgagttctgttgcaaagtttgtactttgatagaagaaccctaagtgctctggtggtgtggatgccccatgctgtgcaatgatttctttctccctttattatcttatctgttcaaattattagggaacgtgctttcttacagtatagcacatgactgacatcctttgccctatatagacatgagcataaacacaaatgcaggcccagaaaatgcatggcaaaataagtacaatgaaccaacattttcttaatgaaatgaaaacaacactaacattttttcataggtaaattaaatcagagatcctcaggaggagatacccatggtcctctggaaaacactgatgggggagggttctgagtatttccaatcctgtttcttttcttttcttttctttccttttcttttttttttttgagacggagtctcgctgtgttgccaggctggagtgcagtggcgcgatcttggctcactgcaacctccgcctcccgggtgcaggcgattctcctgagtagctgggattacaggtgcacgccatgttggcgaggatggtctggatctcttgacctcatcatgatctgcccgcctcaccctcccaaagtgctgggattacaagcgtgagccattgcatctggcctgcagtcctgtttctaacagcattcgcacagacaggatggctccttttttggaatactataaaagaagtcttacttggtatcgaagatgcaattaagtcttgtctaagattttaagattctaattagacattaaaaccatgtttattrtaagtgtcctgaaaatgaagccactcagaaagctagttaaaccatgtttttgcccctttatctaaatctcgtattgtattttgtattttggcttcattggactaattgcgatttttctcttgcagtgagagggtccaagcctggtaagaatgtccagcttcaggagaatgaaatcagaggactgtgcttaaagtctcgtgaaatctttctcagtcagcctatcctactagaacttgaagcaccactcaaaatatgtggtaagtttggggcacacaggttatcttttgttacatgattgattaactgagtcaaggatatgttgatgaccttgtattagctagcagartgattatcctgtttgcgaatagcttggaactacttaaaagtaagttaaatagtagctttagaataaatacctctaatggacttagtttacttagatgtacttcagatttttaaaaaaaatattttgctgaaggaataaacattgcaaaagaaaaaaatgaaactaagaatggagagctgaggaaaggtctgaactacatggatgtataggaatatgtttaagtttaaagcaacactggttatagctaaaaatagaacttccttgatactgattttgtggttctgttttctgcataatagaagcaaataatctgtgttttaactcaatgtaaaaccaaactttattcgtttgagtaatatattcttatagcatatttgcattgataaaactttgtgttcatgtttttaaaagtaaaatgttctttggcattatctagcagggagaaattgaaagctaaatgcattgatgggtggggggtgggggtggtgtgtatgtgtgtatgtgcttttgttcagatggggccaagactcactagaagtgcagcagttctgctgacacagtacccagagactgagctgtcagagatctgatattgatcagtcagcctgaaagggataccatgttacttggcaagaatgcatgcttggacataataaccctttccacagaataaattcttaatagttgaattttatgtgaggttctggacatacacatatacttaaaatttttgttaagctcarttgaactaaatatgatataagattggaaattacttagtgttggctgcccagttaaactctcattactagaggtcaatgccattgtacaatgaatatttaaagaatgtctttccaaagctttgttagtggattgagctttaagtatgggaacactgtgtaacaaaattcttgcttccaggtgacatccatggacaatactatgatttgctgcgactttttgagtacggtggtttcccaccagaaagcaactacctgtttcttggggactatgtggacaggggaaagcagtcattggagacgatctgcctcttactggcctacaaaataaaatatcctgagaatttttttcttctcagagggaaccatgaatgtgccagcatcaacagaatttatggattttatgatgaatgtaagtacttttctatatctaaggaagagttattgaaattaagatatttatcataaacaattatcacatacttctgttaggaattgtgagagtttagatgcagtggtatcatctctcatgttttctatttcatcaacttgtttttagcttagcttttttaggggggtgggggaacggagtctcactctgttgcccaggctggagtgcagtagcaccatcttacctcattgcaacctctgcctcccaggctcaagcaatcctcctgcctcagcctcccaggtagctaggactgcagacatgcatcaccacgcttggctaatttgtgtatttttttgaagagatggggtttcaccttgttgcccaagctgatctgaaactcctggctcaaggaatctgcccgcctaggccactcaaagtactgggattactggcgtgagccatgatgcccagccagttttttctctcttgggtagaaaaataacactgccgctgtaataaaataaggtcttggattcttttatgatgtgatgatcagattaggaagtaatgatcatggtaatggttgctttaagatttaaattgttgtattcacagataacttaattcttagtagaaatctgagaaccattccaaatagtttttttaagcaactttattatgtaatttcattccataaaattattctgttaaaagtgtacaattcagcgatttgtagtaaatttatagagttatgcgaccatcaccatagtccccaggcaaccactaatctactttttgtcttttctagagaatattgcatgcaaatggaatcttgcaatacgtaaataattagtttttgaaattattatagtttttctccttctggcatatccacacccaggaagaatggcaataactttcctaaaactaaaatgtgctgaacaaagattatttttacagtattttacacattttgtgacccattttggattgtttaattaaaggtatacttcgatttgactattgacaaaacacagttcttaaagctttgaaaataggctgggcacagtggctcacgcctgtaatcccagcactttgggaggccacagcgggtggatcacaaggtcaagagatcaagaccgtcctggccaacatgaggaaacctcatctctactaaaaatacaaaaattagccaggcgtggtggcagatgcctgtagtcccagctactcaggaggctcaggcaggagaatcacttgaacccaggagtcggaggttgcagtgagccaaaatcacaccacagtagtccagcctgggtggcagagtgagactccgtctcaaaaaaaaaaaaaaaaaaaagctttgaaaatatcagttcagtaaagggtttcaagtcagaaaaggttttgaatctttaccttcaccttccttttgtgctcatcattgctgccaggacgggtttcaggtttggagtgaagaggtggttaaggaacttcaggtacttggcatttgctaatatgattatagggatatcagcaaagggttgtccctgtggccctcccctagaccacatcgtaacctagagtctccagatgcagtgtttttccatctcaattcacatagatatgttgagctagcacatttgttagaagtgcatcctagaaagattatattcacaaactgagcccttctactaccaccctttcccacaactggatgtttgcttggtctgtgaccttgagatccagctgataagatggggtggcaggaatcatcagggacaaaaattctatgggttctggactgactgatagcattgaacttgtacatgaaaggtattcaatattaacagtgattctgtgtcagagaagtaccagtaagccagttactactccttaggtagtgaaatgcaaggcaggtgtgatgggttttttttgtttgtttttgagacagagccttaggctggagtgcagaggtgggatcatagcttactaccacctgtaatttctgggtttaagcaatcctttcacctcagcctccctaagtgctgggattacagtcatgagccaccacacccagccaacactgtgttttggatacttattccaagtgttactcttgagttttttgttttttgtttttttttttttttttgagacggagtctcgctctgtcgcccaggctggagtgcagggcgcgatctcgcctcactgcaagctccgcctcctgggttcacgccattctcctgcctcagcctcccgagtagctgggactacaggcgcccgccactacgcccggctaattttttgtatttttagtagaggcggggtttcactgtgttagccaggatggtctcgatctcctgacctcatgatccgcccgcctctgcttcccaaagtgctgggattacaggcgtgagccaccgtgccyggcctgctcttgagttaaaggattccttttacatagctgttagcccagcaaatacttttcatgtttgcactgatgaattcaaatccagttgacctcatttttgtgacgtgtatcctaatgtaatgatactggctgcatcagtttcggtttctacttaatgcagaggcctttaaaaaatgacttagaagatcagtgttggttggtatcagtttcgactcctgtttggtcatcaacacaatttgtagatcttatgctcaagcttcctctctctcatcaggcagatataatttgccatccagtctacttgtgggcatgaaagtgcccttgacataggtggcttttggttgaaggcttgcagacatttaatatatatataaaatacttaactaattttattaaaatgaaaagttgtattcaaatgttgattttcatgggacaatttaaaaaccactgcctgttttccaggtacataagtactttatactaccatttcttttttttttttttttaactttgtaaatgtgatggaaaggctgaggtatatgttgttgggtaaaacatgagtgtttgttgatctgtttctgctgccgtagctgtctgatgtacagtaatgcgaaaccgcattacaggttatggctcagaatcttaggatttggaagctaggcgattaccctggctaaacctttcaggagccagatgttcctagtggtctgaggtagccttagggaggaaatgaagagagaatagaaagaggcaggcccacgcttaaagtgctgagagggaaaaggaggaaacaaactgatttttgatggagaagccagcaggaatcagcaggagaagctggagtatgtggcataactaaagaatcaaagccggggcgtggtagctcacgcctgtaatcccagcactttgggaggccaaggtgggtggatcacttgaggtcaggagttcaacctgatcacaagaggtcaggaggtctgaccaacatggggaaaacccatctctattaaaaatacaaaaattagctgtggtggtgcacacctgtagtcgcggacactcaggagattgaggcaggaaaatcactggaacctgggagaccatggttgcagtgagccaagattgcgtcgcttcattccmcctaggtgatgcagtgagaccccacctcaaaaaaagtatccagaagtgaagctgaccttggggaaagaggaagtcactgtcactggggagctaagacagcagctctgtttttataatacaggttaagtattccttaccgggaatgcttggcactagaagtgttgcaggttttttgtttttgtttttaattttggaatatttgtgttataattactggttaaacatccctaatccaaaaatctgaaatccagaatgctccagtgagcatttcctttgagcatcatgtgagtgctcaaaaagttccaaattttggagcatcttggattaaggatactcatcctgtggtggtagtagtagtagtattgctgttggaaatgggagttggtggtttttggagattgcccttcagcctttcgtaagraggagtttgcttttttttgagacggagtttcactcttgttgcccatgctggagtgcaatggtgcgatcttggcttactgcaacctctgcctcccaggttcaagcaattttccttcctcagcctggcgggagragtttgttaaactttccgaaccccctagtgaaggacctctaaagaaatatgcaacagggtgaaccatagtcagtgttagacccagtcattgagaaaccagaaattattaggagaaaagataacactcctctgcagagagaaggcaaacatttgttgaatttacatttcatttcaagccctgtggtaaactccctaagctgcttgatttgcattacagggtgggaggtgtggttcaggtcagttgcttgggctggctctaactctcaaaggagaggtataggtttaaacctttagatgtccctgtattccccaggaaaagagactaaggacaaactcttggtttgttttgtttgttttgttttgttttttgagacggagtttcgctcttgttgcccaagccggagtgcaatggcacaatcaaggctcaccgcaacctccgcctcccaggttcaagtgactcttctgccttagcctcccaagtagctgggattacaggcatgcgccaccacgcccagctaatttttrtatttttagtagagacgggatttcttcatgttggtcaggctggtctcaaactcccaacctcagatggtctgcccgcctcggcctcccaaagtgctgggattacaggtgtgagccaccgcgcctggccaaactcctggtttttaaagattgtgcttagtatagtaagtacaggaaacaaaggcatctggacaattggacaatcctcaaccaatccagagaaatttgttcttgcaaggtatgtgactaggttttaaactcagaacatcagtttcctgtagaaacagtgcatagaggcatatttctgtcagaactgcactctgactccagaatgtgtggatgcctgtgctgttgagggaacatgaccatcctgtgacatcaggcctgtgggagcatgtggagtctgtgcagtgttggaaacaaatgccctgtagtgcctgtgagaggcagccactgccgtgtgatcattgtgcctcctgctagagtactgagggctggggatcctctggtrtcagtaggttattgaggggcatatatgggggatgggtgctaactctcaggtttcctcagaaggaaggtcataacgccacatgtgtaagttcgtaattgaattcagaagtaggggactagctgcggtgagattggacagagcagacaatttcaaacagaattgatgctcccagataattcctgggatttgatggcagtccttaatcattatcaaatctggaattctggtttcatgcttctgtggaatttaaaaagatttcatgtgaaaatgtaagtcattgcttttagatcagatatgtgtctctcctaaaccccttccctctaggagagtctttctttaaagagatggggtctcactatgttgcccaagatggtcttgaactcctgggctcaagccatcctcctacctcagcctcccgaagtgctgggattacaggtctgacccaccacgcccagctcttattttaaaagagccttaaaataagatggttttattaagattcttaataaaaacatagtttcatttgcttaaaaggcacccagaatcttgctttgggggaagttaatcctgagagaatgagcctacggaacagtaatactctctttttaatgtaatactctctttttaatcacaggtaaaagaagatacaacattaaactatggaaaactttcacagactgttttaactgtttaccgatagcagccatcgtggatgagaagatattctgctgtcatggaggtaggtgggctgatttttgttccaaataggttttgatcccttccaaagggtgaacactttaacatttgtgagttatcattgggatgactttctctgacagaacactctcctttgttgatgtgttgcattgcactttcactctgatacagccaggatcatttggataaaaatcttaaggaattgatttattacagggaattctagactctgtaagctaggtttgaaaatagagcagaaaatttttatttttattttattttttgtaaggatgagttctcaccacgttgcccagtctggtcacaaattcctgggctcaagcagtcctcctgcctcggacttccaaagtgctgggttacaggtgtaagccactgtgcccggcttagaaaagtttttggttttttttgtttttgtttttgttttttgagacagagtctcgctctctcacccaggctggagcgcagtggcaccatctcggctcactgcaagctctgcctcccaggttcacgccattctcctgcctcagcctcctgagtagctgggactgcagccacccgccaccacgcttggctaattttttgtatttttagtagagacggggcttcaccgtgttagccaggatggtctcaatctcctgacctcgtgatctgcccgcctcggcctcccaaagtgctgggattacagacttgagccaccacgcccggcagaagagtgtttttaactataaaatgaacaatgtgtaatttgttgtgccagagatcctctagaacactcaagatgtgagtagattttcccttgattgttttttatcctctcagaactttctctgacttggattttaaaagttattttggccaggcatagtggctcgcatctgtaattccagcactttggagaggccaagccaggaggattgcttgatgccatgaatatgagaacagcctataacatatcgagacccctgtcattagaaaaagttgtaaaagttagccaggtgtaatggtgcacacctgtagccgtagctatttgggaggctgaggcgggaggatcgcttgaacccaggggtttaaggctgcagtgagctatgatcgcaccactgcactccagcctaggcaacagagcaagaccctatctctgaaaatatatacatatatatgttataagctgttttgctttgctcagtggttgtgctttctataatgtaattaaaatagtaattgcaaagagaatttcttttcctgtatggtctgaaattaatcagccatcaaaaagcctgcataatgtcttttatctctgtgcttctgtacttaggttttggtagagttggatacatggtttttaactcttacaatatgcatcccatattgtaactcgatacaataagctcttgtagattttagccatcaaaaagcctgcataatgtcttttatctctgtgcttctgtacttaggttttggtagagttggatacatggtttttaactcttacaatatgcatcccatattgtaactcgatacaataagctcttgtagattttaatggtctgtgaacagtgcaggtttcctagagaactacctcacactgagcatccttatcttctcagctcagtcattataagccatcaatcataacatcgctcattattgtcatcaactgggggaagcccatagaagagttttttaaatcactggattttattttacagtgttctgtataatataattgtttccatgtactgtttaaacctactgcaccccatgcattactgcatgtaattctagtgtgtatccagttgtcctttttctgtgtttttttcttttaaccaaaagtaaataaaatataatcatagatttcagtttttatgtcaggattattgaatttctctgtagacaaatggaacttttgaaggggtagtatccttttaaaagttctgctttcttcattttttttttttcctcattgaataggtttatcaccagatcttcaatctatggagcagattcggcgaattatgcgaccaactgatgtaccagatcaaggtcttctttgtgatcttttgtggtctgaccccgataaagatgtcttaggctggggtgaaaatgacagaggagtgtccttcacatttggtgcagaagtggttgcaaaatttctccataagcatgatttggatcttatatgtagagcccatcaggtattgattttgaattttacatgtacacttaagagcatgtgtgtgagcacagattctccttgttgattttggtgggtaggtattgcttatttatacaaagtgtttctggaacacaagatatcaggctcaatgggaaactgaaacatggttttactcacctaatatttgcacctatttatattgaaaaaattttctcttcaaggtggttgaagatggatatgaattttttgcaaagaggcagttggtcactctgttttctgcgcccaattattgyggagagtttgacaatgcaggtgccatgatgagtgtggatgaaacactaatgtgttcttttcaggtagagcatgctttcaacatgatttccttttaatatgtttacactttgctgattgaaaaatataattgctactttttgcctagtgttcacttatgctgagtaggctaagtttttattttcccttaaccagtgtgtattatagttgaataatgtgtggatcccttgtaaaagaaaaaattaattatggcaccttttcccagtgttgaattataaatttttgcattgcatattggctccttaatgcttatggctcttttactgtaaatctaaaaccttaatgacaatgtaatgttcagctaaaattaaatcaccacttgaatgtgaaaagtactgagtgccttgtgctatgtgtttacttagttctgccctctagtctaacttccacaaaacttctgttaatgtaccatgacatcatttggccttcagttggcacaaaagcattatttagaatctgcctcagcctttttctcatttgcttattatgatacttgtacaacttcaagccagcctagtcataaacataaatacagccaccaaatcatgtggcactcatcagttaaatgaattaaaatagttttttaccaattatcagagagaacttgcagctttcaaaattccaaagattgtgcaaggatcccctacaggttggagaaacacttttgtaaagaactttttcccctgtatcagaaggagtagctaaagatactaccaggtgtagacttcagaagattgtcattatactcagaggcaaaataatttgtccagataatagattttatctgttcgtcatagcgttaattaccaaatgtttacattcaacatagcttgtgttaatatgctaggggggcttttacagttgttggggcagttgtgaacaccatctgaacagaagatctgaatgaaatttaaggactcttaagatttggggttgagtatatttcctaaattaactgtcttttgaatctccagattttaaagcctgcagagaaaaagaagccaaatgccacgagacctgtaacgcctccaaggggtatgatcacaaagcaagcaaagaaatagatgtcgttttgacactgcctagtcgggacttgtaacatagagtatataaccttcatttttaagactgtaatgtgtactggtcagcttgctcagatagatctgtgtttgtgggggcccttccttccatttttgatttagtgaatggcatttgctggttataacagcaaatgaaagactcttcactccaaaaagaaaagtgttttgttttttaattctctgttccttttgcaaacaattttaatgatggtgttaaagctgtacaccccaggacagtttatcctgtctgaggagtaagtgtacaattgatcttttttaattcagtacaacccataatcatgtaaatgctcattttctttaggacataaagagagccctagggtgctctgaatctgtacatgttcttgtcataaaatgcatactgttgatacaaaccactgtgaacattttttatttgagaattttgtttcaaagggattgctttttcctctcattgtcttgttatgtacaaactagtttttatagctatcaacattaggagtaactttcaaccttgccagcatcactggtatgatgtatatttaattaaagcacacttttccccgaccgtatacttaaaatgacaaagccattcttttaaatatttgtgactctttcctaaagccaaagtttctgttgaattatgttttgacacacccctaagtacaaggtggtatggttgtrtacacatgctgccttcttggggattcaaaaacaggtttttgattttgaatagcaattagtgatatagtgctgtttaagctactaacgataaaaggtaataacattttatacaatttccatatagtctattcattaagtaatctttttacagttgcatcaggcctgaacccgtccattcagaaagcttcaaattatagaaacaatactgttctatacgagtgaccgattatgctttctttggcctacattctttattctgcggtgaagttgaggcttataagttaaaacaaaggaactaacttactgtccmccagtttatayagaactcacagtacctatgacttttttaaactaagatctgttaaaaaagaaatctgtttcaacagatgaccgtgtacaataccgtgtggtgaaaatgaattcagacttattaaatgatgaacttgttaaatcttctcagtgtctatttatcagcacaatacacacaggagaactgttgatggcatattgaatagattttcctgaataaattgctctggaaaccacacggttgcattttggttttgcttctttcaaatagtctgttttccaaagatggattataatacagatactaatactctttgagttgtaacctggagacatctatttgtgtaatagagtgatgaggtggaacgatcctcctctaccatttggggagatggggattaatctgtgtccatagttttcttactgtctgggttcacttgaacttagtggcgaatttgaaagcagctcactttgttttctgagtcagccacctatattttcatgcacagttctttgatctcttcccccttccctggtttatatggaacacagtatcatgtcatattttgtcacaagtatgtatcttaatttctcaaaggtacgctaaaaatgagtgaagagcatgtcatttgaaaagctttttttcctgttacaaagtggtctccctgagggcgttggcagaggacctagcgaggaactctttgaaggacacagaagagcacagggccatggactcccctctgctaacaagccccggtcctgaggcatctggaccctgccatgctcccatcaaagagggaagggggacctcattacctgcctgctccacattgacaatatccaaacttgtgctgtttcacttttacgtaatattctcccagacttctttgactataggaagaaaacagtgaatgataattgtgtcaaaggcaaattctgcacatctttatgtcctgaatgttaatgaattgatactaggatttcaaaatgctataaagtaaaattgggctgctctactaggattatatcattattggagtgtggtatcaggctcaagtttttcttaaggaacatttatcaagtactaaggattatatcattattggagtgtggtatctggctcaaatttttcttaaggaacattggtcaagtagaagacaagattaatctttggttttaggacctgagatcattaggagagactcagtttgaaatctgtttgacagcagaacttgagatgtgtgtgataacccaagtcttggcccctcctacctgatttgagtgagtgacctgaatgctgagccactgtgttcctagctatgaaacgtccatagcagaagccgtctcacattgtgaatcttgagtgaagttgtgtggtgtctttagaatgctcaactcggtggtatttgctaaatgtttgcttttggttatcttatcgatcccagttctttcgtgtctttgcacatctcggttggctgagtttgaagtgtcacttgcctttgctttgctttgcacctgataccaagccatggatagctaagtatgtctgagcatttactgcataagggaacaccatcatggatgttttcagcatatgcaaaagaagtaactaggaaagaggaagttgtaattattagtgtgatactattctattaagtgttttggtttggttttgtttttgtcaagtattctgggtcacaagatgacagcaccattacaaaaccatacagaaaggcaggtgctaggcatccttagtcgctcaatcatctatgtaataccctcccatagaaattgctgatttggtacacaaactaggcctgcccatgtctagttgcagtggacagcacagatgctcacatataacccttgttcttgaagtaccttgatttaaggccagagttctcgagtaacatacacataaatgggatatggaacacagggactaggaaaaaattactgaatgctgagccatgaagaaggcacatgatttaaactgatggaaaggaatatcaatcaaatttctcaatgtgggtccatgatgagcgtttgaaagggaattcagtttgctgggaagtgaagatacaagctaccaagttaaggcatcatgataccaaaaaacacaaaggaaccattgcagggaagtgctgcatgaaaaatcttaggtttattttggcagtttgcagacaccatgtgaattgagacacggagacaagggccatgtaatccaagtatcacctgaaattagtagaagggacaaagctgaggatctgcatcagaacaaagaaggaatgtcttcctcatgtttgggtctatagaagacattaaagaaaacttccagaaagtgggtttgaggccgggcatggtggctcacacctgtaatcccagcactttgggaggctgaggcaggcggattacaaggtcaggagatcgagaccatcctggctaacacggtgaaaccctgtctctactaaaaaaaatagaaaaaattagccgggcatggtgatgggcgcatgtagtcccagttactcaggagcctgaggcaggagaatggcgtgaacctgggaggtggagcttgcagtgagccgagatcacgccactgcactccagcctgggcgacagagcgagactcttaaacaaacaaagtgggtttgaagtgctatgtctccattttcctatcttgaggaaaagacccaaaactcaacctcatgtaccagctggcttgaatctgcaggggtggttttgatgagtaagaactttcagtcctgcaaatcagatgtatgcatcagcccagactggaagaacatggcaccctctgccccaggctttggtttccttctcacccacagaagaggaataactagaatacttaacgatgggattgtgaggattagcccaccaaaaatctacaacttgccttagtcataagcattcaggaaacagccctggtataagaccaatgaatagccctaagatttagaccaatggcaacacacaggaactttgattaggaaaacttgggccaggcacaggcagaagtcacttttcattcatccttgccaacgtgtgagcttcagaagagtggaaatgatggactatcaacaccttcagcctacgactcaaatagaattgagtacttgcattagtgcatccctgaattagtgggtggttcatagttgtgtgatcacagagatgactgccatcccatctgatcagctgtagctccaacggacttgttgtcatccagatgtattacaagtattccaataatttcaaacacaggtaagtatttcagttgtgagaattatgtcagttatttgaaagataaatatgttagaggattaaagcacttcagttaatcatgtaaacagttttgtaatcaaaaagttaaaactaggctgggtgcagtggctcatgcctgtaattccagcgtgattgggaggccgaggtgagtggatcacttgaggtcacgagtatgagaccagcctggccaacatggtgaaatcctgtctccattgaaaatacaaaaatcagccaggtgtggtggcacatgcctgtaatcccagctactcgggaggctgaggcaggagaatcgcttgaacctgggaagcagaggttgcagtgagccaagactctgccactgcactccagactgggcaacagagcgagactctatctcaaaaaaaaaaaaaagttaaaactaagaaagtttgcagtaatagggaaatagaattttacctacataagttcaagaactttatactcttgaactaacaaaagtttgtaagaattttaaaatataaggcatgcaaaatatcaggaatgaatcagtacggcaagtcttttaagtgcatctcagaaagcatcctgaggcactgcccaaagcttgagattgaggggttgtgtaaaggcactggcatcaaccagattttttaagtctaggaattgagaaggaagacataagtctttaccttgctattgggatggaacaaccaatttggtggtaggaccagccaaaaagcaacttgcctttccaccaacctcaaagtgagcatctatttagtattacaaacatgcagataccgcaggagcaataaagcgacaggtggtgctaagaaggtagcatactggccgggcacggtggctcacgcctgtaatcccagcactttgggaggccaaggcaggcagatcacctgaggtcaggagttcaagaccagactgggcaacatggagaaatcccatctctaataaaaatacaaaattagcctggcatggtggtgacacatgcctgtaatcccagctactcaggaggctgaggcaggagaatcgcttgaacccaggaggcagaggttgcagtgagctgagatcgcaccattgcactacagcctgggcaacgagcaaaactccgtctcaaaaaagaaaaaaagtagcataccagcccagcatcaaacttgggagaattctgatgattgtaataattaaatggtatcaattaaatttttttccagtatgggcaacatggtgacaccccgtctctattaaaaatataataatacaaaaaattagccaggcatggtggtgcacatttgtggtcccagctacttgggaggctaaggtgggaggatcgcttgagcctgggaggcggaggttgcaatgacctgagatcgcgccactgcactccagcctgggcgacagagtgagaccctgtctcaaaaaataatttttgatagaatttcaaattcattcttgtgttccaaacaatcagtttcctaatagcgatatttagctatgaccaccaaatactgattttaatactcattcagccaaaatgcatatttggtgcactcttgaaacaattctaaaatgtcacttaaaagtgcgtattccttttttttttctagccacccaattagcacagtatcaaacaccatgtctcccagagaggaccatcccacacaccagttgttcagggctggtgaacaagagaacagtaaactggtcgttatattcttggacagactggcttgacctttccctggcaagttaggtaggtgtggcagagggagcgggtgggataaagggtgtttttgctgaggttggcagaagatttttaccatctgatggggctttgctcattcaccagctccacaagcccctcaaggagtcctgttccatacctgctgttagtttaccataatgaaatcacttcccaattttttttttttttttttttttttttttttgagacagagtcttgctctgtcgcccaggctggagtgcagtagtaccatctcggctcattgcaagctccacctcccgggctcaagtgattctcctgcctcagcctcccaagtagctgggattacaggtgcgtgccacacacccagctaatttttatatttttagcagagacggggttttactacgttggccaggctggtctcaaactcctgacctcaagtgattcgcctgcctcagcctcccaaagtgctgggattacaggccttcccaagttttgattactgacctacaaacaccacatatcttctctagtgcttgcccttcagattgagaggtggaatggacagatcgtagactcacatggtcctccgctcaggaggctgtccagcataagtgaaggacccagattcagcgtggatcacagggttagctggattttactcactagcttggcttagattggtttcagatctgccccatgttcctctcactgttctagggccattgggtattacttaggagggtggactgaggagaggagagcaagcaggcaatcttaagatttgctgcagtgcaaattactcattgggtgcacattttggttgccatgaatgctgtgtttttatacttttatttttagaagccataatcttgctgaggtcaatataatcttgctagaatgaaagtttttttgttttcgtttgtttttgagttgtagtcttgctctggcacccaggctggagtgcagtggcacaatcttggctcactgcaacctccacctcccaagttcaaacgattctcccacctcagcctccagagtagctggaactacaggtgcccgccaccacgccgagctaatttttgtacttttagtagagacaggatttcaccatgttggccaggctggtctcaaacccctggacctcaggtgatgcgcctgcattggcctcccaaagtgtgagccactgcgcctggcacaagaatgaaagttttgagaa

SEQ ID NO: 95786 - DNA, 30494 bp, Homo sapiens
  misc_feature (1)...(30494): n = A,T,C or G
gccaacatggtgaacctgtctctactgaaaatacaagttagccggacgtggtggcgggcacctgtaattccagctactcaggaggctgaggcaggagaatcacttgaacccggaagacggaggctgcagtgagcccagacagtgccactgcactccagcctgggcgacagagtgagactccgtctcaaaaataatagaaataatgataataataataatgtgaagtggatgtactggagggagaacttagggttggggaatgcggggaaatttagggatttactgcagccctgggagcagcgaagctgggggacggggtcgtgggtttgaaacccagcttcccacacctttggaagactccgaaggaaacggggaccgcctaagggaggaggaactggggaccccacaggccacggctcctcccgcacgaaccccacacccgaggcgggattccccctaagaccctcctgaggcccccgcacgatctggggagacgcggggctgcgggcgcggagctgccctgagagggctccggggccgggacaggacacccggggtcccggcggctggtccagctccacccggcgaccgaggggaccaagggtcgagctgcgcctgggggactcgggtcccagacccccacagtcgccgcggggaggcccaggtccagccactgccggttccgaccagctcctcctcaggtctccggacgcccggctccgcacgctcaccatttccggcttccgggtgtcctgggtccttcctggggctggagcagccagaacaggtcccacacgacaaaatcagccgtatccggggcaccaggggctccccgaggaactaaaacccggacccgaatggggggccggcgggaaatgagaccgcttcgggctttggaagttgcccctcctcccggcgcacctgattggacagtttgccgcacagcgcctctgactggctggtgccccaggtcccgcccctggggcttgagcgacaggagaggtgatcggaatcctcaaataatccgctcgctgtgtggggtgtgactgacaggtgctacccacagcccctcgctgggaccttggacctggacttgcatggaagcagaacttgctcccgttagggtcaacccaaccagactgttcccctccttcccccatcagtcttacaatacagtcctttgtgaccgccacacaactccccccgggctagaagtagacctcctccccactgacccttccagtaactgtttgttcaaaagacttcagctgaaccggcagacagttccaggatgcggtcacaacacctgcccaccttgcataacaaagctggcaaaaacatctccaggatgcggtcaggacacctgcacccccgactcagttctcacaccccagcccagttcctcgccctataaagccctgctgtagtctgtaagcggggctgcctcctctaactgtgggggagcagcccagcaggttaataaaacttacttgactgacttcaggtctcttcgtcctttcggctgaccttacagctcctggttttccggagcaggccctgtcggcttcctgtactcagtgggtccttcctgctgcttttttttttttttttgagacggagtttcgctcttgttgcccaggctggaatgcaatggcacgatctcagctaactgcaacctccgctttccggtttcaagcgattctcctgcctcagcctcccgggtagctgcgattacaggcgcccaccaccactcccggctaatttttgtatttttagtagaaatggggtttcaccatgttggccaggctggtctcgaactcctgatctcgtgatccgccggcctcggcctctcaaagtgctgggattacaggcgtgagccaccgcgcccagccgcctcctgcttctttttccggaacaccggtcacatgagtgtgcacgggattccagactccgtgttcagtgaagccatccctccaccttggagctggagagactcccaggtcacaatggaacaggtaggaggccctgatgtcctccagagatcaggaatttaagatgaggctattggtcccatggccaaggcttcctacacgttacttcttctcaggctactccttttcagccaagaaaataaaaacatgccttaaagggaacaaaattattaaatgcagggaaaaactggagtaaaccactttttttttcttttttttgagacggagtctggctctgtcgcccaggctggagtgcagtggcacgatctcagctcattgcaacctctgcctcccaggttcaagagattctcttgcctcagcctcccgagtccgagtagctggaactacaggcatgtgccaccatgcccggccaattttttttttttttttttttttttgtatttttagtagagacggggtttcaccgtgttagccaggatggtctcgatctcctgaactcgtgatctgcccgccttggcctcccaaagtgctgggattacaggcatgagccaccgtgcccggcctggagtaaacattctataaaggtattgctaccagaaaggggtccagtcccagactccaagagcagaagcttggaccttgtatgggaaagaattaatattggagaaaaaactgaaaaagtaagtatatcgaactgtatcatgggacagaaacatgtcattcctatttttactgaagattatcttatttgatactatgtgattattaagtcctattacatttcctttctccttttacgaagtcatgtatcttaataatatgcagccgggcacggtggctcagcctgtaatcccagcactctgggaggcccaggcaggcggatcatgaggtcaggagtaggagaccagcctgcccaacatggtgaaacaccgtctctactaaaattacaaaaattagccaggtgtggtggcgcatgcctgtaatcctagctactaagaaggctgaggcaggagaactgcttgaacccaggaggaggaggttgcagtgagccgagatcacagcattgcgcctgggcgacagagcatgactccatctcaaaaaaaaaaaaaaaaaaaaaaaaaaaaaaaaaaaaaaaaaaaccagagccgggcccggtggctcacgcctgtaatcccagcactttgggagtccgaggcgggtggattacgaggtcaggagttcaagactcagcctggccaagaaggtgaaaccccgtctctactaaaaatacaaaaaattagctgggtgcagtggcaggcgcctgtaatcccagctactcgggaggctgaggcaggagaatcgcttgaactccgagggcagaggttgcagtgagctgagatcacgccactgcactccagcctccagcctgacaacagagtgagactccgtctcaaaaaaaaaaaaaaaaaaaaaccagaatatgcagtgggtggccgcagcgggtcacacctgtagcactttgggaagtcgaggcaggcagatctcttgaggccaggacaggagttccagaccagcctggccaacatggtgaaaccctgtctctcctaaaaatacaaaaattagcaggcatggtggttcatgcctgtaattccagctactaaggaggctgaggcaggagaatcatttgaacccaagaggcagaggttgcagtgagcctagattgcaacactgcactccagcttgggcaagagtgagactccgtcccaagaaaacaaaacaagactaggactgggcaccgtggctcacacctgtaatcctagcactttgggagactgaggcggccagatcattagaggccatgagtttgagaccagactggccaacatggcgaaacccgtctctactaaaaacacaaaacattagactgggagcgctggctcacacctgtaatcctagcactttgggagaccaaagtgggcggatcacaaggtcaggagttcgagaccaacctggccaacatagtgaaaccccatctctactgaaaatacaaaaaattagccaggcatggtggcacgcgcctgtagtcccagctacccgggaggctgaggcaggagaaccgctggaacccaggaggcgtaggttgcagtgagctgagatcgcaccaccgcactccagcctgggcaacagagtgagactccgtctaaaaaaaaaagtacaaaaattagccggagcggtggcatgcgcctgtaatcccagttacttgggaggctgaaatgggagaatcgattgaactcggaaagtggagtttgcagtgagcggacatcgcgccactgcactccagcctgggcgacagagtgagacttcatctcgaaaaattaaaaaaagaatatgcaacaatataagctacaaaatttaaatatccaataaattttaagtttaaataaatttgctgtatcagaggacaaaaagaaacataaaatagttactgtttgtcacacatactgtttaatcctactaattggtactgttaagtagtcctattgtggttttgttcaaatagcatttatgcaacagtacagttaataatatagaactatataatttcttttttttttttttttcagacagagtctcgctctgtcgcccaggctggagtgcagtggcgcgatctcggctcactgcaagctccgcctcccaggttcaggccattctcctgcctcagcctcccgagtagctgggactacaggcgcctgcaaccacgcccggctaattttttgtatttttagtagagacggggtttcactgtgttagccaggacggtctcgatctcctgaactcgtgatccgcccgcctcggcctcccaaagtgctggaattacaggggtgagccaccgcgcccggcctagaagtatataatttcaagtaaacaccagtttttcattttttatgttaaagtggtaatttctttttttttttttttttttttttggagacagagtctcgctctgtcgcccaggctggagggcagtggcacaatctccgctcactgcaagctctgcctctccagttcgcgccattctgcctcaggctccggagtagctgggactacaggcgcccgccaccacgcccggagaattttttttttttttttgtatttttagtggagacggggtttcaccgcgttagccaggatggtctcgatctcctgacctcggcctcccaaagtgctgggattacaggcgtgagccaccgcgcccggcctaaagtggtttttgtaattcatttttcttttttttttttttgagacagtcttgctctgttggccaggctgaagtgcagtggagcaatcttggctcactgcaacctccgtctcccgggctcaagcaattctcctgcctcatcctcccgagtagctgggattacaggcatgtgccaccacgcccggctaatttttgtatttttagtagagacgtggtttcaccatgttgggtcttgaactcctgatctcaggtgatccacccgcctcgcctcccaaagtgttgggattacaggcgtgagccaccgcgcccggctagtatttgtaattcttatctatcacattaaggctcttgtccggtgtggttgtgttccggggcggtccccgaccccgcccctcacaagccccgccccccgcaccgggccccgcctcctgaactccgaagctcccgaccccgcctccgcagggtccaggcttcgcccctggtgacaggtggtgctggtgtagtcaaggaggagggctcgctttttttggttcaggttgtcatggtggcgcccaagcccgccttgccggccttgtcttttccggtctcagtccggcgtggcagcggaggcaggcaccgttaggtcttccagtccctctctgtcatggcgacgcccagcctcttcttccggccacagcctgtcatggcggcacccgaagtagtccctgccggggccagcctgttctgttgccctggctcttcctagtccaggctgccatggcggcgctcagggcttaccggaagtaaaacttcggaagtgaggcgttcctctgcccggaagtgagcgcggcgctaggaaagatggcggcagcggcggcggtgggcaacgcggtgccctgcggggcccggccttgcggggtccggcctgacgggcagcccaagcccgggccgcagccgcgcgcgctccttgccgccgggccggcgctcatagcgaacggtgacgagctggtggctgccgtgtggccgtaccggcggttggcgctgttgcggcgcctcacggtgctgccattcgccgggctgctttacccggcctggttgggtgccgcagccgctggctgctggggctggggcagcagttgggtgcagatccccgaagctgcgctgctcgtgcttgccaccatctgcctcgcgcacgcgctcactgtcctctcggggcattggtctgtgcacgcgcattgcgcgctcacctgcaccccggtaagtgtgtacacgcgagcccgacccccagcacggtcgagcctcgccgtgggtcccagctgcggccttcctgtcggtcaccatcgcgacctgggccactcatctgcctggcctggattcccaggggcaccctctacactttggcgcaggcttaatyatgaccccactgctgacttgctgtgcatgcctggtgcgggttatttcctttttctgaagtcctccctgttatggtcatttagattcagtgatgtaatacttgtaaaaggcttagcgcagggcccagcatacgtcgcccaggtcaggtaggagttgtttatactagttcccatattagcgactactcttgttctggaaacggccctaccttccatctcatctgtctcctaccttggttttcaaagtgtaaggcgagatcactgggataggtttcccccatctatgaagcttagttggttcttagactgaaccaagtcttgctgtccagtgcttagtggtcttccatactgtgatggaaaggagcatgaaatgcagttaattacagtgttgaagagaggcagaggtgtttatgagcgagtcatttacatgatgtctttccgcaaaatgagggtggtgatactgagttctgtcggggatacaacagcaagcaaggtcgcgctcctgacccacagtttagagttctgagtgaccaagtgtcgtcggaggagttggtgactgtgagcttccctgggcctgaagcagtgactgtgtcgtctctctctgggcctgcctcaggtgacaccagcaggtttggagccatggacactgaggtatatcaggaagcttcccctctgattccaggagtgtgtttgcctcaagaagaggaaaagggaacagcatcaagggctacagaaagacagaagccccccaccctggctggctctgaatgtgggtagaatcctcattctcctctcctgagagacaacctgttctgtccttcaaaaagacttatctatcccaggggaggagctcaacgtggtagctttgaggtagtacaatgaaagacaccaatgagggacaaaataaaggaggggttaaggggactgtggcaccgctcaaacttcagctgccttttgacctgcagctaagcagcttagctcttaacttcctctccagggatggagaagtgggaggagctgaacagccatcagccaggagaggtggatctgggtttgattcagatctcagaaasggccgcttctgctctctgagtttcagtttcccccttctgtaaactgagaaccgtaactaacaactactgggtgccatcttgagaagcggagatgatatctgcagagtgcccgccctggggccatcacagngtatagcctcttgtacctttcttccgtgacgtcacgtttgtagttatgtgattgttgttatttgctgcctgctttggaggcccatgaaccacccgtgcggtggcgctttgtttctgcgggtcatcattgtgctccccccatctccatgcagctcgtctccatgcagctcggtctagcagagcagcagaggaatggatggcggttcacggggtccagggagcactgaacgagttccattcaacatttctgtgtcttaggtgctggggaaacagcagtgaacaaaacaggcaaatccccctgcctttgtggtgttactgggagggagaactcatagtcagcagttgatgctaaacagagatgacatctaacatcaggacaggatgggacattgccgggaactttagatggggcagccagggaggggctcctgagaaggtgatgtttcagcaaaagcctgaggcagcaagggagctgtgtgactgtgtattccgggcagagaaaacagcacatgccaaggccctttgctgaggcacgatcgagccccatgtgcgtgtggagctgtggagtgtagtgagcagggttggtggaagaggcagagctgagcaggaggccgggggcctgtgatggggcgggggcttggctcacgtgaattgaggacgtactgggtgggtgcctggcagcgttcttcctatttgagttcatgtcaccttcagcagagcagagccctgggcattaggtgctgtctgtgcacccagcttcccagctttttttgttgttgtttttgtttttgttttgttttttggggtttttttgtttgtttgtttgtttktttttgagatggagtctggctctgttgcccaggctggagtgcagtggcacaatctcggctcactgcaacctccgcctcccaggttcaagtgattgttctgcctcagcctcccgagtagctgagactacaggtgcctgccactatgcccagctaatttttatatttttagtagagacggggtttcaccatattggccaggctggtctcaaactcctgacctcgtgatcccccctgcctcagcctcccaaagtgctgggattacaggtgtgagccactgcacccagcctttttattttgagacagagtcctgctctgtcgcccaggctggagtgcagtggtgcaatctcggctcactgcaagctctgcctcctgggtgcacgccattctcctgcctcagcctcccaagtagctgggactacagatgcctgccaccacgcccagctaattttttgtgtttttagtagagatggggtttcaccgtgttagccaggatggtctcaatctcctgacgtcgtgatctgcccacctcggcctcccaaagtgctgggattacaggtgcgagccactgtgcctggctggttttttgtttttttttttttaattgagataggatctcactctgccacccaggctggagtgcagtgttgcaatctcagttcactgcaacctccgcctcccagttcaagggattctcctgcctcagcctcctaagtagctggtattacaggtgtgcaccaccgtgtccggctcatttgtgtatttttagttgagacagggtttcgccacattggcgaggctgatctcaaactcctgatctcaagtgatccgcccaccttggcctcccaaagtgctgggattatgggtgtgagtcaccgtgcccagccttgtgctcccagctttaagtgtggcaccagaggcacagcaagatggtctcgtttgtcctgatgacagacgagggagtgacagaggcagcaccagagcccagtggcatttcagaatatacccatagagctgctgcacccaaaacctcccgggggggtcttggaactgtaggttgagaagagctaagccacaatgctttctttgtctctgtcaggagtaygaccccagcaaagcgacctttgtgaaggtggtgccaacccccaacaatggctccacggagctcktggccctgcaccgcaatgaggtagggactgcctgctgggctcctggaggaggggcttgagtaggattcccaggcgctgacaccccaaggtcaggggcctctgtggcaaacacaccttctaccgcagggcgaagacgggcttgaggtgctgtccttcgaattccagaagatcaagtattcctacgatgccctggagaagaagcagtttctccccgtggcctttcctgtgggaaacgccttctcatactatcagagcaacagaggcttccaggaagactcagagatccgagcagctgagaagaaatttgggagcaacaagtgagtccttgatttgcctgtagcacctttgcctttctgtcctgctcccctcctgattcagggtgcctaggaagcgggacagaggcatctgcccttttatttatttatttactattattttatttttattttattttttatttttgagactgagtctcgctctgtcacccaggctggagtgcagtgacgcgatctcagctcaccccaacctccgcctccccggttcaagtgattctcctgcctcaacctgccaagcagctgggaatacaggctccccccaccacgcctggctaatttttgtatttttagtagagatgggggtttcaccatgttggccaggctggtcttgaactcctgacctcaggtgatcctcccatgttggcctcccaaagtgctgggattacaggcgtgagccactgcacccggccaaatctgcccttttagccaaatgtcccaggtgactgtgatgccgcttgagcaacatgctctaagtccagtctcccctgaacttgcctgctggcaggaaccccagagggtctgcagctggaagcccgtgccctggggtgtgagaccttgagtgtaaggttcttcacaggagtctagcctgtggcccctcctcagcaacagctttattttaaattcttttaaaatgtttatttgtgtagagatggggtctcgccgtgttgcccaggcttgtctcaaactcctggcctcaagcartcctcctaaatcaacatcccaaagtgctgggattacaggcatgagtcactgcacccaacctaaacatttcagtcctcactgtttcgagtctacgcatctcagcgcttcagaatggtgatggaagaccgtgaccatgtctgcccttttgtactgagtacaatggccaatgtgcggtgcacaccctctcccttcatcttcaccaaaactgcaaatgctgacacgtggctgggagccggagaactgggctccaaaccccatcatggccttgttacgatggtcctcaacccagaaacccacagaacacctagggagctctttcctgacttaatcactgttcagagattacaaatatgttgactacaactatcaatctaatacaaggatttataagaaacatttagcaacttcccctaccccaaggttggccagtcacattaatggcctgtggcaactacgttccctttcatgctgttcttactcaacgcaaaggtacccagcaagatacaagggaagggcttattgtttgatagcagtggggttgctctttggtttcctcttctcacatcccatacataagacgtccatgcagttaaagggcagagcgagaatgaccctcgttgacatgactggtgccctgatcagattggactatggcacagagtactgcagaacacacccttaggcccaagtccttgcattctcgagccttttttttttttttttttttggagacagggtcttactctgttacccaggctggagtgcagtggtgtgatcatggctcactgtagccttgaactcctgggctcaagcattcatcctgcctcagcctcccaaatagctgggaccacaggcacacaccaccacccccagctaatttttaaattttttgtaaatagaaggtcttgctgtgttgcccaggctagtctctgactcctgggctcaagcactcctcctgcctcggcctcccaaagtgcttgggattacaggcgtgaaccaccctactcgacccattctggggctttaattcaggaatcatagaaaatctcagctttggtggggctgggtctcagtgtcttctgctgtctgtagcttcagggcctccatctttcaatcagaggttccttctctacttgctgtgtcactcgaccagatgacgggctctcgtctgacaccagccccaggctgccaggaagagcatattgcagattcaggagcttcatctgttttatgcagagccgagggctgtgggcgggcagcatgtctaccccaggctcagccaggatgagggagagccactgccaaatggatcctcctatctggaagctcgccagggctcccgacgcccacatatggctcttggtttcttgagagcggcctgccatgctcaggttggaggggtcagggtggagactccataccccagaggccttgccctgggaacaggatggggcctggtctcttgcagggccgagatggtggtgcctgacttctcggagcttttcaaggagagagccacagcccccttctttgtatttcaggtaaagcagcagctctggcccatctccccatttcctcccttggggctttcctaaccggatcaagcctgcccaccacttctaaacctggaagcctctccccaccctcacatatcagatccggtgggtggaaggggctcatgggaacagggcgggtagggcaaggacagacaggctggtatcccacaggtgttctgtgtggggctctggtgcctggatgagtactggtactacagcgtctttacgctatccatgctggtggcgttcgaggcctcgctggtgcagcagcagatgcggaacatgtcggagatccggaagatgggcaacaagccccacatgatccaggtgtggctgccagggagacccaggttgggggtgcagcacaggtgcggcttctgtgctgacacccatgccccgcccaggtctaccgaagccgcaagtggaggcccattgccagtgatgagatcgtaccaggggacatcgtctccatcggtgaggccgggttccgctcagtcccagtgggagccccagcctcagggcctctggccaaccctcctgcctctgccctgcaggccgctccccacaggagaacctggtgccatgtgacgtgcttctgctgcgaggccgctgcatcgtagacgaggccatgctcacgggggagtcygtgccacagatgaaggtacttggtggaggatggggatcctcaagctkttcaggaggaaacaggccaggaggtggaggcccagggggtggcrgggatccccctcaggcacaggcggaggaggcagtgtgggcacagatgagctctgtggactggggagccgggtggtgggggcraggaaggaggtgagagagccaagggcatccagggtacattggtgccctgggatgtcagaccaaggtgggctgggagcagtccagaggggtgagtcccagacgaggccaagtgcaggccccagagagcaggcactgtgagtgcartggggagaagacaggacggggtgagggtgaggatctgggagctgggtgggatgtattggtcgggtggggatccccctggctcattccagcctcaaggtccagctgtccaggaactcagatggagaaggaagcaaggtaggcctggccatccagattcacgatcttcctccccaggagcccatcgaagacctcagcccagaccgggtgctggacctccaggctgattcccggctgcacgtcatcttcgggggcaccaaggtggtgcagcacatccccccacagaaagccaccacgggcctgaagcgtaggtgcctcatgggcgtctgggggtatctgggcttccacccccwttgcccgtctgcttgatcatgagggagtcaggacgaggaganaggcatgacggtgactctgcttctctccccagcggttgacagcgggtgygtggcctacgtcctgcggaccggattcaacacatcccaggtgcggggccaggtctggggagggcgggccccagggcagttggacagccaaggtatcagccctttccgaccccagaacatctgccccacgggctgactctggcagcacggccctggacctgggccagggtgcagaggccaccccaagaccaggcccacgcttccaggcctgagctgctggagggagtccagacagcagaaaggctgttcctccattcctccagggcaagctgctgcgcaccatcctcttcggggtcaagagggtgactgcgaacaacctggagaccttcatcttcatcctcttcctcctggtgtttgccatcgctgcagctgcctatgtatggattgaaggtaagcgccacggcctctgtggtcccctgcgcccaccctccgaggctccaggttggcaggccctgtctccacaggtaccaaggaccccagccggaaccgctacaagctgtttctggagtgcaccctgatcctcacctcggtcgtgcctcctgagctgcccatcgagctgtccctggccgtcaacacctccctcatcgccctggccaagctctgtgagtgtgtcaaatgggatggggtgccgagtgggctggggccaagcaggacccctgacctcactcccgcccctagacatgtactgcacagagcccttccggatcccctttgctggcaaggtcgaggtgtgctgctttgacaagacggggacgttgaccagtgacagcctggtggtgcgyggtgtggccgggctgaggtaagcatcaggggccctgcagcaaaggtcacccagatggggtttctgggaagtcgagagacaggtggcccatccaccccaagcccttgcagtgagggcccgtcagaggccctgcctcgggttcatttccaggggctccccacaaagtcctgggtgtcagccatggtagcggcacgggggctcagctcaggcctggaacatcccacaccagccatgcaccacatgacccccaggcacaatgcctggcttctgggggcatctgtgaagcaggtgcaggtctcataaagacccagttggcgcccaagccaccccagtgacaagcacggaatgaatggccttgggggtccttctgctggtggngatgcagcttcgccctacccgcctgcactctgtaaccagctgttcccygaccttgcagagacgggaaggaggtgaccccagtgtccagcatccctgtagaaacacaccgggccctggcctcgtgccactcrctcatgcagctggacgacggcaccctcgtgggtgaccctctagagaaggccatgctgacggccgtggactggacgctgaccaaaggtgaggggctggggcctcaggcccagcaagggggagccactggctctcacagccctaggcaggtgggctgcacccctcagagsatcttggggacaggcaggcctacagctctgatgctccccgaggtgggtggccagaggctcactttagacccaggataggccacgtccttgggtgtccctctgggttggaatctgccctgccctggccgaagccacagtgccagggtcctccaagcccaggtcttccagctctggaccaacacctgctctagcccagagccccgatcaggccctgggggaggcaggagggaggtgggggaggccggggtgagaggtaggggcttggctgcctctttggagcaaagcccctcaggactcgtacttatttgtttccagatgagaaagtattcccccgaagtattaaaactcaggggctgaaaattcaccagcgctttcattttgccagtgccctgaagcgaatgtccgtgcttgcctcgtatgagaagctgggctccaccgacctctgctacatcgcggccgtgaagggggcccccgaaactctgcactccatggtgagctggccccagcctggggcaaggggtgggggcgcggggcagcccgtgacatccccctgcattccctgcagttctcccagtgcccgcccgactaccaccacatccacaccgagatctcccgggaaggagcccgcgtcctggcgctggggtacaaggagctgggacacctcactcaccagcaggtacgggcccaggctccccctgccttcaccatgtgcctggcccgtcagctcctccctgagtcacctcctgtgtcccacagtgccasgttgaatggttgtgattttgtcctccttgccccgcctccagcttctacctttggagactccaaatggcactcagtctgtccactgctgtggggacccacccagtcctggctcacgcagagcacacgcagggcttacctgccccagtcctggtgtgtccctagctctactcttttgccctggtcttgggcagggctaggtggcatcctcagccctctcacccatccatcctccacaaagcccaccctccgcctccaccaccggcacatctgccgcttggcttcttcctgggctctcgttctttctgcttgcaccctacagctgcggatccttccagaatttagcctcaggttgcagtactgtgtgcagagcccaggccacagctcacagcctgcatgctctgccccgttcctgcacctggagcccccttcccagtgacacaggtcctcatcgccttcatagtggccacttctgaggcctttccaccctctctggattccattctcacctcctctctcatggcactcagcactccgatttctgtgactttcttgatcatgcgtctcccctggtgcagtgtgagctccctaaggccaggggtctgtgcccagtctgtggtatgtggtggagccccagtgagtaagagttcctggctaaactccaacattattgggagagtccctacttcattgacttggaagctgagccacaagggactctgtgatgtgcccatgtccgcaagcaggacatagagccacattcgggggacccagaccccccagtcactgccagatcccacccctcaagcgtgcctggtaccctcctggcatttctcccctcccaaccctcgcatgtgcccactacgggaacaggrccttccattgtccccttggctcccagcgcatggtcagagctcaggaaatgcagagtgtgggcagagggagggacagatggtgagggtgcccctgtctgtccgcaggccmgggaggtcaagcgggaggccctggagtgcagcctcaagttcgtcggcttcattgtggtctcctgcccgctcaaggctgactccaaggccgtgatccgggagatccagaatgcgtcccaccgggtatgggacggtgctcggctccaccctctgcatgggaaatagaggcgaggagatgacaattacagcttcgtggtaggggtgggcacccaagtctcacaggctgcatgttttagctgagcaagatcatagctcaggtgcwaacattgccactggcccaaggacactctgggacccgcctgtgctggctcctctctcctccacagaccactcccttcactccccgcatcatgggaagatgggggcacttctctccacttccccgttccaccgccgtcctggagagaaggaagctgaggctggggagttgggtggggggcactgtctgcctgtcctggtggcttctggtggcttgtgttttctattttgggacttagggtgtcttttagggtgtaaggggtgagtgagccgtctcagaggatgatggctctgggtcacatgggtgatgtgattagtccccaccaagcccagaggtcatggtcccatcctcctctttgctgaaatattacccccatgggcagctaccaagccaaaagggtccacctcaggggcaggttgttcatttgtattgcaaatccaagctaagggtgtcttcagaaggacgcacatacacgtgtcatttgtgtaaaatgacctggrtgggggtgggttgtggcccttggaagcccattcagcatctcggttagaggcccaggatctcccactgtggcctaccttagaaggagacttgrcagccttgtctctggcctagagcttggccccagggtgccatgctgagcctctgcccctctttacccaaggtggtcatgatcacgggagacaacccgctcactgcatgccacgtggcccaggagctgcacttcattgaaaaggcccacacgctgatcctgcagcctccctccgagaaaggtgasgccctagcctggcccacagtggggaagggggaccctgagtccaagaacagctcccatcgcaacagcccacctgtgtaccaggcctcagcagcacagtgtcttcaaatgcctggcaccactaatcacagccctggcccactgggcacctcggacagcatgtgagcgttcactgggtcgcaggtcccaggatgtgcggcatgtaggtgtttatttaccataatgaggcgatagtctgactgccagctcgggtttcctgtgcactcatgggcagatactgctcctaccacgcttactccccatcctcagtgtcatcctcatttcacaccctctttggcccggcaagctgcccatgtaccgagtgctcccttcccgagcacagggactgctggcatcctcagccacagttgatggcagtttgcccagtgctcagcctgaccagaccccaggcggagcgctccgtgcgtgttactgcgttggtccctccaccccatcctgcaccacacggggtggcttgccttccccacaccacagaggaggaagctggctgggtcagctctcggggccctgctttgtagagaagggacagaggctcagaagtgaacccacttgcccaggtcacttccmatccatggctaaggattggaatccagacagcctgattccagagctcaaggctccaacctctccccagtgacctctttgagcaatgccctggattcagattgatgaagaggcagacatagagacccagcccctcccagctagaggtgtggggcttaccagatacctgccccagagctagaggtgaagcccctgtgggcgcacgcagttcaggacctgcatgagtgttgacagggccctaagaagaaccacatggagcagtgttgccacagggctgctggcagcaaacattcacaggtctgggccagagcagcttccggaacctccaggccacctctcagaggactcggtccctgccctccctctgttctattggtcgcaggcctycccctgtcccagccccagctaccggggtcttccagggcctggggattgtgggcaggtggcatggagcggatgagcagaactgttgattgacaagcgaagctggtctagcaacagctgcagcacaagccaggtggaagtgtgctgcccttcagcttgagatggtccagggtgagcaggcagtgccaggagggctggcgggccgcccttggccatcctcagcgcccagcatccaagccagggccagccagcaagaaaggggaagtggagcaagaagatgttgagaactcaggggccctgtcagagttgggagggggcccagccccgagaaaacaggatttcagagaggccacgggcgcagggataaatgaggtgagggcctggtgtggggtttcccaaggagagcgcaatagcccccttctgtgtgtttcaggttagggggccttgcatgaggtgggggcatggcttagctggggtcagactgcccaggttctaatctggctgtgtcccgggctctcaggcaagtagctcaggccccaggctcttggttccaccctgtgcacctgagggacattctttgtggagtccccagagaagggctgggggtcacctgggtgggtagggaggtgcgggctccagagaggagagactggctggtgctggggtccgagtggagggagggtgcttctgagcccggtcagccaagcccccagccctaaccctaggtgctgcccgcaggccggcagtgcgagtggcgctccattgayggcagcatcgtgctgcccctggcccggggctccccaaaggcactggccctggagtacgcactgtgcctcacaggcgacggcttggcccacctgcaggccaccgacccccagcagctgctccgcctcatcccccatgtgcaggtgttcgcccgtgtggctcccaagcagaaggtatgtgcacagccctaggggtcaggggcacagcggtaggcacgcagcccctgctcagcctgtctccgcccatacaggagtttgtcatcaccagcctgaaggagctgggctacgtgaccctcatgtgtggggatggcaccaacgacgtgggcgccctgaagcatgctgacgtgggtgagtgctgtgggctagggtatttcgtttgtggacgaggtgttgaggacatgtcactgagctagaaagacagacctggcccttggtgacagccacgggggcactaattcctgtgaggatgggagggggtggcaaggtcaggggctttgagggcaggaagggatgcgaatatcccaggaacagagcagggcggaggccagaggccaggagagaggcaacaagttgggagagtgactcagaaaacccagagctgaagccatgaagatggttcatagccccagatctctgtcaaaagcacacagatggctgagcactgtggctcctgcctggaatcccagtgctttgggaggctgaggcgggaggatcacttgagtctgggagttcaaggcagtggtgtgatccactctaacctaagtgacagtgcaagaccctgtcttttttttttttgacggagccttgctctgtcacccaggctggagtacaatggcacgatctgggctcactgcaacctccatctcccgggttcaagcgattctcctgcctcagcctcccaaatagctgggattacaggcacgtgccaccatgcctggctaatttttgtatttttagtagagatggggtttcaccatgttggccaggatggtctccaattcctgacctcaagtgatccacccgccttggcctcccaaagtgctaggattacaggtgtgaaccactgcatcccrccgaaccctgccttttttttttttttttttttttgagacagtttctctcttgttgcccaggctggagtgcaatagcacggtctcagctcactgcaacctctacttcccgggttcaagcaattctccttcttcagcctcccaagtagctaggattacaggcgccagccaccatgcccatctaatttttgtatttttagtagagatggggtttcaccatgttggccaggctggtctccaactcctgacttcagatgatgcgcctgtgttggcctcccaaagtgctgggattacaggtgtgagccacctcacctggcctttttttcttttttytttttttttttttgcaagaacwcaggtgttaaattgaattttaaagatcaatcttacgttggtttttttgcttttccaatatttatctgcttttatctactaaagcatttattgagtgttgtttgcctcctagaatcatgctccttggctatttcttttgaaatcagtttaggttgttttgttttgttttattttgagactgtctcgctctgtcgcccaggctggagtgcggtggtgtgatctcatctcactgcaacctccgcctcccgggttcaagcgattctcctgcctcagcctcccgagtagctggaattacaggcacatgccaccacccctggctaatttttgtatttttagtagagacggggtttcgccgtatcagccaggctggtctcaaactcctgacctcaggtgatccgcccacctcagccttccaaagtgctgagataacaggtgtgagccactgcgctcggccaaaatcagtttagttttgacctatctcgtgttgtgtgttttttcattgcatttgttgtgggggtttattgttggtggtttgttttcttaaagtagtttgtagaaagcaacacgggcactctctgaggtctccttagggtgtcaggtgaaatggggaagtctgggaactgtcctcacgggagccagctgggggacttcaggaccagtggctctgaagccagcaatcttcccctccgtggagcctgctcctccgggtctgacaccctcctgccccccaggtgtggcgctcttggccaatgcccctgagcgggttgtcgagcggcgacggcggccccgggacagcccaaccctgagcaacagtggcatcagagccacctccaggacagccaagcagcggtcggggctccctccctccgaggagcagccaacctcccagagggtgagtcccaagaggggaggtgctgcaccccatcctggccagggctgacagcctgmtgtctaccctgcaggaccgcctgagccaggtgctgcgagacctcgaggacgagagtacgmccattgtgaaactgggggatgccagcatcgcagcacccttcacctccaagctctcatccatccagtgcagtgagttgcctgcccccgctccccctcccttcrttccccccttggcacccctacccacacccacacctgcctccccaccaccctgcagtctgccacgtgatcaagcagggccgctgcacgctggtgaccacgctacagatgttcaagatcctggcgctcaatgccctcatcctggcctacagccagagcgtcctctacctggagggagtcaagttcagtgacttccaggccaccctacaggggctgctgctggccggctgcttcctcttcatctcccgttccaaggtgggccccagaggtgctggaaggccagggatgcatgggcctgccagggccaggctgatataggcacgggaattgtcatccccaagttacaggacccagggccccagagatgggggctgtagctgggatggctcaggaaatgctggcagggcaggtgtggactgaggctcccagacccctccaggtggtacagcttggcgtccacacctgtccacagrtaggggtcccaggggtgggccccacagagccccacaarcaaggaacaatcatcaagagggtaaaaaaacaactaagtgggtcataggctacacaggacaggctggtggacagctggggaggcctgtgcgacaccgacactcaggccaaggcgtaaagaaccaggggggccagcggccaggaactggacacaaaggccccaaacaggcatgggctgacgcagggagtccccggtggctggagggggtgggagattggctgggcgggactgtgcctgtcccgtgggctccagggagggcaggatctgcttcatgattctcaggcccctgtggctgccatggggagcctggatggcggagccggggccagggaggcagccctgggctcaggggtgagaggcaggcagggatccagggactggtgctgacccatggaatcccccaggatttggtggtggctstacacaaggtctcccgggaggcaggggatgttactgcctgctgtgtgggcagggtggccccaagtgagccagatcctgactcccccacccgccttgctgctgcagcccctcaagaccctctcccgagaacggcccctgcccaacatcttcaacctgtacaccatcctcaccgtcatgctccagttctttgtgcacttcctgagccttgtctacctgtaccgtgaggcccaggcccggagccccgagaagtaagtgctgccttggaggaggtgatgtccctgcagctgagaatagcaggaggatgactccacagacttcagcaggagaggctgggggtygtccagggtgtccagggaggggcactaggccaggcagagccctagctctgtgccagggcagcaggaagccacacagtgtgtgtgagccggagcaggagagggggccctgactcccatgtgtccttgcaggcaggagcagttcgtggacttgtacaaggagtttgagccaagcctggtcaacagcaccgtctacatcatggccatggccatgcagatggccaccttcgccatcaattacaaagtaaggcctgggccctgcccraacattcactgtctgcccacccagccccaccccatgaagccatctgtccctcatccccacagggcccgcccttcatggagagcctgcccgagaacaagcccctggtgtggagtctggcagtttcactcctggccatcattggcctgctcctcggctcctcgcccgacttcaacagccagtttggcctcgtggacatccctgtggaggtcagtggccctgtggaggtgaccctggggctcagcttgatgggtccctcctatggcartgaccctgagctgggctgcaggtctccagctcaccatccctccctgccccgacagttcaagctggtcattgcccaggtcctgctcctggacttctgcctggcgctcctggccgaccgcgtcctgcagtwcttcctggggaccccgaagctgaaagtgccttcctgagatggcagtgctggtacccactgcccaccctggctgccgctgggcgggaaccccaacagggccccgggagggaaccctgcccccaaccccccacagcaaggctgtacagtctcgcccttggaagactgagctgggacccccacagccatccgctggcttggccagcagaaccagccccargccagcacctttggtaaataaagcagcatctgagattttaaaaagccctgcctccacctcgtctgtgccacacggtgtttgctgggggctcggggacagagggtcactgaggaaggtcccagcaccctccccacaggcgtgtgatgttggtgaaaccctctggcactttcagcacttgaacatggacttgtccctgcccagagaattcagtgcatattttctagtttaacaagcacccccatatttctgaggtctctttcacattttaacaactcaggtgctgagagaagccttaggatgtgtgatatttttttctttcccataatacataacagcatgcctttctctcgggtggtgtctgagacttgaggaatatgatctgcatcattacaagtattgactctgtccggtggctcaagcctgtaatcccagcactttgggaggccaaggcgggcccatcacaaggtcaggagatcgagaccatcctggctaacacagtgaaaccccatctctactaaaaatacaaaaaattagccaggcatggtggcgagtgcctgtagtcccagttactcgggaggctgaggcaggagaatggcgtgaacccaggaggtggagcttgcagtgagccgagataacgccactgcactccagcctgggcaacagagcgagactccaactcaaaagaaaaacaaacaagtactgactctgtcatgctctttgggggcctgcgctgctctaccatctcatgtcacagtcagggagctctggctgagcatcagccaggatgtgacctggaaacctggcttggctcttaggttgatagtgttattcctttcaatggactcactcatcacaactcaagaactgcagagtaggcagcacggagccagtcagagaatccttgcctccttaacagccaaagcctttggacacaaagttataaacatactttaaagtctatttccagccccaaaattccactgtgctgggggtgggagcatttttataacaggcggcttgtggcaaccccagagctggtgcttttggacaaacctccactccctacctaaaagggctgctccctggtgtgctgtaattggggccttgagcctgatccagctttgagggtcacggaaggggcgtcccccaggccaggggttctccagcccgagtattagaattttggttggaatcggacagaatatcaggcctccaccagggggcgccatggctccagcgaggcccaggtggtttcagggctccgagagacaacctgggcaaggggatcaccagggtcgcgggttgtgggagctcctgggagaggccccccgggacaggtggactctgcaaccattcagggaggagggggctggggctccgtgggatttggggtagcacaaagatctgagagggaacctatggcccagatgaagtcttaggatgcccaggtcaggggcactgcagcctcgagtggtcgctcagggggccctggcccgacccagtttcaagcggctcaggtagagaagggcactatcaaggcttccgggctacgggggcgtggtctgatgygggggcgtggcctccgctgggcagggcgacgcggaaccgaggcggcggcggcggctgcggcggcaggaaatcggggctcggccccgccggcgcgcgaccccatccccatcccggtccctgcagagcgatccccgggcccagatatggacgcagcagagccgggtagggggtcggggatccgggaggggcctcccccgaccatcccctgcttcctacattgagggcacacacttgtcccgctccgtcctgagagccaggagaggagttcctgaatgggaaggacccagggatcctccattgtggggagccctgtgcccggatgggttcaggaccccagcccttcactccccctcccccttttgatccctcaccccagacgcctgggggagggggcccaggaaggggaagtgactgcttctgcttctgatttttgtgatgggggcagggtgccacgactgctgagggagagggcaacgcggtaggatccccacagggcccctctgtagccctggggagtcggcagtgctggtctaggccccttaggagagggggcaggggggcagcagtagaaatgtggcggggtccgacttggtgtttccrgccgtctttgtgtctgtgttgtgtatgtggagtgtcattcggtctttatgtccctcacggcttcagtctctccatgtgtgtttctgccccaggctctgcctggctgtcccttgtgtatttccatctgtctagcccgtggttccattgtcagaccggctttcttctcgggacagcctggttgcatctggggcatctgttttgttggtttgcttctgggtgcaggcagacccagggagtgggtgtctctgttccccgagcagctgtctctggtctctggtggtgtgtgagtccatctgcctgcctcgagttggccccaaccaagccccccccagccctctctttctctctctcactcttccctttctcttccaccccctccaaatgagactggttgaggtgccgtgggtggagggaggcagtggttagcccatgtattacactcccctcccctaggactccccccaggtcctgagggcaggaagaggtacagtgacatcttccggagcctggacaacctcgaaatctcactggggaacgtgtgagtctgagcctggatcacccccaaatcctgccaagatgccccaagcccctaaccatttaggtgccttgcagtcccatttggaacctgtaacatctggacctacatacctaataaccagagaagtctaggatgggaccctccaaaatgcctcggtatcctaaaagtgtccccctaaatagactggaaatccccaaagtggtcctagaacccctacatatccttgtaaccccttaaaatatttgcgatccctataatcccactctatgaacctcaaagttatctggggcccttcagatgctttttcaagtcctatttaaaaaaaactcacctgattcccccaaaacaccattcttcagacctcccagacacaagagatgccacagaggtgatgtttgccacaaacaaccctaaggtccccagcaccccttggcaggacagactgggtgtaaggtggcatcctgacacacctttatcccccaggacccttgagatgctggctggagaccctctactctcagaagacccagaacctgacaagacccctacagccaytgttgtgagtggggagtaggggaacagggaggaagacctcaagcagagggggccttaggaaggccaggcccctgccctgtttgcttctgaatactgtctccctcccgcacagaccaacgaagccagctgttggagcggcccctccccagagggtcctgtacccctcacaggtaggggggtctggaggccaggacagtggggacagacaggagtctttccttcaacaaatcaccactgatcccctgttccatgcaaggcatcgtttaggttttgggaatatggcagtacacacaacagatctcagtcccagccctcagggagaccccaggcagggtggaggctgaggtaggaggatcacttgaagccaggaattcgtgaccatgctgggcaacagtaagacaccatccctaccaaaagaaaaaatatttttttaattagctgggtgtggtggtgtgtgcctgtagtcccagctactttggaagctgaggctggaggactgattaagcccaggactttgaggctgcagtgagatacgattgtgccactgcactccagcctggatgacagagcaagaccatgtccaaaaaaatcaaacacaaggccggacgcagtggctcacgcctgtaatcccagcactttggaggctgaggcgggtggaccacgaggtcaggagatcgagaccatcctggctaacatggtgaaaccccatctctactaaaaatacaaaaaaatttagccgggcgcagtggcgagtgcctgtagtcccagatactcgggaggctgaggcaggagaatggcgggaacccaggaggcggagcttgcagtgaggcaaaatagggccattgcactccagcctgagcgacagagcgagactccgcctcaaaaataaaaataaaaaaacccatcaaacacaggccgggcacggtggctcatgcctgtaatcccagcactttgggaggccgaggcgggcagatcacctgagattgggagttcgagaccagcctgaccaacatagagaaacctcgtctctactaaaaatacaaaaaattagccgggcatggtggcgcatgcctgtaatcccagctactcaggaggctgaggcaggagaatcgcttgaacccgggaggcagaggttttggtgagccaaaatcgcgccattgcactctagcctgggcaacaagagcgaaacacagtctcaaaaataaataaataaataataaaataataaaaaataaaaaacaaaaaacagtgaatctgtaaaattgcaaccaggacaagtgatcccaaagtagtgtttggggagctgtgaggctgtaggacaggtgccactggtctggtctgggggcttagggaagacatccatagcagactagggtgcaaaggtcagaggtccatccatcttccccaggggaggaactggacttgcggctcattcggacaaaggggggtgtggacgcagccctggaatatgccaagacctggagccgctatgccaaggaactgcttgcctggactgaaaagagagccagctatggtgaggacctcttccgcccagccccagttaccaggcagtccccagaccccagctagacccagagcccggctctctcttcccccagagctggagtttgctaagagcaccatgaagatcgctgaagctggcaaggtgtccattcaacagcaggtagtcatgaccagacccccccggagagcccaagccccctagaaccccacctttgtcccccacagatcttcagtatcctcctacaccactctgtcttccccagagccacatgcctctgcagtacatctacaccctgtttctggagcacgatctcagcctgggaaccctggccatggagacagtggcccagcagaaaagagactactaccaggtgaggggggcagggtggaatgttacagaggtcaccctgctatcstgctgtccttcaggcctgatcccctcgtttcccagcaagctgggaggaaggcaccactaccaacgtcgccatttcattgatgaggaagctgaggcccggggatgcttgggaacttgcccaaggttacccagcaaagattcaagctgggcttcctgtgcaattgcaaaacttcactttactttttttcttgagacagaatatcttgctcttttgcccaggctggggtgcaatggtgcgatctcagctcactgcaacctccgcttcttgggttcaagcaattcacttgcctcagcctcctgagtagctgggattacaggcgcctgccaccacgcccggctaatttttgtatttttagtacagatggggtttcaccatgttggccaggctggtctccaactcctgacctcaggtaatccacctacctcagcttcccaaagtggtgggattacaggcgtgagccaccacgcccagccaaaaacttcgtttttgtttgtggggaggggaacgaggtgctgagtgttctcaggaggaaagccttggtgtctctgcttccaagcagaaaggatggggtgactacatgagacttctggactcaggggtcggggagagcaggtctggagaagaccccaggaggagaatactgactcagaaaagggtccagcctggcacggtggctcatgcctgtaatcccagcacttctgggggccaaggagggaggattgcttgagcccaggagtttgagaccaacctgggcaacatagtgagaccccctgtctctacaaaaaaaaaaaaaaagttttttaattagctgggcctggtgcacatgtctgcagtgctagct

SEQ ID NO: 95787 - DNA, 20948 bp, Homo sapiens
  misc_feature (1)...(20948): n = A,T,C or G
gggcacagtgcagctcagcccatggcctgagggtgctcgcccaggcccctgggggcttcgagaggaaagtacagttgggaaggggcccagccaccttggcatcgccactccaacaacctctaaacagaggggactgagaaggctgtcagcaagagggcctgccagctgtcaaggcacagggtcaaaggacccagtgcccaaaccagggggagtcactctgccctgtcctctgaagccgagaaccacagattccaagccacatctcttccttctccccagcctgagggaggagcgtggatgtcaaacgtgtcctcatcccaggccgccgcagacctggccccagcctgactcaggctgccattgccaagaggacccagcagcttctgctcaggccctggtagccagagtgggtatctggctatgatttggaacaagatgccatctaaataaataactcctagaagaatgtcaaaggcatgcggagggtggtggctgcagaaatcgagccccacctgcaaatgggatggacaggtgaaatatgtaccttttcaagtatgcaaagaaacatattataggccgggcatggtagctcatgcctgtaatcccagcactttgggaggccgaagtgggtggatcattagaggtcaggagttccagaccagcctggccaacatggtgaaaccccgcctctacttaaaaatacaaaaattagccaggtgtggtggcgggcgcctataatcccagctactcaggaggctgaggcaagagaatcacttgaacccgggagatagaggctgtagtaagccgagatcacgccattgcactccagcctaggtgacagagcaagactccatctcaataaaaaataaataagtaactctcaatcaaccttctgaggtggacttcagttaggtgactagcccagggccacatgccaccctcagttaaaaaagacaggccaggtgtggtggctcacacctgtaaacccagtgctttgggaggccaaagcaggagcactgcttgagcccaggagtttgagaccagcataggcaacatagcaaaaagcatagtcttttttttttttttttttttgatggagtcttgctctgtcacccaggttggagtgcagtggcgtgtatctcggctcactacaacctctgccgcctgggttcaagagatttttctgcctcagtctcccgagtagccgcgactatatgtatttttagtagagatggggtttcaccatattggccaggctggtcttgaactcctgaccttgtgaaccagccgcctcggcctcccaaagtgctgggattacaggcatgagccaccgtgcccggtctgagaccctgtgtccataaaaaaattataaatattagccaggtgtggtagcatgcacctgtagtcccagcgactcaggaggttcatgaaggaggatcgcttgagcctgggaggtcgaggctacagtggactatgatcatgccactgcactgcactctggcctgggtgacagagtgagaccctgtctatctttagggaaaaaaaagagacaaaagctggctgttgggctttcaaagtgaggacacagtggggcgccatcgggggcaccagggtggcctcagccgcccctgtgtgaaatgcaggtgcccaggagactgtgcgtgcggaagtgctcagaggctgcagagtgcactggagagacaagagtgccgggaagcataacaacaacaaatgtgcagaccgtgaccctgacgtgaggctctggaaccgttgtggttttcctcgacttccagggacgatcctaccatcaggacgcatgtgtgtccccggggtgggagagcattgctcttcaaccccaagggctcactacgatcacctgggagcccaggaaccaccaaagccaggaggccacatccaccaaggtcacctggccctaggatggccccagcactggccccaggtggcttaagatgtggccatggttgaggaatcagggtactgtttgggaaggcgggtgacaggatgggggccctgtagccagaaaccttgggggtagtaactcctcccttctgtccctgtagccagtgatctgaccgcactgggccgtcagcaactcaaggcctatgagctgcttcaaccccaacagctgggcggtgcctgccatcttgtgggcaaactggcaaatgtcagaaacccagaaacgtcatgatggtagcctagtgctgggggcagcaaagggcaaagactgccaggtgctctccctggggccacctcaggtggggctgaggttgctcaggccactgtcatgaactaccacagaccagatggcttaaaaaatgtattcctcaaaaattagccaggtgtggtggcgcacgcctgtaatcccacctactcgggaggctgaggcaggagaatcgcttgaacccaggaggcagaggttgtggtgagctgagatcatgccactacactccagcctgggcaacagagcaagactccatctcaaaaacaaaaaaacaaaaattagctgggcgtggtggcaggcacctgtaatcccagctactctgaaggctgaggcaggagaatggtgtgaacccaggaggcggaggatgcagtgagctgagattgtgccactgcactccagcctgggtgacagagttagactctgtctcaaaaaaaaaaagtattcctggccaggcgtggtggctcacacctgtaatcccagcactgtgggaggctgaggcgggcagatcacttgaggtcaagagttcgagatcagcctgaccaacatgataaaaccctgtctctactaaaaatacaaaaattaggccaggaacggtaactcatgcctataatcccagcactttgggaggctgaggcaggcggatcatgaggtcaggagttacagacgagcctggccaacacagtgaaaccccatcactaggaaaaatacaaaaattagctgggtgtggtggcacacgcctgtagtcccagctactagggaggctgaggcaggagaactgcttgaacccgggaggcagaggttgtggtgagctgagatcgtgccactgcactccagcctgggcaacagggcaagactccatctcaaaaacaaaaaaacaaaaaaaaaattagctgggtgtggtggtgggcacctgtaatcctagccacttgggaggctgaggcaggacaatcgcttgaacccaggaggaggaggatgccactgcactccagcctgggtgacacagagtgagatcctgtctcaaaaaaaaaaaaaaaaaaaaaaaaagtattccttcacagtcacagtcctggaggccagaagtcccaaatcaaggtgtcagcagggccacactccttccaaaggctctaggggaggatacttccctgcctctcccagcttttggtgactgttacattcctcagtttgtagccacattactcccatctctgcttccatcatctctgtgtctcaaatctccctctgcctttttttttttctttttccagtggcgggttctggtgaagacaagaaagcctactagaaacattctttttttctttttttttttttttttttgagatagggtctcacttttgacatagtaagagcaccaacatctcagacaaacactgccactttaagttccagccccctttctagcctcatgaattttaaggaaatttcttttttctttttttttaatagagaagtctcgctcttgttccccaggcttgaatgcaatggctggatcttggctcactgcaacctccacctcctgggttcaaacgattctcctgcctctgcctcccaagtagctgggattaaggtgcctgccaccatgcccggctaatttttgtattttttagtagagacggggtttcaccaagttggtcaggctggtctcgaactcctgacctcaggtgatccgcccgcctcccaaagtgctggaattacaggtgtgaaccaccgcgcccggccaggaaatcacttctaactacaagcagccagaaagaggagacagtaaaacacagaaagacagctcggacagagagagagtgggaagaaaatttcttgggtaactgccaaacttcaccttcatacaacgggccccagtaaaacagtgggccttaataagcacattcctttcccttcaggtgcactaaaataggcaagctaaaagcagagtaggggggtatgcctgcagctgcagaaagatgtatgggaggctgggcacggtggctcacacctgtaatcccaacactttggtaggccaaggcgggcagatcacaaggtcaagagatggagaccatcctggccaacatggtgaaaccccgtctctactaaaaatacaaaaattagccgggccatggtggcgcgcgcctgtaatcccagctactcgagaggctgagaaaggagaattgcttgaacctgggggcggaggttgcagtgagccgagatcacgccactgcactccagcctggcaacagcgcgagtctccatctcaaaaaaaaaaaaaaaagaaaagaaaagaaaagaaaaaagaaagatgtatgggaacagacacacaactctccctcccagataagcacaacgaagagacacagaagcagttcaagcctctgataaactctccgaccctgaatccttaaaaactcttagtctgtaaaagagtgttactctgacccaactccgccagaaggcgcctctcaggtttgttttctctaaaataaacctgtcttgactggcaagccacctttcgtgtttctttcctctttaattcttacaactttgtcacccaggctggagtgcagtggcgcgatctcggttcactgcaacctcggcctccgggttgaagcgattctcctgtctcagcctcccggtagctgagattacaagtgcccgccaccacgcccggctaatttttggtagactcatggtttctccacgttgcccaagctggtctcgaactcctgggcgcatgcgatctgcccgcctcggcctcccaaagcgccagaattacaggcgtttgagccactgcgctgggaaactgtgtttatcattctgagtccagcggaatacagtgcccgtccaaaaaagtgctcaatgaagaatgaatgaatgaatgggtaagctctgggagaaataaccaggctggttgggcagggaaacgtccttctctgaactttagggttctcatccgtaaaatgaggataagcaacagtctccatctcacgggaactgaaggtatggctgaacaaaataggcttattgtcactacagtggcataaacacctcccttactcaaaacactttcaagggcgcagagagaacgctgtacgagtgagcagtaccgtaaactgttactgctctgggttctgtcacgggacagtgactactcctcactgaactgtggaagaggtggcccaaaaaacgcgagaakwaaagagaaagtttttagacgcagaacgcggctcgcggccaccagaaagcgtcctccgcctccgcccccagcgtccccgcgcccctgcgcggccgcaccttcacccgctgcgcctcgtttatgcactgctggtagctgccgatgtagaaggcgttctttacgtcgaacagctcgtctacctccccgsagccgccrgaggccgggccgggggccggaggcgccatttcgctgtcttctcaccagctcctcttcctgaaagacacgtcagccggaagcaagacacgggcacgctaggaaatgtagtttactttttccgagcggcggcgaagtaagccaatgggaagctccacaataatatgcaagggggcggaaggcgtaagtgcgtcacggagagcatctcgggaattgtagtgtgtttctgcaagccaatgggatccggggaaacatgataaggatgcggtcgaggctgggaataggctgagggagctggagagggtgggacyacgcaggaggcagatccaataaacaggaagatttttctcgtgacgtcgtcggcgcgcgccggaagcgcggatcacacgggcccctacaaggggcccctacaagyggccacaaggatggcaggcttcgcggagctygggctgtcatcgtggctcgtggaacaatgtcggcagctgggtttgaagcagcccacgcccgtgcagctcggctgcatccccgccatcctggagggtgagtatggcccagggccttccscaagaggcctctccgctcctctcgactcctttcccttctcgcaacctttgcttattccggtcccacgaggcgaggggcaacctcgggcgttacaggagatccggggttccggaggacgactggacagtgttggcatttaggttgcatgactgactcgctttgtgttcgtacgcaagtgatgtaatctctgaaattttcatagtctcagcacagggagggtttgatggatgactagtccgatagtatcgcaaaatcctgcagacctggtactgctatctttattttacaaatagaagttgaggctgtcaaaattgctggtagatccaggactccttggtcctgtgattgctcctctaggagaaggtcttctctctgctcctctagcccaacccagtttsgccattaaagagaggcccacaggaagcctaagatgtgataagtcagggattaaataaacaaatgaaggggtcaacagggagcacaagatgcatatgagggaagggaattctggattccccaaattcacgtgctcctggacggagttagaacgaggtggtaggaagctgtgggcatctcrggtcaaatggatatgggttccagtccagcctgccactcactggcagtgtgtcctgggcaaggtctctgaaasccagctgtccacacatggagggtgttgatgctgctttgtccccaacccaggtcgagactgcttgggctgtgctaagacaggcagtgggaagacagcagcgtttgtycttcccatcttgcagaagctgtctgaggatccctatggcatcttctgcctcgtcctgacacccaccaggtaagcccccagcaggcctcytgggtatgggttaaccagctgtgctctcttgggcaagcacctttccctctctgagcgcccttttcccacgtgtgagatgagcatgaaaatcttgctacccgcttcttaggggtcctgcagaattaaacaagatggccccggtgcagtggctcacacctgtaatcccagcactttgggagctccaggtgagcggatcacttgaggccaggagtttgagaccagcctgaccaacatggagaaaccccgtctctactaaaaatacaaaaaattagctgggcatggtagcgcatgccgtaatcccagctactcgggaggccgaggcaggagaatcgcttgaacccaggaggcggaggttgcggtgagccaagatcgtgccattgcactccagcctgggcaacaagagcaaaactctgtctcaaaaaaaaaaaaaagaaagaaagaaagaggcaggcagcagaaagggtactgggacctgggcatattggagccagtttgagaaargccttgaatgccaggcggagggttagaattgattctgggggtgtgtgagcaggaaaggtcatgagccagggagaggccaggacagagttggttgggggcagaaaggaggctgatgcttgagaccctctggctggggcaactggctggtggtgaggccattgctgaaaggcgaactgggggaaggcacaggtttgggataggaagagatgctgaggtcagcttgggtcgggctggtgaaggagggatgttccaggctgagcctggcgagggggcaggggccacaatggcctccaaggctcagcatcagagcctttgtgaacaggactgggcaagtcaggagcctgggggctcagggaggaaccctggggatggagaggggaatggggggcaggtccagaaccactacctgacccagcctggccccttcacacccacagggagctggcctaccagatcgcagagcagttccgggtcctggggaagcctctagggctgaaagactgcatcatcgtcggtggcatgggtangggagctgggaggcgggggaagccccagcatgggaccctagcagctttggaccacctgcccagccctgcctctcangctctgtcccccagacatggtggcccaggcgctggagctctcycggaaaccacacgtggtcatcgccacgccggggcgcctggcagatcacctgcgcagctccaacacttttagtataaagaagatccgcttcctggtgagttcgccccgcccctgcagacctcaggagctgggctcggagcctccaggcccaatgtcagagcctggggcaccatctcatccatttaggaaacgtatgtccgttagactgtccagtaaaacgctaggaacagtgacaaggaccgttcaaggaccaacaagagggggcccagtcctagcaatgttattcgggggtagggccttgctgagacttgggtgaggggcaggcctcccttggaaggagggtactccagggcctagggtccatgtccatgcctctcaaagaggcctgcttcaggggtggccaagacccrgggccatggacggcaccctcacccctgcccccattggcacggcaggtgatggatgaggcagaccggctgctggaacagggctgcactgacttcaccgtggacctggaggccatcctggcggctgtgccggcccgcaggcagacactgctgttcagcgccacgctgaccgacacactccgggagctgcagggtctggccaccaaccagcccttcttctgggaagcacaggccccgtgagtccacagcccagacagcgtggggagggcagccccatcctrcagacagggacactgaggcntggcggtctatctgtccatccccagggtgagcaccgtggagcagctggaccagcrctacctgctggtgcctgagaaggtcaaggacgcctacctggtccacctgatccagcgcttccaggatgagcacgaggactggtccattatcatcttcaccaacacgtgcaagtgagcggggcccgcctctcccctcccaccgcccttcaaaggaggaggtggcccgacgtctttggtctgggacacacagccagtctcagcactccccagcctctgctcagcctggaggtcatgggggcttccctcaaggagccaaggtccctcaatctgaaggtgcagccggcctttggggttcctcagcccagccgttgatggaagggccaggaaacccctgcaagcagctgtttgagcagcccatttgctgtgttctgggggtgtcactgagctttcctgggcctttagtcccatctcagaggaagttgtgacaactaacaggcctggtgtgcgtctgcacagacagagacccctggggagggcagttcatatcttcattgaattgtttgggaaggtcattgagaagctggaggctcttccagcatgagccaggatagaagggcagaaatcaaggcgctttaaatgcgttacctcccagaagagaaaagttgggactgggtgcagtgactcacacctgtaatcccagcactttgggaggccgaggtaggcggatcacctgaggtcaggagttcgagaccagcctgcccaacgtggtgaaacttcatctcgactaaaaatacaaaaattagccaggcatggtggcgagcacctgtagtcccagctactggggaaggtgaggcgggagaatcacttgaacccggtaggtggaggttacagtgagccgagatcacgccactgcactccatcctgggggacaaagtgagactgtctcagggaaaaagagagaaaagtttggctgcagggtggctgtcaggcgtggcaggatccagcagcttatgtgatggtccccatcctttctccctgtgcccctctttctcctctgttttcctctgctggctccttcttggccttcttggtaacagtgaccacccctagcaagtcagtttccagccttccagccctgcagtcccagggccaactcttgtcagttccagctccagrgagggatcagcagagaggacatcaggcaggcaagccgtctgtcaaccctcatcctgcctcttttttttttttttttttttgagagtctcacgctgtcccccaggctggagtgcaatggcgcaatctcggctcactgcaacctctgtctcctgggttcaaacaattctcctgcctcagcctcctgagtagctgaggctacagtcatacaccatcatgcccggctaatttttgtgtttttagtacagatggggttttgccatgttgggcaggctggtcttgaactcctggcctcaagtgatccaccygcctcagtctcccaaagtgctgggattacaggcatgagccaccgtgcctggcctgctgcctctcctttctaagctgcatgagnccactgtgctaggtgtctcaggggcgggtgggggcaggaacaccttcccagaacctgagagctggaggggttgacaggcacatccttcccgccaggacctgccagattctgtgcatgatgctgcgcaaattcagcttccccaccgtggctctgcactccatgatgaagcaggtgaggccaccctggggcccgccagcctcaccctgggatacctccccgcctcagacattggccccgatccttccttctgccrggcgccttcttcctgccacctggtctcttctggtcccagaatatcgcagctcaagaggccctccctgaccgcatctcttttagccgtcattcatttgtcccggtctgacttctcatggccaccttcctcaatggacggctggggactgtcccgnnctccaccctgtcccsaggcctcacacagaaaaccctgccttcatgcattcccaattttcttyccaaccctgtkcagaaagaacgctttgccgccctagccaagttcaagkccagcatctaccggatcctgatygcaacagacgtggcctcccggtgagcagcccccagtctcctgccaagggcactccctcttttactacaaggccccacagatgagaaggctggcctcaggcatgtcaggcagccctagcatccctgctgagtgaccctgggtgagtccttgcctcggtttccccacatggacagtggagctgaccagccacctctgcctccaggggcctggacatccctacggtacaggtggtcatcaaccacaacacccccgggctccccaagatctacatccaccgagtcggccggacggcccgtgcaggtgagcagtggagggggaggccgagccttgggcctctgtccctccagcctgcccagcaaattcaggtggtaggacgtgggtagggtgcagcccacagatgagagctactcagggccatgtttgcaagttggggagttgtcctttctaaagcaaaggtgaatcccagctactcgggaggctgaggcaagaagatcacttgaacccgggaggttgcggcaagctgagaatgcaccattgcaccccagcctgggcaaaaagagcaaaactctgtctccaaaaaaataaaataaaataggccaggtgcggtggctcacgcctgtaatcttagcactttgggaggccgaggtgggtggatcacgaggtcaggagttcgagaccagcctggccaacatagtgaaacactgtcttactaaaaatacaaaaaaattagccaggcgtggtggagggtgcctgtaatcccagctactcgggaggctgaggcaggagaattgcttgaacccgggaagcggaggttgcaatgagtggagatcgcacaattgcactccagcctgagcaacagtgtaagactctgtctcaaaaaataataataaactaaaataagtaaataaaataaaattgtaaaataaagcaaatgcaagtcaggtgctgccttcacccaagccaggtgatgaactgagcagtgtggggctgccccctgggagggtgcacacacagctccggcccccactacttgctgctgcctcgtcagggaggggcatggtgtccatgagatgctgtcagttctgaagccaggaaagatgtggttgctggggtcggactgggcctggaccttctatcctgaccctgtggtgctgggcaggtcacttccactccctagacctcacatggtggataatgagaatggtgacgtcctcgtggggctgccatgagggtcacggaccttgtccaccatcagtgcagtttcggccctagtcaacgtcacagaaaacagcaagcagagatcttgggctgaggcccgtcagggctaatggctggcattacttagactgggttccctggcagccaagccaaaaagggaaatcgggcagtaactaactgctgtgtaaggccagactggcagacctgcctctccccagcgacccgtcctccacacagtggtcctgcttggggtcaagcccagacactctgggctgatccctcccaagcccaagcccttgttcagcatctccaggacccctgagctgtgtagctgtcaggatctaccyttattcgccccatgtcctgacgcccagcacatagcagataaccggcacatccccacagggcggcagggtcaggccatcacgctggtgacacagtacgacatccacctggtgcacgccatcgaggagcagatcagtgagtggggttggggtgggtggtagagaaggaggggtggggtgggcagaggtgggcacctcggggtgagacccattttcccgtcagacaccagccggcctgctcccrtgagcagatttaggctggggcttccttccctaggcacccccaaaagaagttcttttgcccatttattgaaacaaactccccatagttgtcgccagcagctgaaagccacatcagtcaggaggggacttgggtttcttagactgagatgtatggaaggtccctgagatgtcagaggccccattgacagggcctggcctgctaaaaacccctgggaatggtttcatatgcagccaagacagagacacttcctaaggtatctctgatcactgcatagactgtcctgaaatttagaaacatctggacttggccaggcacagtggctcacacttgtaatcctagcactttgagaggccgaggtgggcggatcacttgagcccaggagttcaagacsaacctgggcaacatggtgaaaccccgtctctactaaaaatacaaaaattagccaggtgtggtggcgcacgcctgtaattgcagctacttgggagggtgaggcatgagaattacttgaacccgggaggcaaaggttgcagtgagccaaggtcgcgccattacgctccagcctgggtgacagtgagactctgtctcaaaaaaaaaaaaaaaaaaaaaaagagaaacatctggactttaaggccgggcacggtggctcacacctgtaatcccagcactttgggaggccaaggtgggtggatcacttgagcccaggagtttgagatcagcctgggcaatgtggagaaaccctgcctctccaaaaaatatagaaactagcagcacacgccygtagttccaactactcaagaggctgaggttggaagattgcttgagcggaggctacagtgacctgattgagccaccacgctccagcatgggcgacagagtaagaccctgtcttcaaaaaaaaagaaagaaatatctggactttaaaggacactgtttgcaagaaattaatattcatggttaaactcataatgctgctaacaccgaaaaaaaatggcggggggaggctgaggcatgagaattacttgaacccgggaggcggatgttgcagtgagccgagatagtgccactgcactccagcttgggtgaccgtgagactctgaaagacagcggtccataccttccttacctcagaaatccctgatcttgctcagctgacccttacctgatatggccccagatggccttgcataccccacagcatggggaactcactacttggctgaactccctctccatgtcacgtctcctccccacccccacccccggctttgctgtccccacagagaagaagctggaggagttctccgtggaagaggccgaggtgctacagatcctcacacaggtcaacgtggtgcgaagagagtgtgagatcgtgagtgtcagaggcgggcaggaactaaagtgctctccagggccgggggtgctcccttccaggtggggcccccgtgaccagcatctccttaccccacttccctccaccagaaactggaggcggcccactttgacgaaaagaaggagatcaacaaacggaagcagctgatcctggaggggaaggtgagggccgagcccgcaggtagggggtgggtggccaggttccctggcgggggccgccagctcagccatcccctggtcctccctgtgccaggaccctgacctggaggccaagcgcaaggctgagctggccaagatcaagcagaagaaccggcgcttcaaggagaaggtggaggagacgctgaagygacagaaggctggcagggctggccacaaggggcgtccacccaggacaccrtctgggtcccactcaggcccagtcccctcccagggcctggtytgagccccacacggccatctgcccagtccttgactcrtccatggagctgagggtcggaggaaccttccttgggggcagcagcccttcccgggggcctacccagtgccccacagcagaacccgtgggcgctcgtgttgtgcgggccctgctcctctgccccgaaaccactggctggycccttccctgagccctggccaagattcaggctgcaggggaagaaagaacatgaccgggaggttgtgaccccaacccaaggtcmccccccaggggtgccgcatacaggaggtgcttaataaacgggtcttttgacttcctcagtctgactttcgaagagcagggggacaggagaggtggggtgcagccgctgttgtttctcaggtgtctgcccagaacaccatgtccatttccaccaggcaggcccaaagttttgcagacaccagctgctcgaatggccatgggattttgggccctgaagccccttctctgggcttccagtttcctcatctggagaatgggcatagcaactgccctgctctccagaggcagctgtgaggctttggtgaggtcagtcctgtgccgaatgggtgcagctataagcttccctggccacccacctggccacatctggggtttgtggccagagtgaaggggccatgaaagtccaaatttggccagacaatgtgggctaagcccaaggggacaggcagagagacaccagagccagcttcctggctgtgtggcctggacccccctcggactccaagcctcacccctcatctgcaagcggcttataactgctacatggattcaggggcacccaaaaagacgcagggaaaggcgccggcgacatgttaagtgcccagatacccacataccacacacacacagccacgcttagaaatgtaatcgggggatctagaaattctacacaatgagaagctcaaaaacagccccaaagctgccaacaaccagagccgactggggcccaccccagcccagcccggcccggcccacccagggctaagttgggaccccccagtccctttccaggacgaatgggcccaactatgccgcctgcagcctggcccgcatcccaggccggaatcgttcatagaaaaccagccccggctcagggcgcagcctcagccaggcgggccaggccctcacgcagctcactcagctcaaacagsctgacgtccagcagctgcgctgcccggcccacctcagcccgcgcccgctcccgctctgcccgtgcctcctccaggctgcgctccatcgcccgcagctggtgctccaactccgcattgcgggtctccaggtcctgccaggaaagggtgggcagggttgggggccccaacaaatcaccagtcctgcccgaggcatccagagtctgaccaccttcatgtccctcttctgcccagagccatcctagggcgcccaacacaccaggaataaaatgcacaccccacaggggcctagcttctgccctcatttcttttgtttgtttgtttgtttttgagaaggagtttcgctcttgtcgcccaggctggagtgcaatggcgtgatctcggctcactacaacctccgcctcccaggttcaagcaattctcctgcctcagcctcccaagtagctgggattacaggcatacaccaccacgcccagtgatggcttacacctgtaatcccagaactttgggaggcggaggcaggtggatcccctgaggtcaggagttcaagaccagcttggccaacatggtaaaactccatctctactaaaaatacaaaaattagctgggcatggtggtgcacacctgtagtcccagctactctggaggctgaggcaggagaatcgcttgagctcagaaggcggagcttgcagtgagccgagatcgcgccactgcactccagcctgggtgacagagtgagactccatctcaaaaaaaaaaaaaaaaggctgggcgcagtggtttacgcctataatcccagcactttgggaggccgaggcgagtggatcataaggtcaagagatcgagactatcctggctaacatggtgaaaccccgtctctaccaaaaaatacaaaaaattagccgggcatggtggcgagcacctgtagttccagctactcgggaggctgaggcaggagaatggagtgaacctgggaggcggagcttgcgccactgcactccagcctgggcaacagagtgagactccgtctcaaaaaaaaaaaaaagtaccccctgaacatttctcagataaagcctttagcaaaagccaagccaaggccagtcgtggtgactcaagcctataatcccagcactttgggaggctgagggcagattgctcacggtcaggagttcgagaccagtctggccaacatgaggaaaccccatctctactaaaaacacaaaaaatgcccgggcacggtggcgcatgtctgtaatcccagcactttgggaggccgaggcgggcaaatcatgagatcaggagttgagaccagcctggccaacatggtgaaaccctgtctctactaaaaatacaaaaaattagctgggtgtagtggcgggcgcctgtaatcccagctactcaggaggctgaggcaggagaattgcttcaacccgggaggtggaggttgcagtgagctgagatcgtgccattgcactccagcctgggcaacagagcgagactccatctcaaagaattaaaaaaaaataaagccaagccaagccagacctagttccaatgcaggctctgtgatctcaggctgagaacaggaggaattgacggggtctggcatgggaatacagcaggaactcaagcattgcttgttgaacccatagatggatatgaaactgtaccaacagccactgttcacgcggcacctgctgggcatcaggccttccacaggactgggcctcccaatactttatcatcttaggtagatattgtcctgagtgtctgttgaggtgactgtcacccaccgtcaccccacctccttgtgcccacacacacctgcaccttctgctgagtctcctcacgctcggcagcctccagggcctcgcggggccccccagtctgactcttcagggtctgaatctcctagaggagaagagttcccagggtctgttgcgggggtcctggctttcccacaggaggtgagggaaggcgaggcccaggaaccacacttggcactcacctggtccttggtttgcaccagagcttccagctgttccagcgactggccctggcccagcccctccttctcaccggtgggggtcacctctgaagctgcctgagcctccagctcagccacctgtagggcaggaatagcagcccctgacgcccccgcctgcactctcccttgctcgcccaacctctagggaatctgcctcctgtctggccacgcccaggaccgagcacccatctcccttggttggtgccaccacccccctctgcacagcttggactttagtgtctgatcaccctctgaggctggcattgtctcaaacccattttacagagcaagaaactgaggctgggtcagtgacctgctgaggtcacacagctagtccatgaacccagggcagatgggaactgccgaggcgcggtctccacagttgcccgggccaggtgggggtctctcggagggaggggtgccctcacccgctgccgcagccgctcggcctctgcacgctgagcctccagctgctgcctccactgggctgcggcggcgttggcctctcgcagggcgcctgccagcttgttgttgctgtcctgcagtgcgaaaaactcggcctcccactgtacctcgcccacggagctgcagagacacgagggtcggcagtgggtgacacggggctggggggcggagtcgggcgatgctgggctagggggcggggccaggggtgggatagctctgggcttaggtcagggcgaaggctggcgagggtgcggagtcgtgcgcgaagttggactagggggcggggcaggggtggagtggcactgggctgggggcggagtcagcggcaatgctcggttagggggcggggccagggtgggtggcgctgggctgaggcggagtcacgggcgatgctgggctagggggcggggccagaggaggggtggctttgggctagggcacggagtcagggccacgcagggctggggatgtggcgacactgattgctgagcttggggatggggcagtcccgcagaagcggggtcttgtcgaggaccgagtcaaagaagggggcacgtggagtccgcccagtgacactgtgggaatgttgagggagggatgggaggttggggagagtcagccgatgggggcgtggtcagggtggttatcctaagaccagagaggcatcgacggggcgaggttagcagcgagaagagacagggatggggtcaaaacagaggggcgtggccaacgcagggtaggggcggggtcggctctggatggggcagcattcagatcctcatccccttccccaggtcttgagtccacagttagatcccgccgtcctggcactcccttggcttccaagaaccgcctcctcgtcccccacccctacccccgcccctgccacgcccccaagtcccgcccctcacccctcagacaacatcttctttagccgctcgcgctctgtggggccgggggcatcagcgctctggctgcggaacagtttttcctcgccggggccgttggcactgacgagagggctcgggggcacctaggcacggggaaaagaataggtcacgaccccacatcagctgggatcaaggctgatgtgactggggtcgtcacatcgggggtgcaattgacctatgcaccctaagcaggtccttcacagcacaggatccaagtgtgtccctccccacctcacccaccctccatggctccctgtggcccctaagctgggagttccatgcccacgccctcgaccttgccttcctgggctttcaccacccccaggagcaagtctgatgcaggttagtctaaaccaagatacttagaacctgtaaggtaggggaggggtacaatcggacacctccctgctgttcccttccctgaggccgaacttcaacatcacgtttaggatttcagcaggaagccctgcccaggccgaattcgtgtttcgtgagcaaccccactgcctggaccactggctctgagggtagacaagctggcgggtgccctgcgagaggccagcgccaccgcagcccagtgcaggcagcagctggaggctcatgctttttttcatctctccaacccctgtgcacagccctcggcctggtacacagcaggtgctcaataaataatgctgaataaattaatgtgggaaaacacgcagggacagttcgttgttctgcctcacacttagccatttctttctttctttttttttttgagacagagtcacactctgtcacccaggctggagtgcagtggcacgatctcggctcactgcaacctccatctcctgggttcaagcgattctcctgcctcagcctcccgagtagctgggactacaggcgcatgccaccacgcctggctaatttttgtattttttagcagaggtggagtatcaccatgttggccaggctggtctcgaactcttggcctcaagtcatcctccctcctcagcctcccaaattgctgggattacaggcgtgagccaccgcacccggccacacttagccatttcaatttctagtcttccatcctgccatctgagctggttttgctactgggacctactgggtgtaccccaccggccccaggcaaggtccagaccctctatgacacactccacaccactcctctgtggtccctgctgtgggtctaaccttaggtcatctggaagcattgggtcttgacgaccagcagagtgccccggtctcccaatatcaaggtcccccaatatcagttgagcgcctggctgactcacaggtgcccaggcaggcataggggagtagggagtgctgacctggtgggaggcgagccccagggctggactggtgagctccccgccatcctgagatttctccctggccagcctggctgcttccttcacttcctggaacttctcggcaaactaagggagtggggaggaaaagacagtaaaaccccagcccatcctcccaaacaggtcaccatcactcagtgacagccccgccactttcgaaccgtacccatccccttatcacacaccttggaagaaggagagaaactttgaaaaatgatgtaccatggtgggtgggcaggtggcatcagatcacagaggtggcatttaaatacattgggccacattgagaaa

SEQ ID NO: 95788 - DNA, 23388 bp, Homo sapiens
  misc_feature (1)...(23388): n = A,T,C or G
actatgttggccaggctggtctcgaactcctgacctcaggcgatccacccgcctcagcctcctaaagtgctgggattacaggcgtgagccactgcgccccactgagaaaaataaagttttagaacaatttctagattctgtgtatttatgattagctaatataactttctctctaggaaggaaataataattattaagggaataataattcttatactatgttccattaggcatgactaaagaggtccatattttggaggatgactctcttctctgccaatgataattgcctttctttttataatacataaagtataatatcgaataaatgcttattacattgctgagtagtattccatggaatggatgtgccgtaggacatttaaccattcacttctcgaggagtattttggtttttccagtttttggctattaccaaaaagcttctgtgggtcagctcatcccaggatgttggatttcaatttcaatttttcttttttcgagacagagacttgctctgtcgcccaggctggagtgcagtggcgtgatctcagctcattgcaacctctgcctcccaggtttaagcgaatctcctgctccagcctcttgagttgctgggattacaggcgtgtgccaccaggcctggctaatttttgtatttttggtagagacagggtttcaccatgttggtcaggctggtgtcgaactcctaacttcaagtgatctgcctgcctcgggtttccaaagtgctgggattacaggcgtgaacccctgtgcctggcctcaatatttctttttttgagaaaaggtcttgctgtgttgcccaggctggagtgcagtggtgtgatcatagttcaccacagcctcaaactcctgggctcaagcaacatctcagcctcccaagtagctggggctaccggtgcgcaccaccacacctggctaattttaaaatttttttatagaaacggaatctttctaagttgctcaggctggtctcaaactcttaagtgatcctcccaccttggctccgccaaagtgttgggattacaggcatgagcacccagcctcattttcaattttaaggggcatgttaagcacattgaaagttgtgtaggatgactccatttttctttttaaattttgggaatctgttcatttataaattactgacaactcctttagtaatgttttcgtggtttctgtggatggttaattttccccagtggtgagagcttgttggttttcatttatttgcttgagtggatggaaataccggttccatcactccctgttaggcattacctcctacaggtgtggaggccggtatgactcacacctcatgacgacggttggaagcctacgtgatgctgtccttggctcaaggagatgaaagccaggattaggggcctgcatcagtttagaaggagctctaagtgccttaggagccttctcgaaggctgtaggagcgtttagaaacacagggatttcatgcccaccgggaagagtcaggaaatctgggaaccagtttagttctgaaccacttgctgagacttgcagagatcaccccgctctgtgtctcacaagtcatcaaagagaggacttgacattgatgatcgcttccctctgtgacatttccagactctatacttacttcgaaactcataaaaataagcattgacaaggatatgagggtgtggtaagcgcattgcttccccagacttgaaacacttaacagcagcgtttcctgcgagtaacatcaaagacacctttgaattgcacaggcagaaattgagtcccttttccagttctctttcaaatcttctggttacttcaagggatcactttggtttggtgccagtgtgtctttaaacaattctatttatttatggacggtgtgtgtgtgcatataattatctatttatttacacatatatgtataaaattatatgtacgtaattttagtttttaaaggatcatgcagtaaaattgaaatttttagagttcagttcaataaaaattttaacataggtaaccactatcataattagaattttaacacatgcagccaccataatacaaaacagttctatcacccccaaaaccttctatgctaccccctttattctaacacccttccctaacccctggcaacactgatctttcctcccatagtatggttttgtcacttttggagaatatcatataaatggatcatattaatggtacctttgaaattggcttctttctttttgttttgagacggagttttgctcttgttgctcaggctggagtgcaatggcacaatcttggctcactgcaaactctgtctcctgggttcaagtgatcctcctgccccagcctcctgagtagctgggattataggcgcccaccacgacacctggctaattttttatgttttttgtagagacggggtttcaccatgttggtcagggtggtctcgaactcctgacctcaggtcatccacccgcctccgccttccaaagtgctgggattacaggcatgagccccacgcccggccaagattggcttctttcaatcaggctacttattttgagattcatccaaagtgttgcgtgcttctttgcttttctgttttgttgtattttatgtttttagcaagacagagggtcttgctctgtctcccagactggagtgcagttgcacaatcatggctcactgcagcctcaaactcctgggctcaagagatcttcctgcttcagcctccagtatctgggactacagctgcatgccaccatgcctgactacatacatatatatatatattttttttttagatggagtctcgctttattacccaggctggagtacaatgccacgatctcagctcactgcaacctctgcctcccgggttcaagcgattctcctgcctcagcctcctgagtagctgggattacaggcacccaccaccatgcccagctagttttttatatttttagtagagcggggtttcaccatgttggtctggctggtcttgaacacctgacctcaggtgatccacccgcctcagcctcccaaagtgctgggattacaagcgtgagccactgcacctggcctgtcgtgttttagtagtttgccctctttattgctgagcagtgtttcatggtatgggtgaatcacagtttgtttaaccattcctctcttaagggatattttttttgttgttttttgttattttttccagttttcagctattgcaactaaagcacctatgaataatcatgtgcagattgtgtgtggttgcatattgttcaaaatcctctctggctttccaattcacttagaataaaatttgcagtcctcatgcagtctgtaaaatcatacctgtctggcctttgtccagcctttgatagcgtctcctccctgcctcctctgctctcttccttctagctatcctggctttcctgactttctctgcacatgcaaagcccatcccatttgtaatgagttgaatgacagaccctaaaatgtacattcagaacgtgcaaatgtgacctaacttggaaaatgtgtttttgcagaagtagttaagtgaggggtctcaagatgagcctatcctggatgagggtggtccctaaatgcaatgacaagtatccttataagacgtagaggaggagggccgggcccgatggctcatgcctgtaatcccagcactttgggaggctgaggcaggcggattgcctgaggtcaggagttcgagaccactctggtgaatatggtgaaaccccatctctactaaaaatacaaaaaaatttagccgggtgttgtggtgtgtgcctgtaatcccagctactcaggaggctgaggcaggagaattgcctgaacctaggaggtggaggttgcagcgagccgagattgcgccactgcactccagcctgggcgaaagagtgagactccgtctcaaaaaaaaaaaaaaaaaagatacagaaggagatgcaggcacagggaataaggccatctgaagatatacggagaaattggagtgacgcagccataagccaaagaatgcctggagcctcttgaagttggagaaggtaaggatcctccccaaagatctcgagagagtgtatggccccactgatgcctccatgctgaatttctggcctccagaagtgtaagagaattaattcctgttgtttcaagccacccaatttgtggtaatgtgttatggccatcaaaggaaattaataaaacacctcagggcctttgcatgtgccatcttctctacctggattactctttctccagatccttgtggggcccatgtcctcacttcctcctggtctctctgctcaactgtcacctccttagagagtccttctgcttgtcctaagagaggcccttactgtatccctctaactcaataatttgttgcacttctctttaaatttcgatcaatttagatacatggtatttgtttcctcccctgccccacamccacccctttttttttagagacagggtcttgctctgttgccccagctggagtgcagtggcacgatcacagctcactgtagacacaacctcttgggttcaagcaatcctcccttctcaacctcccaagcaaaagggataacaagcacgtgccaccatactcggctaattttttttctttttaaaaaaaatttttttagacagagtcttgctctgtttcccaggctggagtgcaatggtgtgatctcagctcaccgcaacctccacctcccgggttcaagcgattctcctggctaagtttgtttgtttgtttgttttttggagagactgggtctcactttttggccccggttggtctcaaattcctggcctcaagcgatcctcctgtcttggcctcccaaagtgctgggattacacacatggaccaccatgccaggcttgtttccctttttaaaaaaatcacttgtcctctgtgtatatttgtttcagggactgttgaataatccagctttcggctgagaagctttttggacatttgcctagtgacaatctttctttatctggggagagattggtcagataattagtcttggagcatgttaaagctttgtctcccaagaaagaatttacatctattacaacatctttctctctctctggaaaattgtatccttgttattaagacttttttttttcttttttagctttacagaaaagctgcaaagatagcaagataatttttgtctactctttatccagcttccctgaatgctaacatcttatataaccataatacatttactgaaacaaaaagattaacactggttcattactactaactcaactccaaactttatttggatttcaccaactttatccacaaatttgtcctttttttgattcctggatccagtccagggtactatattgaatttagttgtcacagctcctttccctcctctagtctgtggcagtgcctcagtctttgtttttcatgaccttgacagttttgkagaggtctggttaggcattttgtagaatgtgactcaatttgaatttcctttgcttactactatacctattatacaaaaaatatacacatatatatatatacatgcacaaatatttatttatagtgtggaaaatacacataacataaaatttaccattttttaagtattattattattttgtgagacatggtcttgctctggtacggccccgctggtgtggaaagcgagctgtgttcggagggcctgaacctacgggcttccaccgtggggccaatggaaagctgcggaaggtgggcccccaaaggtctgggctcctgaagccgctgaggggcgtggcctcctggttttaaaacataaaatgggtgtgaggtctgcagtgcgagccaatgaaaggcaaggggaggcggggtctatgagggaggcggccagtagaggcaaggctctttcgggtggccccggagcggggctccgactgtgcgcatgcgcatcgggccggactacggggcgccgctgagccaagtgggccacccgggcacggccacgctcccgggtcacgtgacacggagggggccgaattctgctggaggcagcgccatatcctggaggtgaaggtgartagcgtcgggggtcgagctggtgtgggagaaccacatcctgatgcgatgtgacctcgacccagcctggcccggggtcggggatcaggctcgggcccgtgcgctctttaagggagaggcgkgggttgcgtggagggtcgcgcccgctaacccgggggcgtgacctcgtgcctcttggtgacgtaacatggggcgggctcactactggggctgagatttggggtccggttgtggaaagagaggcggggcttccgcctgtccattgacaagtaggtaagtggaagataactgtgtggtgctgtcgtcgccaccttgacttgtggtggctagtttgggtgggagtggtggtgatgtaaaggactggggctagccccgcgaggggcgtgaccttgtcacggagaggcatggcttcaccccgagcytaggcgcacaaagggcgtggtctggcagggttgggggcgtggccgcacagaaactggcggcaagggtcgtggccctggatcctgctgcgagaaggggcgcgatttcttcyggagaggttccctgtcgcgcccaagtctgggaagtgccctttctctcttaggtaccacctcatggagacccccgcggccgccgcccccgctgggagcttattcccctccttcctgctcctggcctgcgggacgctggtggccgccttgctgggcgccgctcaccgcctggggctcttctatcagctgctgcacaaggtgcggggcacagaatgggaggtgggctgggggcagtcaaagagggaggggcctcgtggtgctgcttccagctcactcattgtgcagggtgggaaagcgagccccgactagtccagagggactggtaagaggttctgtccagggccctgtctccattgccacgctgtgtatggaggcctggactttgccactggtaagagagaacacggaagctgccgctgccggggcactcgcaccccacctacctccttccccagtgactcttttcacagaacagatggacagcactctgtgctccctaacctggatgggataaatggggcagagggcaggctccagcgagggggtggcagtgacagtttcataacagttgccctctgctgagctcagtactgtagactttcttacctaccccttaccttttccttgaaagtaggtgctgttctttctgtcttcattttctgcaagaggaagctgaggctcagagagattgtgtggtggtttgccctaggtgacatgtttggagagagctgaccccacaggygtccccctaaactccttgcacctctgtttgaaatttaccccttcyccagaccccytcctcaaccctttctctcctagcrgggaccaagcttgacctctccctccccaaacccttctctactgcttcctctgctagccaggagtgatgccactgaccttcaggacttaggagatttaaagcaagccttggatgtgtagggctgtgaggcagctggagttgggaggcctcggcacagtctgtgccagcagctcactcccgtgccaggcacatggtggctggcagcctgtcaactaagccctgggcctgtttagcgtccatcaggagggcatcagggaggctgggatcaggagcccagctgccaggctctgcaaggatactggagggcagggaggagtcacagcagatggctccctgccatctgctctgcgtgcgttgtgcccctggccaaaccccctgggttatataaccctctcctctctccctgattgccctgccatcctggagacaggcagtgtaacagtggggcacttaagagcgtgggttctattgaactttcmgtcttacttgggcaagccttgatgtcctcagctgtaagagggatgtaatgacaagaggatctgataagatgttatgccttggtttgagcctggcatgtagtataatatatgcctaaccaagaccaagcttctcttgacctctcaccctgctcctgcccccttacctggggcagggggattgccccctttcccagctgccctctgccctggcctttaactttattgctccacctgtccttgggcccaggtggacaaggcaagcgtccggcatggcggagagaacgtggccgytgtgctgagggcccatggtgtgcggttcatcttcacgctggtcggtgggcacatttccccgctgctggtggcctgtgagaaactgggcatccgtgtggtggacacacgccatgaggtcacrgccgtctttgctgctgatgctatggcccgcctgtccggtgagggcattgcagagagggctggggactggttggactgtgggctagagtgtctgtgagggtaggggtttttcagaggtggaagaatggccaagagagtgggcatggctgtgatgggctctgtgttccagggacggtgggcgtggcggcagtgacagcaggccctggcctcaccaacacggtgactgcggtgaagaatgctcagatggctcagtccccartcctgcttctgggtggggctgccagcactctgctgcaggtacccagtccttgggggccagtgggggcctaggggggcttgaagggctcatgcgataaccctgccacacctctgtctttgccagaaccggggtgcgctccaggctgttgatcagctgtcccttttccggccactctgtaagttttgtgtgtctgtgcggagggtgcgggacattgtgcccaccctgagggccgcgatggctgccgcccagtcgggcaccccaggtaggtggaggatggtgatgctgagcagtgctggggccgaggggctggggacatgttatggactcagcrtcytccctgtccctgcaggtccggtgtttgtggagctgcccgttgacgtgctktacccctacttcatggtccagaaggagatggtgccagccaagccacccaagggcctcgtgggccgagtggtctcctggtgaatagccccacccctgccattccctcctttatyccccgttctctcctgcagcttccagcccacacccatcctcctttgattcacatgtggactgggaggagacagctggggggagagcattccaggtagaaggaacagcatgtgcaaaggtcctgaggcaggaatgaactgggtgggtrgggaaagcaaggcggccctcgtggaggcagcaaaggggagaggctcaggacagccctcctcctcctccttttccctttcttctcctcctccatcatctcttcttcctcctcttcctcctccctcttccttcctcttctcytccctttcccccaccacctttcccatcgtcctctccgttttcctcctcctaaaggatgatccttgaacctcggaagggaggttcattcttacatttacagaggaggaagctcagaaaggtgaagtcacttgcccaaagtcacacagctaagaagtggcagagcccaggccgggtgcggtggctctcacttgtaatcccagcacattgggaggccgaggtgggcagatcacgaggtcaggagatcgagaccatcctggctaacatggtgaaaccccatctctactaaaaatacaaaaaaaaaaaaaattagccgggcgtggtggcgggcgcctgtagtcccagctacttgggaggctgcggcaggagaatggcgtgaacccaggaggtggagcttgcagtgagccaagatcgtgctactgcactccagcctgggtgacagagcaagactccgtctcaaaaaaaaaaaaaaaagtggcagagcccagactcgagccctctccttcctcctcctttccttccctcacatctttgtccttttctttctttttttttttttttgaaacagattcttcgttctgttgcctaggcttgagtgcagtggcgtgatctcggctcactgcaacctccgcctccccctgggttcaagtgattttcctgcctcagccttctgagtagctgggactacaggcgcccgccaccacacctggctaatacttgtatttttagtagagacgaggtttcatcatgttggccaggctggtcttgaactcttaacctcaagtgatccaccctcctcggcctctcaaacattacagacatgagccactgcgcctggcctcttctcttcttcttcttcctttcctttcttctcctcctcctcttcctcttcttcctccttctctcccttcccctcagtcccttccctttgcctgtccttggcccttcctttccatacatttagcgagcggcagccatgtgccaggttccaggacaggcacggggcatcatcagtggacaaggtagtcaggctcctgtactccggatgtgtgtgaagcgcctgagggtcagctcaggcagtagtgattttgttctatggcctctttattttttttgagacggagtctcgctttgtcccccaggttggagcgcagtagtgcgatcttggctcactgcaacctccacctcccgggttcaagtgattctcctgcctcagcccccggagtagctgggaatacaggtgcagtccaccatacccagctaatttttgtatttttagtagagatgaggtttcaccattttggtcatatagcctcattcttaatgcactttgccccctggcttcccagtcagtccctccccttgttctccttgcccctctctcttgggctgcctctcacaaggctatctcttatcttgccttttttgttttgttttgttttgagacagggcctcastctatcacccaggctggagtgcagtggtatgatcatagctcaccacagccttgaactcctggcctcgagcaatcctcctgcctcagcctcccttgccttttctttacttgcggggcttcccacggttccatcctgggctgcttctgtgctgtcttggcctgtccttaacggtgaaagcagaggcttctgactctgagctccgactgtttcctgccaatgcccatgtgtctgtctttcgctggatagagcgccccctgaggggagggctgggcaggatctatctttgtgtctccagggccctgcacaggtccttcaggaaagttggggccctggggcccagtgagcaaggagaccgagaagaccctgtttgaagcaggagaggacagtgttcagaactcccatgcaaagcgcctcatgtcctaagtggacagatccttgaacctggggagggaggttcatatttacattgacagaggtggaagctcagaagggtgaagtcacttgccctaagttgcacagctaggaagtgacagagccaggacttgagctcacatctgttggacccacaggcttaatcctggcatgctgagcctgcgttccttgcttctggggggctacgtggagttggggtggaccccagaggctaccgagggcaaacaggcagttgaagacctggccactagggttcgtctgtccctgaggtgtcactcatccaccstgtccccatgccactttgctcctggcttttctcccggcccctttccttgctcagatcctggaatccttgtagttagttaattctggcaacttggtttcttccccctcccttttgcaggtatttagagaattacctggccaacctctttgcaggagcctgggagcctcagcccgagggaccgctgcccctggacatcccccaggcttccccgcagcaggtgaattgcctctcttttgtgtctgaggaccctaccctctccctgaggggagagggccccctgaccctctccctgagtcagtactggggccttaatcttgggtgctcatggcgactcaagggcggccctttggctggangcggtggctcacagcagcaatcccaacacttagggaggccgaggcaggcggatcacttgaggccaggagttcaagactagcctggccaacatggtgaaaccctgtctctactgaaaatacaaaagttagccaggcatggtggcacgcrcctgtaatcccagctactctggaggctgaggcgggagaatcgtttgaacctgggaggtggaggctgcagtgagctgagatcatgccattacactctatcctgggcaacagagtgaaactgtgtctcaaaaaaataaataaataaaaagacagccctttgatccccacctctcgctccaggttcagcgctgtgtggagatcctgagccgggccaagaggcctctgatggtgctggggagtcaggccctgctcaccccaacgtctgccgacaagcttcggtgagaagcgccagccctgcccttgttttcacgttcccagtccccagtcctcgggtgctcttggggaggcgggaggccccggccacactgacctctgctctgcctggactcccagggctgccgtggagaccttgggtgttccctgcttccttggagggatggcacgggggctgttaggccgcaaccaccccctccacatccgggagaaccgcagtgcggccctgaagaaggcggangtcattgtcctagcaggtgggcctgagcctcttcctttccctccttcccccaggaaccccctcaccctgttacccagcttcacayraaggaggaggaaggtctagtgggcacctattgtacttgatacacattttcacataaagcrctttgaacccaaccagacgcataataggtgtatcagatagctactgccctgtaacaaccatccccaaactcaatggctaaaaatgcatttctgatttctcaagayccacctataaggtaggtggtagctgtggttttggctgggctcattcatgagtctgcacttgggttaggcaggaaggcagctgtgctgatccaggctgggcttgctcacctgtatggggattggctggccctgcagctcgtctgggatggcctcagctggggtcatagagttcttcacccctgtctccatggcccccttgtttctcatcctccagtaggctagcctgggctggccgacttggtgaaggatgagaaaactatggggctaggagagtgcggttattcaagagagtgagtggaggctgtgtggcttcttgaagtagagtctgcaggaatggggggtgggggtcctgaatcatctggaggtgtcttcactcagaggtcttgcaattgacgccagctgttggaggggctgtggactagggcaactacacaggtctctatgtgtggctccggtttcctcccagcatgatggcctcagggtagtcagacttcttagacagagagcacattccttggccccacccaggcctctaaaagtgaacaaggaagaaactgcatatcttccttgttgggtgtcatggtgtgtcactttcaaggaaaggggacctaggctgcacctctctccatgggaggcatgtcaaggtgaccttgtacaaatggatgtagggtgggagatattatggccatctgggaaaatataacctgcctctgccctatcctgttggccaaagcatgtcatgaggccagtcccgattcarggggtgtggggagctgcaaggtcactgtaggtggcacaggtgcagggagactcggtgaggaacagggactcatttgcatccagtccaccacagtggatcaagtaaggtagacgacatggggcctctgcctactgcattcctgtcccccacaccaggaactgtgtgtgacttccgcctatcctatggccgtgtcctcagccacagcagcaagatcatcatcgtcaatcgtaatcgggaagagatgttgctcaactcagacatcttctggaagccccaggaggctgtgcagggtgagccccttaatccccccgtacacatatgtgctcctcccagtccctctcctcctggtttctgctgcagctggcttgagcctggtacagtgattgaggcccagaccttgccctaggggtagccagtcaaccagagacaaatagttggctctcaaactgatgaatgcttctttctttaaattttttttatttttattttttagagacgaggtctcgctctgtcacccaggctggaatgcagtagtgcaatcacagctcactgcaccctcaaactcccaggctcaaaagcaatcctcccacctcagcctcctgagtagctgggactacaagtatgcaccaccatgccaggctaatttgttaatttttttttgtggaatcagcatctcactgtgttgcccaggttggcgtggaactcctggcctcaagtgatcctcctgcctcggcctctcaaaagtgctgggattacagaccagagctactgcgcccggcctgatagatgcttctgtaggaacaratggtggggtggacacagagggaggcttgaaaacgtgcatgtgatcacgttccctcccacactgcccactgccctcaggacagagagcacactcgttggccccttagcctgtcttcctgccgtatctctcccctccccttattttagtccccttggacttgaacttggttcatcattctgaggatgttgactcccctgcagcctaggcgacaggacactcttgtattaagcagagaagtagcaccgttgcatctgtgttgggaaggtccactcagcagccatggacggcaggccggaagggggctgggtggaggccaggggggctgctcaaaatggccaggacagaagcgaggaggcctgaactggagatgaacagcggcagagcctcaccttctcagagcctccatttgatcatttgaaaaatggggtggtgaaagatacatcacggggctgtttgttagttcacttcagtaacgttcgctgtgcgcttccacgtgcctggatttgagagatgtgcttggtggatgtagctcttttcaytgagtgtttcccaggcagaagraggtggaggkaggggacgaggccagcttgggtttgtcacctgccttgtgctccttaacccttgtttcttgggccttgtcttcccttttcacctgggctgccctcccctggttctggcaggttctggggtgtttcacctgttttttttctaggagcacccctggcctgcttcccgtctgcctgctcggatgctgctgctggcttcctgctgttttgaggcctctgatgctggaagaacaggaggaagccagctccccacagctgtgtcctcttccttccccaggagatgtgggttccttcgtgctgaagttagtggagggccttcagggccagacctgggccccagactgggtggaggagctgcgggaagccgaccggcagaaggagcagacctttcggtggggcctgggtggagtggatgtgggaagggggttcccggcagaccctgctgccaaccctggtgaccttcgctgtcctgtcgcagggagaaggcagcgatgcctgtggcccagcacctgaacccagtgcaggtgctgcagctggtggaggaaacgctacctgacaactcaattctggtggtggatggyggggacttcgtgggcactgctgcccatctggtacagccccgcggccccctgcgctggctygatcctggtaaggaagggcccccgcctggggcagtgggcaccatccatcaggacgccttcacacccacctgctcttggtcctcttaggggcctttgggactctgggagttggtgcaggatttgcacttggggccaagctgtgccrgccagatgctgaggtgaggcactggagttgggagacttgctgctctctaggtcctgatccaccctaaccatcctgggtcccctcccgactaggtctggtgcctgtttggggacggagcttttggctacagcctcatcgaatttgatacattcgtcagacacaaggtgactgggctggcctgagggaagcttagggcctggggttctgggagatktcaccaggggtgggctgaggtggggagggagcctcytctctggcagaggccctatccctgtctctgtcctctggctggccaagccatggggctgaaggctgcggcctgccttcatcatcttcctgtagatcccagtgatggccttggtagggaatgatgctggctggacacagatttctcgggagcaggtgccctctctgggcagcaacgtggcctgtggcctggcctacactggtgagggggcctcagcgaggttgggaggacaggaggctgtttcagtcccagctgggcttgtgttcctctcctgggctggctgcatgtgcggtgggctgagtccttgccactatccgacttaatctcttcttttagattatcacaaggcagccatgggtctgggggcccggggcttgctgctctcacgggagaacgaggatcaggtggtcaaggtgctgcacgatgcccagcagcagtgccgagacggccacccggttgtggtcaacatcctcattgggaggacggacttccgygatggctccattgctgtatagggccttgtgggtcaggacgcttggctgccttcctgcccctggactgtgtccagctggtttggagtctcatcattgcttgccctgggcctatcccatgaggcccagtgactccacaacctccctgaggaggggatggaggggtcaaatctcaragaggctctcttgtgagctcttggaccctcctcttcacggacccaactgtgccgtttgtcccctctcttatggagactgaataaaccacctctggcccatgtaggcccaagtactcagtctcaraacctgtgcatatttatttattatccacaaagatggaggtgcggaaaagaagagggagacaggagggaaccgtactctcccactggaactctggggcccactgaggcaccattattggggatttcagggtggctgggcactgcaaactgctccctcctctgtggtccmtgaaagagccccacacgcctgcttcagacgtgtccacgcacaccagtcctcacagacacacacacacatgcatggaggcaataaatatgttccgtaccagactgcccccagcctgacgcttcagggggccccctccaaaagggaggggtttaagtgctcaatttttttcgggggggggggggcaaggggggggcaaggagatggggattggaaaggccagactctgttatctccatttgctgactagaggccaatcgtggggtcttccccggraaagggtaggggaaaccagctgtttctctataagccccaggctacccctgtgtccatgctggaacccaggataggggctgccccccacaaasagtgcctcatgctagtctttgtgtcgtccaagggagggagaaacagtgcagtgctcaaagctaatactgatttggttggcagcagcaagagggccgactagaggtgactcaccacaccagggtgatgctcacagtaactggtgttgccccggccaaggggaggcaagagaggccagcctagcaagcgcgagaactacctttttggcaacaaaaggggaagcccttggtgctcaggaaagatggtcacaaccgctggtccctaaaatccccaggccccagacttggcaactagtgtccaaataccgggccctggaaactgggaatgagtctcagccatacacgcgactggtcccgtggtaactcgctggcaaccaggagctcggcctgagcaacaggtctggctctccttggtcaccagggcaccgccttagccactgggcgcccggtccttactaaccggggtcccaccccgtcatctggctcagaggcacacgttgatttgcttggagagctctctctccagatccaggatgagggcgtcgaagtctttgagattcaggtgcgggttgaagggcgcatcgaagtcgtcttcgaagtcaccggtgaccctcggctcgccgacctcctcgtcctcgtcctcgctgtcactgcccgtcacgtggtcgtagtctggcccggacaggaaatcccgcccacagggcaggaagtcccgcccgcaaacgctccagtcgccggcgtagcggttgctcggggggctttcggggcctcctcgaccgcggggccgagtcaccacttcggggtctgccagcggcaggtgcagaggtggctgtcgtttgggtcgcaagtaaggcgcgacatctggagattgtcggggcaggcggggatctgaagggagacagggtaggtcatagaaagaggcgacagccgacctctgattggctgcttagggaactaggctcctgattggcctgtggaaagcggccttcgaccgtttcaggttttcactggcagagctaggactggttgcttaggcaactaggcctctgattggcatgtcaagaggcagggcctctgactgcatcaaagatgggtaggggcaggtctgtggatcatgcctggatcatgcctgtaatcccagcactttgggaggcctgaggcaggcggatcacttgaggtcaggagttcaagaccagcctggccaacaccgtgaagccccatctccactaaaaatacaaaaattagctaggattggtagtgcatgcctgtaatcccagcactttgagaggcctgaaatgggtggatcacttgaggtcaggagttcaagaccagcctggccaacacagtgaaaccctgctctacttaaaatataaaaattagccaggactggtggtgcgtgcctataatcccagctactcgggaggctgaggtgggagaatcccttgaacctgggaggcagaggttgcagtgagctgagatcatgccaccacaccccagcctgggctagagagcaagactccatctcaaaaaaaataaaaaataaaaataaaaagatgaatcagctctgtggggcaaggtgatttggtttataatcccagtactttgggaggctgaggcggaaggatggcttgagatcatgcgtttgagaccagcttgggcaatatagagaaaccctgtctttacaaaaaaatgaaaataaaaaaagacaaaacagacagattggttggatctgaactggttgctgaggcaaccaggtaccagtttactccatgagggggcgtagcttcaagcccaagacactgattggtcccttaaggtggcatcactgtagcagcctggctcagattggtggtgcaggccctgggcatgaactcacctggccaagactgcagcaggtagtgcagcacctcgatgtggtgcttgaagtccactgcactggcaaggcctgggccggagctgcgggcacgaggccttgtgggcgcctggcgtgccggcagcagcacaggcccgaagcacacggccaagttctgtggggtcatgcggttgtaggcatggaaggaggagacgaggcgcaggtggtccaggagaagcgtcagcgtggcctgggagagggttgagaggatgtaagtcagacaaagtcaggcccctgtggcacctacctgcaagagactaaggtggctagagtagggaagcaggttcacagtctcatagctgggatgtggtcgggttaagactattaatcattagatgttagtattatgagcctattttgttggagggaagactgaagccaaaggcaactaagcattggaaaagcagagctgccatgaatctcattttacagatgaagatattgaagcacagagagggatgggacttgtctaggttccctcagccaggaacctcccttgtaggttgaaagatcagcgttcagcctgcatttttgacacatcctggctgtgtgaccttgggcaactgtcacctgctttgggcctcagtttccaaatctatgaagtgggatgctaatagcacctatttcttggggatatgatgatgctgccagctcatgcccatctcaggcccaggcatgggtgaaacattctattggtatcagcccactctcaagtcccatcactcccaccaggcccaactcaccctttccacatctggcaggcagctgaggagccctcgggtgccctcagtggtggggggaactctgtttggggggtcccgggccatggcctccagtaccaccttatacaggggctgggtgatgagtggggtgggcaactctcgaagataatccttgaggatgcctgtgaacacagggtcccctctggtcagggcaccactggcttctaaggctaaggagggcacagctaagggggaagaggaggtgggtgaaagcaaggtcagataggaggactgaggtcccagaggagccccaaggccttgaagtgaggcattgaatgggggtgagcaggcaggggagagggggccatgctgaccagtgatgacattgatatcggggtacaggtcctcagataggcagaccgctgcactgtcccgctcaaaggcatcccgaagctctttcttcactgccgctgagccacaaagacggtacagtcccactacctgggggtgggaagagagagtgaatgtcttcttgccggggccacagactaatcagggcccagtggggtgagcactggaattctgggccaggcagcaatgggcattgtgggctgggaggttggaactaccttgacaacctggccttgtaaaccctctgcttggactacttgtcttggctgccatctcctttgacttaggaaactgacacttctttgaggaggctttccatgactaccccaggttttgttttaagctctcccagaccctaggtacaccccaccccaactccagtcccagttatagttttacatttgtgaatgactagagtcgtatcttttcccccatcagactctgagccccaggagggcttggatcctgtttttaaatcaatggatgacccatgggttctgcccagggtgctacagtcaagggggcgccttctgcccttgtctaggttgggattggagctaggagtggctcaggcctgggggtaggggtctggcatctgtacatagggtgtcctgaagagtggtctgaggtctgggggccagagggttggggtggggtgggtgctcacccgcagccctcggcgctcgatctgcccaacgcacttctggatgatgaggggcacctggccggggggccgctcccgctccaccagcagtggcaggggcagcccaaagacgcggggctcagctgtggcaggggcttcctgctgctccgacagggtcagcttggcatacagcagcccctgaggctccaggcgcacggccagctgttgggcctggcaccctgaggacacaagggggcctgagccgggtgtgctctgaagcttcatgtaccctggcctcgctgctccaggccacaccttccgcccggagcccagccccctaggcactctgcggggggtggcggtggggtttgggggtccctgcccctcctcccctgcagccgcatgtcctacctcggaagaccgtgggcagcagcacggtgccctgggcacagggccggtgccttctcacgccagggtcccacgcaagcaccagggcgcgcaggagcctggcggcctccagctccaggtggaaggtgtggtccagccgcaggaagtccggcccccctcgcagtggccctgttcgggccctggcctccccatccacttgcagtaggcagcagaggtccctgggggtggcccccggcgctggccgcagccccccgagaccgtacaggtgcaggctgaggcggccccagagtgcggccgggggtgcccgggctgcgggacccacctcgtagggccggaaggaggtgggtgatgggggcccagctgggcgctccggtgagtccccgtcgctgaggtaaccggccctcgggctccgggtgcccccaggccctgctgccggcccggggccccccacgctgctgtccaggtggtagcggctgatgacggagcccgcaggggcagccctctcgcgctccctgccagcccgggggcctcgcaggctcaggcggcgccgcagttccggcagcttcttcatctttatggagaggcgcctggcggggcccggggacttggtgcgggaggctttggttggggggctggcgggggctgcacctgtgtggagagcagacttcagggtccaggaacctgggcttaggggaggggggtgaggctggtgctcccctgaagggaaggagtgtgaggctggtgttcccctggcggggaggagggtgtgaggctgatgctcctctgggagcatctgacggggtggggatgtgaggctggtgctcccctgaagggaaggagtgtgaggttggtgctcctctgggaggagggagtgtgaggctggtgctaccctgaagggaagggatgtggagctggtgctcaccttggggaaggggatgggaagcttgttcttaccttggggggccaggccctctgactcagctgagccaggctgtggccccgggggctcaggtgctggaggtctggggtcttcctcagggatggggttgtaccagatctcgccggcgggctccccagtgccaggtaccccaggccctaaagaggtgtcctcagctggcttggccccacccagcacccatcggcggctactgggctccaggctttgcaggtaggctccccgtgcagggctccttgatgcctcggggctggagggcccctctgctccggcctgggacccttcgggagcctggggctctggctctggagggctgggctctgggcgctgggctgggtggcctggcagagagcaaggggagtgagacccacccagcccctcactgcctgcagagcagccctgtgcaattgatcagtgggtgggatgctgtgtacggccctggccggcccctgataagtcatggttccttggatcctgctgttttgtttggaataggcagccacaggctagcgatctcagttatcagcttagagcaccccctactcagtccctggcatcccaaaaggggactccatccctgcagcctcagggttctaagtcaggcttcctggggcccgtaggtactgcgttccagtctccacttcctctaccctctcaataaccgtggcatggagctttgcacctgcgtggccttgggcaagtcgcttccctctctgaggctcagtatcctcctgtgaaatggggggatgtgatttccatgtccagggaggcttccaggagccttttggaaaagtatacagcccacagcaggcactacgtgctcaggagtgaggagctgggttttctattccctgcagcacagtcactcccagtcccctgccccttttaccctccctcctgtcttccaaactctgtcgccatcctgggatgggcccttgtccctcagcccaggccagaccccccacgctcaatgctttgggacttccccttccctccctcctctcctgtctcatgtcctgggctgtttcct

SEQ ID NO: 95789 - DNA, 17508 bp, Homo sapiens
gaatttccagagtgatctattgtcaatatttgaagaaaatcttttctgagcgcacctaggtggcttctgactttgattttctggcaaaacattgactttccatagtgttaggggcggtggtggaggtgggatcagcggccaggggatgcctcagggcctggccctcctgcatgctatgcccggggcaggcctgacgggcagctgaggattgcagagcctgtctgccttacggccagtcggacagacgtcccgccacccaccacccctcacaggacgtccgctcagcacacgccttgttacgagcaagtgccggctggacccaagccctgcatccycacatgcggggcagaggcccttctctccgccaaatgtctacacagtatacacaggacatcgttgctgccgccgtgactggttttctgtccccaagaacgtgacgttcgtgatgtcctgcccgccgggagtctttccccacaccccagccatcgccgcccgctcccaggaggccagggcaggcctgcgtgggctggaggcgggcgaggccggcccaccccctcgctggcactgactttgccttgaacagaccccccgaccctcccccacaagcctttaattgagagccgctctctgtaagtgtttgcttgtgcaaaagggaatagtgccgtggaggtgtgtgtgtccatggcatccggagcgaggcgactgtcctgcgtgggtagccctcggccggggagtgaggccaccaaccaaagtcagttccttcccacctgtgtttctgtttcgtttttttttttcttttttttctatatatattttttgttgaattctattttatttttaattctctcttctcctccagacacaatggcactgcttatctccgaaatggtgtgatcgtctcctcattgagcagcggctgccaccgcgctgtgggtagtgtgtgaccgtggctgtactgtatagtgaacatagttggcatatctttgtttgaagtttgttggtgactccaccaaactggtgtgaaaaaagaaaaaagctcaaaaaaatccacaaaaagacaaaacacacaaaaaaaatcctgcctatattttactcagtttcaaactttattagtctatttttaattataaaaccagaaagctacaatttctttttctttcccctccaccccccccccccccacccatttgttggcttttttgttttttaatgtcagatctgttgagttggtttttttggttttggtttttgtttttgtttttgttttttactgagaaaggaagggccaagggatgaggtgggaaccgggccctgggggcgccacagactaaggcagagactcccctacctggcgcccagccccaaccagctggccgctcctgcccatgctttttttttttttttttttaaatttttataattggagcccctggtgaggttacgcgtgccatgagaacccactctacaccacgacgctggtgcctcagtgttggccaaactctggagtcactgactggtttgactttcatacggtgaatatgcatttggtctgtactgatcatggaataaacacatctctctttttttaatgctggcgtctccctgacatttctttgtgaaccaactgttgcctaggctaggcccaggggaccccctggaccccagaccacctctgtacaggaactactgccagggattacctagcccctctcctgtgacctgtccctgtctgccctgggcgggagccacgcagactcatagcaaccaccccaagctgaagctgtgacgcagagcccggtacccatccttgtggaccctggctgaggtggagggtgtgctctagcagaaccctggccagactccagacagtattcttcccctccaccctactccatcctgtcccccctactccatcctgtccccccactcaccaaaggacttgggccacttctcccaccttgcctgcctcaacctaactcctcctttcatttaagctcagggttaaccagatactcttagatataagtctacatcccccaaaataggatcctcaccccccatgcacatacacacacattcctgtccaagaaagcccacaggtggctgctctgcctgtgtgtccacttgtgtatgtacatgccccagccacaaggcacgggtgacgcccaagaagagcccctaagatgtaagatacaagtatataatttatatgtatgcagagacaaactgattgaaacatttctagcactgtttattctcctacatcccctctttttgacctgaaaggtcctttattgtctttggatctgccaaacctccctgtgagggtgtggttcaggcatccagccagaggtccccccacttcttcgatgtccatgcccactcaggcactttctcatataccactgtgccacttcaagtgtgacgtatttaggttctttggggtttcttccatctcatcccacccactcatttttgttccttgttttgttcagacacttccccagcctgggtccaactgctgagctggatagttttctctgcagcttcctgctgaagatttaactcagccatggccttctccacacctccctgatgggtgtctctctacctgggttgtaattagaactgggatctatttaatttctccagccatttcccaacccttcccacagtactagaaatcttagtcctataccagagtaagaggtgtgtacaagcccccactgtactgtatgcacggatcgcttggccaataattatgtcagtgaatctgagacttgtattaaacactttagacatttgtagaagggaattcgtagacttttcacttacatacgaaaggtttttttttttttttgtgcagttctcattgcaaaaataaacatttgtactgagtataaagttactctcctgtgatggctgctttttgtttgagggtagacttgggagaagcggggagatgagggcggggggtcagtgatgtgtaggagaggaagaagggaggttccccagacacccaccacccatgcgtccagattagcggagtcggttgggagagatcctgggaacatcaaattgtgagataattgatttaatggaaggtgtaaaagaaaaagctgccaggcacggtggctcacatctgtaatcccagcacttttgggaggccggggtgggaggatcgcttgaggtcaggagttaagagactagcctggccaacatggtgaaactcccatctctactgaaaaatacaaaaaattagcggggcgcggtagcacacacctgtagtcccggctactccggaggctgaggcaggagaattgcttgaacactggaggcggaggttgcggtgagccgagatcacaccactgcattccagcttgggtgatatggtgagactcccatctcaaaaaaaacaaaaacaaaaaaacccccaaagctttgatgtaggctaatcacacaacaaaagaaaggtagtggttaagtagtccagggagaacaaaagtttgtacactatgggcaatgtaatcatagtggtctattcggctcttgagatgcattgttcactgaggcagaacataaaccactattcacctttaagtggcaacttcatggacttagttatggtcccaggacagtataatgtttagcagccttgacagtacaaaggtatatggataaaagtgggaggtggaaaggggcaagaggtgacaagtggagtgtttttaaaggaaactaacagggaaacaaaaaacggcacgtccggggtagtgatgtgagcaagtcagtggctgatgtcatacattggttaagtcaagaaataaaggtcaggcacggtggcttgcatctgtaatcccactttgggaggtggaggcttgaggattgcttgaggccaggagtttgagaccagcctggacaatatagcaagtcgtctctctgaaaagtttttgaaaaattagctgagtgtggtggcacaggcctgtagtcccaactacaggttgtagtgcttgagcccaggagttcgaggctgcagtgagctatgatcgaaactccatctgaaaaaaaaagaaaaagctaaaaacgttccagtggctgcttccgggaggaaggggaggtgtagccacagatcgctgcctttttccctacatctttgcggatggctattttacaagatgtatgtcttcaggcaaatgacttcatcctcgaatttcaggttcatgatctatactacaggaatgtgattatgctacttagacttaatagggttgctctatggttaagtgatggctgtccctaaaatgttcaaggatatcgggagaaggttgcaaaataggaggaagaagctggctgcttttttttttttttttgagacggagtctcgctctgtcgccctggctggagtgcagtggcgcaatctcagctcactgcaacctccgcctcctgggttcacgccgttctcctgcctcagcctccctagtagctgggactacaggcgcccgccaccacgcctggctaattttttgtatttttagtagagacagggtttcaccatgttaggatggtctcgatctcctgacctcgtgatccgcccgcctcggcctcccaaagtgctgggattacaggcgtgagccaccgcgcctggccagaagctggcttcttgcagggacagcagggccgcaaggctctgtgactctaggccccatcacacccggccctgtcccacttcctctttcggccagaaccccagaactccagtcattcataggccgggtcctcctcgggggaaccaggcctgccccctaggaatcagggtatccacgcctcctcggcccgctctcggagcctgggcctcaacacctgcagattggctcccgggccaggacctgtcgcttgaacatcagtggccgccgccgtccaatcacagacgtacaggggcgggctggcgggcctgttgggccagcaggaggacggcgccgggccgaggccgctggacccgccgttggaaccacagctgggtgaagtcagtgctgctaggtctttggagccagaccgaagggagggtcgcgcgcccctgggtgggtagcaccaggcggcggccgtcggccgggcctcccgaagcctcctccagccgctaataccgcccgcgcctccctcctagtcctagacctggcattgcctgtccctcttcttcgtcttccagaccctcctgacccgccatattaggtcccggccccgccctccgtctcattgcccattgcccaccccaccccaccgccccctccccggcctaccgtcagctcattggcccaggctcccgccttcttcgcccaatgttaggcctcacctcctctaggatccaccctctccccgcccacccgcataagccaggcccaccattccaactctttctcctttttggcttgtaggccgcacctactctgcatatgccccgcccctcactccaggtgtcgcccacttaactgaagatccaggatcccctccttaaggtttgtctgggctcggaattgccttttttttttttcttttttgagacggagtttccctgttgtgacccaggctggagtacagtggcgcgatctcagctcactgcaacctccacgtcccgggttcaagcgattctcctgcctcagcctcccaagtagctgggactacaggcgcccgccaccacgcccagctaatttttgtatttttagtagagacggggtttcaccacgttgcccaggctggtctcgagctcttgatctcaggtgatccgcccgcctcggcctaccaaagtgctgggattacaggcgtgagccaccgcacccggcccggaattgccgcctttagaccctcacccacccgctgctgagtcttcctgggccccgccccggccctaagccccgcacaggacctgctaggccccgcccatttatttcccccctttccaacctcttcctccccagcctccgcaccctacccttgtttcctgtccctgtcgcgcccaggtgtttacctggcactcaggtgagtggtgcgctctggctgttttctgtcggagccgcccgcctcttccttcagcgcgtcccacaaatcccgacggcacggaggggccccaggccaagggcgatgggcccctgagccctgacaccgcttcgccgctgctgcaggtgcccctggccggcagcgccgccgtggtcccggagcgcggcgacatgccggagctggtggtgaccgcgctgctggcgccgtcgcgcctgtcgctgaagctgctgcgcgccttcatgtggagcctggtgttctcggtggcgctggtggccgcggcggtctacggctgcatagcgctcacgcacgtgctgtgccggccccggcgcggctgctgcgggcgccgtcggagcgcgtcccccgcctgcctgagcgacccctcgctgggtgagcacggtttcctgaacctcaaggtgatcgcacgggggcgctatcggggctgcggggtcgcgtggggtcgagacggttcaagcctcgggagagagggttccccaggcttcaggctgtgccctccccctagagctcgggcctgcgtctgcactatgtctcggctggacgaggtaacggacccctcatgctgtttctgcacggcttccctgagaactggtacgtctggggccaggggcctgaggcccacgggactcgggggcaggtggagcttgggctcccaagaggcagggaggagggctgtatagatcgggacaagctgaacatagatggggataggggtactgagccagcatacccaggatccctaggccctgaagggacaggacaaaggggtattgaggttgattgaagttccctggattcagggtgtagctggcttcagcctcagcctctgcctctgcctgggattccccatcctccttttaggggaagtttagagcaggaaggagggtttgccaatggttgctgatgtgcgtagggtgcaggtgcaacctgagggccctgactcagcctccctccctcgcccgcctggcaggttctcctggcgttaccagctccgggagttccagagccgcttccatgttgtggctgtggacttgcgaggctatggcccctcggatgcacctcgggatgtggactgctacacaatcgacctgctgctggtggacatcaaagatgtcatcctaggcctgggtgcagacatacccccatcctaggcgtggcctccctcmtcctgcacacacgcatacccccgctttctccttgctggaacctacttcccccatccctgcttcagtcctactgggcacctcacttatgcgagctccttgaattcccacaggttactcgaagtgcatccttgtggcccatgactggggtgccctccttgcctggcatttctccatctactacccatccctggtcgagcggatggttgtggtcagtggtgcccccatgtcggtgtaccaaggtgtgtgtgggagtccgggacrctgggatgtacttatgtgcaagggggcagggacatgtgtctgtgttttcaattctctrtatacctgtcaacacatcaggggctgagggtgcagcaatcaacccaggtcccttcggttgtggaactcctcattcggaaattaatgacacgccagacccagtggctcacacctgtaatcccagccctccgggaggctgaggtgggaggatcacttgaggccaggagttcaagaccagtctggtcaacatagcaagaccccaactgtctctacaaaaaaaaaaaaaaaaatgtaattagccaggcattggtggtgcatgcctgtaatcccagctactcgggaggctgatgcaggagaatctcttgaacctgggaggtggaggttgcagtgagctgagatcatgccattgcactccagcctaggcaacaagagcaaaactccatctcaaaaaataaataaataaaataaagtatggccaggcgtggtggctcctgcctgtaatccctgcactttgggaggccaaagccggtggattgcttgagcccaggggttcaagaccagcctggccaacatggtgaaaccccgtctctactaaaaatacaaaaaaatcagccaggcatggtagtgcacgcttgtagtctcagctactcgggaggctgaggcaagagaatcacttgaacctgagaagtggaggttgcagtaagccaagatcgcaccactgcactccagcctggatgacagagtgagactctgtctcaaaaataaaataaaataaaataaatcacaatacacttaggagtaatccacatttttttatagcacttacagtaacaaggaatatgcacacagtaacctacttaaggctcctgggcttatgaaggttgtattatccccatgttccagctggaggaaactgaggctggggaggttaacaatgtctatcatatcacctgatgttaatatgcagcactgtggtcataactgtgctctctctctctcttttgttgttttttttctttttcttttcttttcttttttttttttttttttttttttttgagacagagtcttgctctgtcgccaggctggagtgcagtggcgtgatctcagttcactgcaacctccgcctcccaggttcaagcgattcccctgcctcagcctcccaagtagctgggattacaggccaccatgccgggctaattttttgtattttagtagagacggggtttcaccatgttggccaagatggtcttgatctcctgaccttgtgatctgcccaccttggcctctcaaagtgctgggagtataggcgtgagccaccacgcctggccccttttttttttttttttcttgagatggagtctcactctgtgcagtgcagtggcgcaatgtcggctcacggcaacctccgcctctcaggttcaagtgattctcttgcctcagcctcctcagtagctgagactacagatgtgtgccaccatgaccggctaattattttgtatttttagtagaaatggggtttcagcatgttggccaggctggtcttgaactcctgggctcaagcgatctgccggcctcagcctcccaaagtgctgggattacaggagtgagccaccctgcctggcaacctctacctcctgggttcaagtgactctccttcctcagcctccagagtagcggggactgcagatatgccccaacacgcccagctaatttttgtatttttagtggagacgggttttcactatgttgcccaggttagtgtctaactcctgatctcaagtgatccacccgccttggcttcccaaagtgctgggattacaggcgtgagccaccgcacccagcctattattgtttacttgtctgtctccccatctagactgtcagctccctgagggcagggagttttttgtcttttgggggtgtctttttttgtgttttgttttttttcctttgagacagtcttgttctgtggtccaggctggagtgcagtgctgtaattgcagctcactgcagcctcagactcctgggctcaagcgatcctcccacttctgcttctcaagtagctgggactataggcacacaccaccacaccctgctaatttttaaaaaattattttttggaggccgggtgcggtggttcacgtctgtaatcccagaactttgggaggctgaggcgggtggatcatgaggtccggagatcgagaccatcctggctaacactgtgaaaccctgtctctactaaaaatacaaaaaaaattagccggacgtggtggcgggtgcctgtagtcccagctaccgggaggctgaggcaggagaatggcgtgaacccgggaggcggagctcgcagtgagccaagatcacaccactgcactccagcctgggcgacagagcgagactctgtctcaaaaaaaaaaaaaaaaaaaaaaaaaaaaaaaaaattatagatacaggggtttccttaagttgcctaggatgaacagggagttttgactgtctcattcactgctgtgtctagaacaaggcctggcatgcagtagttgctcaataaatgttagctgaataaagcagaggaaacgcaccctggcctgggcagaggaagcacacctttggatatgggggttcccaggagatgcccccatcctgtggatagtgaaacatggcaggagggaatgtagctggtgcccaggccaggaggggtatctagtaccttcacagacccaggcaggcagcagtggcattcctgaggcttgtgtccctgacctgggtatgtgtaggggtgcaggtgtatggggccaccccaggagcaggccttatatctctcccccaaccctcccaccccagactattccctgcaccacatcagccagttcttccgttcccactacatgttcctgttccagctgccctggctgcccgagaagctgctgtctatgtctgactttcaggtacagagggtgcaggttgaagggaggagggaagcaggtcggggctgggcaggctgggcactgaagccagagtcctgctgtgtacctagattctgaagaccaccctcacccaccgcaagacaggcatcccatgcttgacccccagcgagctcgaggccttcctttataacttctcacagcctggtggcctcactgggcccctcaactactaccgaaacctcttcaggtgagaccagttgccaagcataagctcaggagatttgcaggggcaggggggtgggaggcaaccatccttctgcctgtctgtctgcctgtctgtctgtcctggccacaggaacttccccctggaaccccaggagctgaccacacccacattgctgctgtggggggagaaggacacttacttggagctggggctggtggaagccatcggcagcygctttgtgccgggccgcttggaggcccacatcctgccaggcatagggcattggatcccacagagcaacccccaggagatgcaccagtacatgtgggccttcttgcaagacctgctggactagtggtccttgctggcctgcccaggaggcatggatactcaggaaggaacacacacccattatctgtgtgtgcctgggagtccatacaatgtccatacatgggtgaactcttgaatcgctcataggcatgggactcctggatcccacacaagcgcacctatgggtgcctcgggacacaccaacccctatactcacacacaggcatggatgcatgtgtgtgtaacaaacactttgaccctgggaactgggtatacctctcttccagtggagccagatgccgagaccgagtgtcccacctcctcccttcctggggcctcactctgcgctttgccaaagtcgcttctctgccatagctgcacagaccttaaaccctgaccttcctgtccctgccttcgacctcctgcctgggtcttcagctcagtgctactctgaatacaatactgctgaccacatttggctacttcarcttaaatgtatgttaattgaaatgaaatacaatgaaaatgcagtgctcagtcccaccagctgtatttcatttttttccccttgagacagagtcttgctgtgtcgcccaggctggatggagtgcagtggacgcaatctaggctcactgcaacctccacctgccgggttcaagcgattcttgtgcctcagcttcccgagtagctgggactacaggagcgtcaccaggcctgactaattttagtattttcagtagagatggggtttcaccatgttggccgggctggtctcgaactgctgacctcaagtgatctgcccaccttggcctcccacagtgctgggattacaggcgtgagccactgtgcctggccataccagctgtatttcaagtgctcaattgccgcatcagtgaagaaagttgtgtgtggcagcgctgatgagggtaatcctagcttaagagtaggggtcagggccgaccacagtggctcaaacctgtaatcccagcactttgggaggctgaggtgggcggatcacgaggtcaggagatcgagaccatcctggctaacctggtgaaatgctgtctctactaaaaatacaaaaaattagccgggcgtggtggtgggcgcctgtagtcctagctactcaggaggctgaggcaggagaatggcatgaacccgggaagtggagcttgcggtgagctgagatcgcgccactgcactctagcctggcaacagagcgagactccatctcaaaaaaaaaaaaaaagagcagggggcctccctgcctggcccctggcaacctccccaagggcagaccctcatgagcaggcaggtgggtgtgcagattcctcattcctctccagccagtcccaggagagctcccacaagccccttccctcaccccccgtcatgaccccaggcctggtcaggtcaagttctcttgccccagcctgggctggcctgtctcagatccctgggaaaacagctctcgtctctgttaggacaagtgagattctggattccgggcaggaagggaccagctcccagaaaagccatctgggatctgaggcctgcctctccagctcctggaaacttctgctccaaattagccacagtttccgctgactctggagccctctggggtggggatgggtggggggtggcggttatatgtggagggtgcgccacccagtctcaggctgaccgtagcatcagcttgtatctccctggcttgtgcctggctttttggggatgttgccatcatcacctgtaccatgaggactgagaggccctgagaaatacattctcctgtctctgagataggcctgcctgctggtcatccccctctgtcctcccttatccccagcacaatatcctttttttgtttgtttgtttgtgagatggagtcttgctctgtcgcccaggctggagtgcaattgcgcgatctcggctcactgcagccccctcccaggctcaagcgattctcctgtctctgcctcctgaacagctgggattacaggtgtccgccaccacacccagctcatttttgtattttttttttttttttttttttttgagacggagtctcgctctgtcccaggatggagtgcagtggtgcgatctcggctcactgcaagctccgcctcccgggttcacaccattttcctgcctcagcctcccgagtagctgggactacaggcgcccaccaccacgcccggctaattttttgtatttttagtagagacagggtttcaccgtgttagccaggatggtctcgatctcctgacctcatgattcacccgtctcggcctcccaaagtgctgggactacaggcgtgagccaccgcacctggcccatttttgtatttttagtagagatggggtttcaccatgttggccaggctggtctcgaattcctgacctcattatccgcccacctcggcctcccaaagtgctgggactacaggcgtgagccactgcgcctggcacaacatctttttactcaacatagataccaggcagtgttctaggtcctagtgacagagtgtgagccagaaagagtttaaggaggagagagctgacagggctcagggaaggcttcactgaagactcacaggtgggaccctagctagaggatgcacttatttgttgttgttttgagacagggtctcactctgttgcccaggctggagtgcagtggtgtgacgtaagctcacagcagcctctacctcctgggctcaatcaatcctcctgcttcagcttcctgagtagctgggactataggggcacaccaccatgccaggctaatttttaattttttttttgagaatggaggcttgctctattgcccaggcgggagtgcagtggcgccatctcagctcactgcaacttccacctcctgggttcaagtgattctcctgcctcagcctccccagtagctaggattacagacacacgccaccacacctggctaatttttgtaattttagcagagacggggtttcaccatgttggccaggctgatctccaacgcctgacctcaagcagtccgcctgcctcggcctcccaaaaattttttatagagacagacgtctcactatgctgcccagagtggtctcaaactcctcggctcaagtgatcctcccacctcggcctcccaaagtgctgggattccaggcatgagccaccgcgcccgtctaggatgcactttttggtggagtgggaagtagtgactaggaaggtcccaggcgggaagaagcttgggtcattggagttacaacacgcaggccagggccttgctaaggcagagtgagcgaggaggcttcagagaagaggccacacagccagatcgccaggggctgcgaggagcttggattcgattctcaaggggagccaggggagggttttcagcagggaagggacatggcttgcattttgaagagctccctgtggcggttggacagtcccacgcaagagtgcgagcgccgaagcctgcggggggctgcgcgcggccacagcacagggcggtcccactgtcccgaccgagcagggacccccagagccgggtccaacccggggcccccctgccaggggaggagcaatgccccccgccccggggaggcgagaagacgggcaggaggaggagggagcccctgagacgtggggtcgcggacgtcggagcccgcggcggaggtttggggcgaggaggcctgcggacaggaccaggacggcgtccaggggtaggtgggtccggcgatggttgccggggtgacgggggacgggttgatggttgaccggaacgggtagcggttgtccgagtgaccggaggggcccaggcaaaggctgacgggaggcctgggacagttgcccgggcgacggagatccgctgacggttgctagggcgacggaaaggcgccttcttccgcctccgcggccgccggcgggagggaggcgggggtcttctggggaagacgatcgcgtcgattgggcagagtcctggcgagtaagccaatagaaaatcgtgtctcgtcgtagacccgcctcccccagcctgagccaatcccggcccgttttttttttttttttctggcccaagggcttggcgcgtgcatcttttagggcgggagcggggacctcgggggcttgggctgggattcctcgcatgatcggcctgtccctctccctgcctccagaccactttccatcactcactcactcactcactcactcactcactcactcattccgagggctgcattgatggtccagtagtagaattctcacttcccattcattcattcatccattcatctgtccctgccaccagttctaggaggggtggtggaagacaaagccgggctctgacactgccagcagggtgtgatcaggccctggtggaatgagcaactggggaggagcacttacctgggggaagggagggaaggctccctggaggaagcagtcttggagctgaaccttgcaaagctgcgccccgacccacagaagcctcccacgccgggatgatttagcatttccgtgagactgggaggaaagtttgggctaggaagacgtgagactataaaaggcttcacatgccagcaggggagggtctcggacagatccgtgtgtctggaatgttacttgggggatggtgagaaggccggaccagaggacgggaaggcctcagaggaggatgggcgtggtccaggcagtggagaacgagactcaagtccaggcactggaagaggagcagatacgctgagaaggtacagaggcaggtttgggatatattcagtctgacggcgctggatcccggggtagggacttagaagcatgttatgggctaaagacaaaaatagcccagcaagcatcggtgtattgtggggcagagaggctcttaagctgggagcgagggtgaagtctccctagagcagaatggagaacaagactggagactgaaccctgaggacccccaacacctcagagacaggcagaggagagaggccacaaaggtaggaggtgaggccaggcacggtggctcacgcctgtaatcccagcactttgggaggccgaggcgggcagatcacaaggtcaggagatcgagaccgtcctggctaacatggtgaaaccccacctctaccaaaattacaaaaaattagccgggcatggtggcacatgcctgtagtcccagctactcgggaggctgaggcaggagaatcacttgaacccgggaggcagaggttgcagtgagccaagatcatgccactgcactccagcctgggcgagagagggagactccatctcaaaaaaaaagtctaggcacagtggctcacacctgtaatcccagcactttgggaggccgaggcgggaggaacacgaagtcaggagtttgagacaagcctgtccagcacagcgaaaccccgtctctactaaaaatacaaatattagccaggcgtggtggtgggcgcctgtaatcccagctactcgggaggctgaggcaggagaatcgcttgaacccgggaggtggaggttatagtgagccaagatcacaccactgcactacagcctggatgacagagctagactccatctcaaaaaaaaaaaaaaaaaaaaaggtaggaggtgaaccaggcaaaagtgatgccccagcaatggaggagggaggagcgtcaaggaatagggatgtagttcctggcgtcacaagctgctgagagacaagcgtggtggttcatgccttcaatcccagcactttgggaggccgaggaaggaggatcacggcagaccaagagttttgagaccagccttggaaacattgcaagaccccttgtctcttaaaaaaaaaaaaaaaaaatttaactgctgggcatggaggcgtgtgcctgtagtcctagctcctcaggaggctgagatgggaggatcgcttgagcttgtgaggtcaagactacaatgagctgtgatcatgccactgcactccagcctggagacagagcaagaccgtgtcttaaaaacaaacaaacaaaaacccaggccgggcgtagtggctcactcgtgtaatcccagcactttgggaggccaaggtgagcagatcacttgaggccagagttcaagaccagcctggccaacatggtgaaactccgtctctacttaaaaaaaaaaaaacacttagctgggcgtggtagcgggtccctgtagtcccagctactcaggaaactgaggcttgagaattgcttgaacctgggaggtggaggttgccgtgagctgagatcgtgccactgcactccagcctgggagacagagcgagaccttgtctcaaacaaaaaacaaaaaaccctaaaacaaaacaaaacaaaataaaacaaaaacaacctctgagataatcaagtgagagctatacaaatctccaagttatgagggaggaaagccaggagtgagactgaaggcagagggcttggctgctctgaatgaggttaagcagggaggggcaaggaaatattggaggcttggggaaaaacaactgaacacattcaaacagagtaatgcggtcaggcacccgggctcac

SEQ ID NO: 95790 - DNA, 24999 bp, Homo sapiens
cccaaagtgctggcatgagccactgcacctggcccactgcttctcatcttacaccctgttgggacttccagttctctctacaccccagtctagcagcttcttccagtccttcctaggcatagttcctattatttgctcatgggctggtttctggccaatgggactttctttcctggccatttggaagacckttgccttagatgagctcaatcgcccatgttctgtctttatttttcattttttatagagacagggtctcactatgttgcccaggctggtcttgaactcctgggctcaagcaatccacctgcctcagcctcctaaagtgctgggattacaggcatgagccatggtgtctggccacccgtgttctctttatttcttctctacaacaatattagagaaggtcacaaagcaggtcagatgggtgatatgtaaattccctcccacccacctcctgtgcaccacattctgcgcccagaccttcagcctgcttgctctgctgtcccctcaaagacagagttgccttcactcactccctttgtttctctgatcgcccctcacctgctctccaccccatcctgctgtcttgaggtgaccgtgaccctcaagcccccaaatcccatggacacctcccagccccaactcatctacctcccagcagctctctgaatttgtgactactcagtcattcccagtacctccttttttcttggttccaggacgttgccattccctggtctcctctgaccttcgtgtgctcccgtgtctctgctgttggctcctcactatggggagatcccccatggtcctagtcattcctccctcttgcctctctcctgaggtcacctccttacccagggctccagcttctaaattgaccatcggttccctctagaagtgagctctgagtttacatctcctgagctggaggtcattgcttctctcctctcggggtgggggtggtctcagaaacacttccattccgatcggtttgaatctgaactcatggcccccctccctacactgtcccccattttggtctagtccttcagtttcccagaccccacgctttggggtctcctgatgttctctttctctcatctgcacatcctgtccctcagcacgtctgctggtgctgcctggcacaatctctcctccgtcaattccttctctgagtcctcctgcctcccctggctccatcccttgccacctctctcctggatgcctcccacgggcgcctccctggtctccctgttgccgtgcccaatcctttcctccactctctcctcagtcccggacagrctttttccttccttccttccttccttccttccttccttcctctttctttcttcctttctttctttcctttcttcttttctttctttctctttctttctttttctttcttctttcttttctttctctctatctctttctttctcccttccttccttctttctctttctttctttctttttctgtctaaaaaaggaaaccatttataaaaattacagacaaaagcacacaaattacactacaaatccattagagatactatcaattggctaacaggcaaaagttttgcctacacagtttgaataaatagagacagaaattatcgacaaatttaagaaaatcgatgcaatctcataatcaataaagacaatttcagatgtgaccttttattttatttttttatttttttgagacagggtttcattgtgccgtccaggctggagtgcagtggcatgatctcggctcactgcaacctccatctcctgggttcaaatgatcctcctgcctcagcctccctagtagctgggactacaggcatgtaccaccatgcccggctaatttttgtatgtatatatatggtttttttcggagacagagtcttgctctgtcaccaagactggagtgcagtggcatgatctcggctcactgcaacctctgcctcctgggtttaagtgattctcctgcctcagcctctggagtagctgggattacaggcgtgcaccaccatacccagctaatttttttttttttttttttttgtatttttagtagagacagggtttcaccatgttagccaggctggtctcaaactcctgacctcaggtgatccgcctgcctcrgcctcccaaagtgctgggattagaggtgtgagccaccacacccggccaagatgttacttcttgactattacattgataaaggctttttaaaaacatataaggccttcagtgtgtaatgctgtccaccttcatacggagcagatatgcatgtggatatttataaaattcttcttcaaagtaattttgcagtatatatcaaaaacttcaaactataccaatgacttattttgaggacactatattcagttgataatcaggtatatgtaacataattacatgagacttccattgcatttgttatgctagtaataaatagtaaacatgttttcaaaactagtgaattaattatggtaaagccatatggaccactgcaagttccctgagagcaaaagtgacttcacctgtcctatcccctgctctatcacctgaatgtagaatgcacacagtctatcttgaataactatttgttgaaggaactgtatgaaaacattaatcattatgcttgtgaagactgattgaagaataattaaaacatcaagctacatgaaaacatgacacagatcttatagaatgagagctcaggttttaaagtttgttatttgcaatgaagtaaagagatgagatggctggtgcagtggctcatgcctgtaatcccagcactttgggaggccgaggcaggtggatcacctgaggtcaggagttcgaaaccagcctgaccaacgtggtgaaaccccatctctactaaaaatacaaagattagtcgggtgtgctgatgggcgcctataatctcagctactctggaggctgaggcagcagtatctcttgaacctgggaggcagaagttgcagtgagctgagatctatccattgcactgtagcctgagtgacaagaggaaaactctgtctcagaaaaaaaaaaaaaaaaaagatgagacctggacagacttttttgatagactgagccacttattgggaggcggaggttgcagtgagccaagatggccccattgcactccagcctaggcaacaagagtgaaattccatctcaaaaaaaaaaaaaaagtggctgggtctcattttcctctttattggtttgtgccacccaacatcatacgatctgtcatcagcaccacaggtgctcactcagaacacctggaagtgggtgctatggcagtgtccaaagcctgtgagccccttcttgcccagcttatgtgttgatcctgtaggacccaaggtccccgtggctctggacgcccttggtcatcttttatttctttcatttatttgccaatctccatcctagggatccttggagagactcagttgaggttctaccttggaggcacccccaatcttggggccacagaactagactgagacactccacatcctgtgtggtcagggctggcttgaaggagagatggactgtaggacccctgaggggaatcagggtttttgccaatggggcaggcaggcaggcttcctggaggaggggtttgtggamgtgggtctggaatgatgagtaggaatttttttaagcaaagaagagaaagagaaagataatttcatgtggaggttgggccaactcgaagacttggaggtgagagcaagcacctggcttttgagcagcaagaaagagcttggtgccaccagaacaattaggatgagaggcagaagaaagagggaggggaggagattgattctgaggacaatggggagccctggagggtgtgtgaacaggagaggggcaatatcagctgactggctccttccgttgccccacctggtttctctccctttttatcaagctcctttctatagcaacccttgcagaagtatctgcaattcaggttttgcttctagagagcccacactaagacagggccttatgattctccagtcattcctctcccactgacctgctacctctgctcttgttctctgactggcttctacccattttcttccacttccttctggatctcttctgggcatctccttcagtctttcccagctggctccagcctgggcacagttgtgggagtgatgggagtatgagacagaacattctcccatgaactcaaattcagggctatccttggggtgggatgtggagcctggtctgggggtggtgcagccaggcttgggagaaggggctgtgtctacatcttccccctgctaacttgctgcaaacctgggggtacctgtctagagctaggggcaggaggctgtgctgggactaggggacaggagagaaagttcaatggactgagattcattatgaatttgggataaacagcaagtggggtgaatggtcaagtgttggtggggagagacagggagagggatggagagttggacttgggagaaacagtgatagggaaaaagatgctcacacagagaaagagagagacagtgagagacagagtgagggagagagaggggagagggagagaaagacacagagaaagtgacacataaacagaaagtaaaagaaacacatagacacacatatctaaatctgtcattgatcatatctgtcatctatgtagccatcactcatacatctctctcatctatacctgtctctcttatctctctatccatctatcctatttatcatctatcgatctgtcacctacctttctctttctctcatctatctgtctatcgtattatctacctacctacctacctatccatccatccatcctgcctgtgcatccattcatccttctatctatcctatctatctatctatctatctatctagctatctatctatctatctatctaatctatcatctatccatccatccatcttatctgtgcatccatacatcaatccatccatctatcctgttatctacctacctacctacttatatacctacctcctacctacctacctacatatccgtccatccctcctatctgtgcatccatccatgtatcctatctatctatctatctatctatctatctatctatctactttttttttttcaagatggggtctcgctgtgtcacccaggctggagtgcagtggcgtgatcttggctcactgcaacctccacgtcctgagttcaagtgattctcctgcctcagcctcccgagaagctgggactacaggcatgcgccaccagacccggctaatttttgtatttttagtagagacaggggggtttcaccatattggtcagggtggtcttgaactcatgacctcgtgatccacccacctcagcctcccaaagtgctgggaatacaggcatgaaccaccgcacctggcctatctatctatcttctatctatctgcttgtatatctaccgactgaccaacctacctacccatttatccatccatccatccagcgatccatccatccatcctatctgtgtgtccatctgtccatttaacatctatctatctatctatctatctatctatctatctatctatctaatctatctatctatcatctccctccctccctccccacctacctaccaatccatccatgcatccacccatcctatctacgggtccatccaaccatctatcttattatctatctgtctgtctatctatctatctatctatctatctatctatctatctatctatccatccatccatccatcatctacatatctatctagagaaagacacagagagaggaagagagtgagggaacagagaagcacatagacacagacacagaaagagacaggcagagaccaatatttcaggtgaaagggctgagaagtttgggggtgtgtggtgggtaggggggtgcaatgggcartggtagcatctgaggscccctgccagcctggtgtcagccttgtctatccccagatgcggggcaatgaggaggacatgmggctgatggaggatctgggccactacttccgtgatgtccaactctggtggcttgggtctttctaccctgtcctgcatctcgtccaccctaygttcrctgcccctgtgctccaggcttcaggtatctttctcaggaggctatgctgcagcmtcttccctgcctctgctccctgccttcccaacctttggacaggccatgctgagcagaaaaatggacatatccaayagagaccatggctctgccactaacctgctgggtgactctgggcaggtccctggtgctctctggctcctgaggcctcttttagttctgaatgaagaaaactcaaccctgtgtggtcyaagcaaagaaacagaatgcattgactgtaaagtaaaagtcaggaagtaaaagtgaagtccaggaagggtggtcttcaggcatggctggatccaggccatcataatgccagtcttcatctcttagctttgtatccctctgtgatggtttcactctcatgctgctaaagataaatcccagaarctcaacccccatggaaaattccctgtagttccaggaaaatttccaggattcccctaaatttgcctggmctgggtcacaggaccaatttcttatccagtcactgcagcttgattgcataggtttaaggtcatatgctyagctctggagcaggggatgagaacccactcaactacttggattgagagtggggaaggcatgaggaggatggatgctggacgggcagataccaccattcaccagacatccattcaccagcatccctgtgagataggcatttcctgagtcagaaaactgaggygcagagaggtgcaatgacttctcaaggtcacacagcatatcgaggcctccctcttagttctttttgtaatttttttgagacagggtctcactcattaatgcttattgtggagtgtggcaggatactgaggaagcctaaatcaagcctaggttacatgtgggatgctaataggaccagatttaaatcctatctggggcccatctatagggcatgtggaagtcattttagactctctcaggtccatgtctgagcatgccacatcaggacaggtcatgtatattgtgtcaatgtcagaacatgttaacgcatctcaggctatgccacatatctcaggtccatgtcagaagatgtcagagagtactgggcagacagggtgtcctaggtccttttttttttttttttttggagacagcgtctcactctgtcatcctggctggggtgcagtagaacgatcttggctcactgcaacctccgcctccctggttcaagcaattcgcctcccgagtagttgggactacaggcrcccgccgccacacccagctaatgtttttgtattttttagtagagacggggtttcaccrtgttgcccaggctggttttgaactgctgagctcaggcaatccgcccacctcagcctcccaaagtgctagaattacaggcgtgatccaccgtgcccggctagggtgtcctaggtcctygtaaargcattttgtagagcgttgagctatgctcaggtgttgcagaacatgttggaccatgtaggagccatgtcaaggcgtrctggggtgtgctgtgccatgttgggctgtgtcattgttctactgcascgctgcagcctggtckggtccccagtctcctcccctgtcctccctccttcctttgcccttgaccctcttcctgctatgctgggcctggagggtggaagtgcaaatccctggctgggagcctccccctacactcaaagtccctcccctgcccctctycataacccctgatggtccttattcatgtcagctgctgttgcactcaaggatatgagtttctatggcttcctgaagccctggctgggtgagtaactagatgaatggggatggggacaaccttctggggccaggggaaggtgctgtccttgcccatggcccttggctgcctctactaggggatgggctcctgattagtgccggtgacaagtggagatggcaccgccacctgctcacacctgccttccacttcaaaatcctgaagccctatgtgaagattttcaatgagagcacgaacatcatgcacgtgagtgccacaaactcggatccsagctgggcccttggaaaaggagaagtgacctcagacagatctggtcygaaatgctggctctgctgggtggctttggtgccatagctcttcctccctaggccttggtttcttcatctgtaaaatgtggataataatttctacttaaagggtggtcaagatcttgtaccgaagtcatgttcttggcacatagtaggtgttcagaaggcattaattactagtctccctcacagaaaccttgcaaactaataaagacagttatgatgaaatttggataatggcagggcgcagtggctcactcctgtaatcccagcacttttgaggccgaggtggatcacttgaggccaggagattgaggccagcctggccaacgtggtgaaacyccatctctactaacaatacaaaaaaataattagctggtatggtggcgcatgcctgtaatcccagctacttgggaggctgaggcaggagaattgcttgaatccaggaggcaaaggttgcagtgaactgagattgtgccactgcactcctgcctgggcgacagtgagactacaagtccaaaaaaaaaaaaaaattgcatatagctttttctgcatagcaaaccactttaaaactcactggccctggtgggccaaccagacacttccatttgtcccttattttccaggaggctagcctgggttcactaccaccatggagcctgagtttcaagagagtgagcagaaacattttagtacctcctgatgcttagttcagaactagcacactagcatttttaccacattctcctggtgaaagccagtttcaagaycagctcaaatccaggagatggagactcaggctctgcctgcaaatggaaggaggtgccaagtctcatcgccaagggtgaggggcaaaaagttggggacatttctgcaatcacttgcctctgtgctaatgatgaggatgataatgatagctaacatttattgagcacttagtgtataccagaaactatatgccaattccatgatctatgttgtctaatttaatattcacaatcctttgaggtagagatgatcataattgccacattatggatgaagaaattgtgggtcagagagattagggagcttgcctaagtttayacagttagaaagtgagctaaaagtggtggagaaggggttctaacctggttatctggcaccaaagcagatcatcttgttttgcttttttttttgtttttttttttttgagatggagtctcactctgtcaccaggctggagtgcagtggcatgatctcagctcactgcaacctccrcttcctgggttcaagckattctcctgcctcagcctcctgagtagctggaattacaggcacctgccatcacatccagccattttttgtattttttggtagagacggatttcaccatgttggcccagatggtctcaatctcctgaactcatgatctgcccatctcaccttccaaagtgttgggattacacgtgtgagccactgtgcctgacccaaagcagatcatcttaactattactgaagatttgacaggggggacctaaagagggcagtgggytgaccaagggtacatagggcacagaagcagagctggaacttgaacccaggtcacccgaaccccagccttgggccttcatgtcctaatagtaacagcttctgtccctcacaagcttggtcctccttggggatgggtacccgggaaagacgactaggagttggttctgggggagtccatcctggaggttggggacgggaagggactcaggggagccagggctcagttcctgctctgtccccttctctggccaggccaaatggcaacgcctggccttggagggcagtgtccgtctggaaatgtttgagcacatcagcctcatgaccttggacagtctgcagaaatgcatcttcagctttgacagcaattgtcaggagtgagttcttccccaggacctgggatcttggccatggacccacaggagtaggttatggasagaggactgatcagggcatctgaagtgtcttcttggagaaaatgagtcagaattgagcatggaagtacagggaaggggagagagaaagatcagttctccaggtaggtagaagtgtttgggtaatggcaaggaggctaggatgagcagagcacgtgcaatggccatcaaggggacaccttggaaatgagattggaggggtcagcagtagctacaacttaatgacattgaaaagccatgcaaaggggtatgaacttcatccaaggctcccagggaatcatgggaggtatttgagaagatgagggtcatggtcagtgctgagcttggacgtttgactctgtggaagattgactgttatgtagacagaggaagcaaggagaccatggagaggaagaggcctgagcttggtggagaaaaaggggcagatttgagagaaaccaaggagaaataggcaggagcagatgttgtgtaagatgcccatgatggccaagctgtgccctggggcatctggggcaggaggcagctcacagagagtgggaggcagagagtgaagtgtgcttgcagggcacccttttctgcaccgaacgtggtcctgggattctggctagaaggtgctcccaggctttcatgtgtgtttagaagctgcttcctcttcctggcctgaccctgcgggaagcccagcgaatatattgatgccatcttggagctcagtgccctcagtctgaaacggcaccagcacatcttcctgctcacggacttcttgtacttcctcactcccaatgggcgacgcttctgcagggcctgtgacatagtgcacaacttcacagatgctgtcatccaggagcggcgtcgcaccctcactagccagggtgtcgatgacttcctgcaggccaaggccaagtccaagactttggacttcattgacgtgctcttgctggccaaggtgggctactctgggatctgaatttcagaagtagaatggactttgacgtgaaatgtcagatccatgaacttggacttgatccagagggcactggggagccatggaaggtgcttgaggaaaggagggacaagtaagatatattttagaggtgactckgtagaagagttcctagaaggagcaaacaggaggcaagagactgggaaagagtcctgctaggcaggtctaatgatgataagggaggaatcttgcctggaatatggatcttcatgaactgttttaggttagactcaggtgccttcatggctggtgtaatttagaggtcttgtcttgtctccaggatgaaaatggaaagaagttgtcagatgagaacataagarcggaggctgacaccttcatgtctggkggtgagrgtcccagggtgtgatgtcactaggggtaggagtgtctccattccagggatgtggtgagtggaccctggatcaccccatcccatcttccttccccacttccttctgagggcctcaatacatgggtgctgtccacccttgggtgctgaagcagcccagagacccaagcttacctggctgcccctcaggccatgacaccwcggccagtggtctctcctgggtcctgtacaacctcgcgaggtacccagaataccaggagcactgccgacaggaggtgcaagagctcctgaagaacggtgatcctaaagagattgaatggtgagtgtgcaggtcctcatgacctgttcctgagtccctctcattggtttagctcttcaggtgggaaagggagaaggtcttattggtgattgtgctattactgcctagtgggaattggtgcagagctcagaaacagggcctggtactcagcctggagcaaaggaaatgttgcaggatttttgcctttactatctattgcaattaaactcattcaattattttttcttttttgttacttctttcttttttcttttctttttttttttttttgagacagtctcactgtgtcatccaggctggagtgcagtggcataatctctgctcactgcaacctctgcctccygagttcaggtgattctcctgcctcagcttcctgaggacctgtgattgcaggcatccgccactatgcccagctaatttttgtatttttaatagagacggggtttcaccatgttggccaggctggtctcgaactccagacctcaggggattcgcctacctcagcctaccaaagtgctgggattacaggtgtgagccacagcgcctggccaaacctattcagttctaatagatattgccgaattgccttttagagtctctgcactgattaactctccagtgtgttgtagaactagttctctttgtttcctcctttttgatagctgcatagtgttctctcataaggatgtactgtaattcatcaaaacatttctccattgatggatatttgtgtgctttccaggcttttgctataactaacatgatgtagtgggcacccatgtacactgaccattgcttacatctgtgagcagctttgcagtaccaattctgagaagtgcagttggtgaactgaagaccatttgagattgacaattcaatagctcctacacacacattttgagaatgccttcctcacattctcccctaaagtgtctattatgaaactttaaaacatttgccaatctgatagatgcaacataatacttcaatgaacatcactttaagcctgggtaaagttgagcattgttttcacttactgaccatgggtatttcttattctgtgaagtgtttgcacaatttkttccttctagtttgggttttgtagtttttttcttattgatttataagcactgctcacagattaagaaaactagttctttttttctgttttgcaaagttctttttcagattgtctttgaattaattgttggttttcattcatttattttggcttgattaatttatttgcagtcaaattctttcctttatacgtgccgttttttgtttttttttattatttttattattttttttttgagacagagtcttgctctgtcacccaggctggacagcagtggcaccatctcagctcactgcaacctccgcctcccgagttcaagtgattctcctcctcagcctctcaagtagctgggattacaagtgtccaccactatgcccagctaatttttgtatttttagtagagatggggtttcaccatgttggccaggcctcaggtgatccacctaccttggcctcccagagtgctgggattacaggcgtgagccactgcgcctggccatgtttttgtttttttaaatcatgcatgggamattctttcatgctctaaaattaaaatgtaaaactcatgtttgttttcctctgatgggtttatttgtttttaaaatattttatttattattttagtttaaaaatatttattacttttttctctatgaagtctatgatagtataagaattgttgtaggaatgtattcattttcctccaaatggctagttgccccaacagaatttaatgaatattttgtatttgtcttacgattttaaataacagcagattcacaataagtgaaatttatttatatatttgggtctgtttcttgggctttattctgttccacttaatwttatttatttattyattyatttatttattttattttttttttttgagacagaatcttgctctgtcgcccaggctggagtgcagtggtgtgatcttagctcattgtaacytccayctcctgggttcaagcgattctcctgcctcagcctcccgactaactgggactagaggtgcacatcaccacacccggctaatttttgtatttttagtagagacagggtttcaccatgttggccaggctggtctcaaatttctgatctcaagtgatcygcccaactcggcttcccaaaatgctggggttccaggcgtgagccaccacgcctggcccagttaattatatagtcatacataagcatcaagatgtcttcatcattatactttaaataacactttcatatttgataaaggtgatcctattttattactttgcttttacaagtttttctttttttcttttcttttctttttttttttttttgagatggaacctcgctctgtcacccaggctgaagtgcagtggtgcaatctctgcctcctgagttcggctcactgcaacctctgcctcctgagttcaaactattctcctgcctcagcctcctgagtagttgggattacaggtgcccaccaccacgcccggctaatttttttgtatttttagtagagacagggtttcaccatgttggccaggctggtctcgatctcctgatctcaggtgatctgcctgcctcggcctcccaaagtgctggaattacaggtgtgagccactgcacctgrcctgagcacctcttcttattgtcccacttatgcctagtgttccattattggaatgctaagyatgtgggagttattcatattctactgctccaggtcattgccaaggtctgattttcaaaattcaaaaaattgaaacctcaggcataaatgggttaaatctcttatagacctcagggcatccatgatttcttagatcatattcttttctacttttctcttgggtcacctgttctttctcttgttattttgcaggaattccttgtattctagatattgtagaaacctttgaatctctcatctgaatgttcatttggtccatggtatcctgtgttacacataattccttaattttcatgcatatttatcctttttctttttgatcttctactttgtcctttygaggttttaagaattcccacccttaagtcacaaaagtgtttcttctgttatcttctcttaactttatagctttattcatctcatataggaagagattccatcctgtatatgaagtagacaaggatctggtttttttgttcccaaatttccaattgtttgaacatcttcctccaaatcatctatcaattgcccaggggtgtgtgggcccctctttaccagaagttgttaaattttcacctattcctgtgcctgactgcaagctctcttctctcttcctctggtccgttttcctgttcttgtagcagtaccagtcttttcttttcgtttcttttcttttcctttctttccttttccctccttccctccatctttctttctttccttccttctttctttctttccttctttctttctttcttccctccctccttctctctttcttccctccctccttctctctttcttccctccctccttctctctttcttccctccctccttctctctttcttccctccctccttctctctttcttccctccctccttctctctttcttccctccctccttctctctttcttccctccctccttctctctttcttccctccctccttctctctttcttccctccctccttctctctttcttccctccctccttctctctttcttccctccctccttctctctttctccttccttccttccttccttccttcctctctctctctctctcttgctttcttgctttctttcttggttttgctgtgttcccaagctggagtgcagtggtgtgatcatggctcactgcaacctccacctcccaagatcaaggggtcctcccacctcagcctcccgagtagccaggagtaaaggcacatgccaccacacccggctaattttttgtatttttagtagagacaaggtctcactatgttgcccaggctcgttgtgaactcctgggctcaagcagtctgcctgctttggccttccactgtgttcggattacagatgtgagccaccttgcccagcgcatttatcacctttttttttttttttttgacggagtctcagctgggctggtgagcagtggcgtgatctcggctctctgcaacctctgccttccggattcaagtgattctcctgcctcagcctccggagtagctaggattacaggcgcctgccaccacacccagctatgtttttgtatttttagtagggacggggtttcactatgttggccaggctgatcttaactcctgacctcatggctctcccgtggcggcctcccaaagtgctgggattacaagcttgagccaccacccctggccactttatcttttagaaaatattttatttcatttttatgctatacctttgtaatagatcataatatctggtaaattggatttatcttcttcaatcttttattttaattttatcttaactttttttttaagagatgggatctcactttatagcccaggctggagtgcattggcatgatcatagctcactgcagccttgaactcctgggcgcaagggatcctcacacctcagcctcctgagtarctgggaccacagrcatgcaccaccaggcctggtggatcttttattcttaaattgacctagcttttgatgaactttaattcttccaattagaataagatggttaagttccyacaaaataaaatgctagattttttattgaattgctttgaatatgttgattaatttagaaagaaatgagacctttataatattaagtcatctcattytagagtgttgaggggattttattgaaacaattttgtaatctttatagagattttcccctcgtctttgttagtatattctattattaatttgagacagggtcttgctctgtcacccaggctggagtgcagtggcatgatctccgctcactgcaaactccacctcccagattcaagtgattcttrtgcctcagcctcttgagtagctgggattacaggtgcatgccaccatacccggttaatttttgtattgttaayagagacggagttttgctatgttggccagggtggtcttgaactcttgacctcaagtaatcaacccgcctcagctttccaaagtgctagaattacaggcataagccacagcacctggcctcaktatatattttaaaacattttttaatgcaaataggttaacacttttaaggagaccctctatatgttgtgttttgcttagaaatgcttctaaaaataccatatcaagttttctaatacttttgcgactttggttttctcatgcttaaatccttgattcttctggaattcattttgttattggatttagggtcagagggaggttggaattgcctttgcaaaaattataactgaggacatmatgacagtgaaagagaacagacctaatcgactccatcttgcttgtaaccttcaagctgtctttgttcattcctgggcataggctgaactaactttgggaaggaattcagttcttggtttgagtctgaaaccaaattgataatagccctttcctgaaaacaccccctgtcttgataaatcggctctttctaggcagcaggcaaggtgaattcactgggcggttacaagttggtgygagggtctctctggactgcaggagggctgtgtttgccccctggataattgttgggtgttaccttagggatgacytggcccagttgcccttcctgaccatgtgcctgaaggagagcctgcggctgcattccccagtctccaggatccaccgctgctgcccccaggacggggtgctcccggatggccgggtcatccccaaaggtgcccacagttgggcaggcggggagggctttgggcagggtggaggtcccatcgtgtagtggagtccttgtcctgactgcacctcctccccgacagggaacacttgcaccatcagcatctttgggatccatcacaacccttcagtctggccggacccggaggtgctaccccttccsccttctccatcccggggcctggtcaggggaggggtcttttcccagggaagcagatactccctctctactccacccacatgtgtactttttttttgttttgttttttgagacgaagttttgctcttgttgcccaggctggagtgcaatggagcgatctcggctcactgcaacctctgcctcccgggttcaagtgattctcctgcctcagcctccctagtagctgggattacaggcatgtgccaccacgcccggctaattttgtatttttagcagagacggggtttctccatgttggtcaggttgatctcgaactcccaacctcaggagtttckcccctcagcctcccaaagtgctgggattacaggcatgagtcaccgtgcccggcttcacatctgtcttatatgcgggtggctgggtgtcctgagagacccccacccaacagccctaacttgcccacccaccaggtctatgacccctttcgcttcgacccagaaaatctccagaagacatcacctctggcttttattcccttctcagcagtgcccaggtgaggctaaggggcttctgaggcgggcatsgggtgagggtgccacaggtggaggcaaggtctgacttgtggggccacgtgttkcagggagtcgagggttttaataagatcccaggaaaagggggtgtgtgttctcagacttccccactcctacgtctgctggtctgggggctggagtctaagccaggctcggaggatatgcaagcccacatgggggtcccaggcacagagtccctctctctgcccctcmatcggatctgggtggggttgggagtcccagacgaggttcccggcgcgatggggccgggatgggggtcctgggcacagtcagagtccccaccccctcccccgggaactgcatcggccagacgttcgccatggctgagatgaaggtggtcctggcgctcackctgctgcgcttccgcgtcctgccggaccacgcggagccccgcaggaagytgsagctgatcgtgcgcgcggaggatggactttggctacgggtggagcccctgagcgcggatctgcagtgacccaccactgtcaggtctcagagccacccgcgccctcctcaggcacctttgcagattccggggaatcaayctgtgcctgagtcccacagacagccagcagggggcgtcggagaactgcagggatccagggcctggcgaggggaaggcggagtatttctgagccaagaccctgacagcctctctggttgagcacagtggccccgtgctgagggcgggttgtcccagagcgcaggtggggacagtatcctgtgggcgatagggagccatggcgggtgtttgagcaggagagggaccagggttgaggaggcacctatggggcaggtttgaggctctgagtcactgaggaaaaccagagcggcactacatccccgcccctcgatctcaattctcatctcctaatacatccagttgttttttttcctctcacctcagggttcttcaccgttttcattgttcttaaacgactgcacttattaaacaataataagcctggttgttttacagtgtgtctgatcattgaaagtacctgtatctattacaatgactgtcatttttgtcatggggtcagtgtttcggttatctttgcctggtattggctgccatatttgcatattagaaataatattcgtaggatttaaagaaggcagagttctctctctcttttttttttttctgaaacagagtcttgctctgtcacccaggctggagtgcagtggcaagatctcggttcactgcaacctctgctcctgggttcaagcgattctcctgcctcagcctcccaagtagctgggactacaggtgactgccgccacccccggctaattttttttttctttttttttgagacggaatctcactctgtcgccctcgctggagtgcagtggcgtgatctcggctcactgcaagttctgcctcccgggttcacgccattttcctgcctcagcctcccgagtagctgggactacaggcgcccgccaccacgcccggctaattttttgcatttttagtagagacggggtttcaccatgttggccaggctggcctcgaactcctgacctcaagtgatccgcctgccttggcctctgaaagtgctgggattaacaggcgtgagccactgtgctcagccagaagaaggcagctttgtctagggagcagtctttggaggactgctggttgaggtttatgttcatgaccctctaggcttgtggtgaccaaggtcacccaggaggtttaaatttaagctgaaatcacacttgcaagctgttttgctttatttttttctcactctgagagatgtagccctttgaggtctccacatatgcaaggaggggatttttaccattttccctccttgtatcacacctaggcttagaattttttttttcctgcaatcacaaaaccgttaaaagagtttcaaattttcctgatttgagaaatgccttcagagagaaggtatagtttatattcactttatctctaggtttctgttattatttgaatcatgtttttgtgatttttcactcttctttttttaaaaaaattattttattttaagttctgggatacatgtgcaggaygtgcaggtttgttacataggtaaatgtgtgccatggtgatttgctgcaatgtgactgcagcaatgtgatttgctgcatggtgatacctacccatcacctaggtattcagccccacatccattagctgtttgtcctgatgctctccctcctcctgcccccaccacaggccccagtgtgtgttgtacccctccctgtgtccatgtgttctcattgttcagctctcacttatgagtgagaacatgcagtgtttggttttctgttcctgtgttagtttgctgaggataatggcttccagctccatccacgtccctgcaaaggacctggtcttgttcctttttatggctgcataatactccatggtgtatatgtaccacatttcctttaaccagtctatcactgatgggcatttgggttgattacatgtcttcgctattgtttcactgtcttttcatgtcatttatttatatgaagaattgaagaagcatctacctttttttttttttctttttttgagacagagtctcattccattgcccaggctggagtgcagtggcttgatctcggctcactgcaacctccacctcccggattcaagtgattctcctgcctcagcctcctgagtagctgggattccaggctcctgccaccatgcctggctaatttttgtatttttagtagagatggggtttcaccatgttggccaggctggtctcgaactcctgacctgaagtgatccgccmaccccagcctcccaaagtgctggggctacaggcgtgagccaccacacccagctgcatccagctttttaaaaatgctggaattttgatccaaataacttagtttgctattaatggaagcaacaagtgtaaaacagaatgttaaattgtcatgatccagtgattgctccactctgggatgcgttagaactgataattgctattaaatttatagatttccacaccacacaagcccacatcaaaatgtgaagcagagtaccgcacatcaaggccgagtgcagtggctcattcctgtaatcccagcactttgggaggccgaggtgggtggatcacttcagatcaggagttggagaccagcccgaccaacatagcgaaaccccatctctactaaaaatgcaaaaatttgctgggcatggtggcaygtgcctgtagttccagctacttgggaggctgaggcagtagaattgcttgaacctgggaggtggagattacagtgagctgagactataccactgcactccagcctgggcaacagagcgagactctatctcaaaaaaaaaaaaaattaaaaaaagaactgcacatcacccagaaatcctggactttgagctggctggagggagcagatggaatttggatttgatttggcctcttgattgatctctgttttcagaacagaccccayggtcacgttccagctcctctcactctgctaatgtctttcattactgccaccatctgacttgcacttatgcaacccaactcttccccttctggagccaccttcctcttgctccctttcactaagatgtcccaacgggccatgttgcccaaccyggataaaaggtggccgctcacttcccctttcagaagccgactcttgtccgtttctctccaccataccctgccctctgacttaggcctgctcttacctttgggggatgcggcctcggtgtgttcatttgtaaatggcaagattgatgggcctgttcacaagggcagtgggatggtgcacaggacacactagtacagagcctggtgcagaagctgctcccaggtgggagccaccatcctgatggacagttagggtcacctctgctcctctgcaggctgctgagaagggaaggttcctatgtatagacccttttccatgagaggaactgaagcccgggtggaccagccagaacatgaaaggatttggggaccagccctagcgcatatcctgaggccacactgctgcccacaaactgcccttgtggagcccactccatatgactctccatgggctggaaccactctcaggaaaagaatacatttcctctcaagccaaaacagacctctctgttggcagacagtgtgtcttctccctctgccctggaatgcacccttggggcttggagatgtccctgatacagaaggaacaggaggaagcagagcttccctttatccatgcagaatctagacactgtttactgctgaggctgcaccacagccagaggctgcaggcagacctgcgatcttagtcagggttctccttagaatcagaatcaatagaatatatctctatctatgtttgtatctatccatctatctggaaagggaggtagagtgaatagggaatttattacaggaatcgtctcttgtgattagggaggctgagaagttctacaagatgctctctgtaagctggagaactagggatgcctggtggggtagctgcatctgagtccaaaggcctgagaacctggagttctcatgtccaagggcaggagaagatggatgtcccagctccagaacagagagcaaattcaccctctgcctttagatctatccatggagttgcagcaaactccttcaaagagtgacttatctttgcagagtcaaaggttgttttttttttttttttttttttttttgagacggagtcttgctctgtcaaccaggctggagtgcagcggcgcgatctcggctcactgcaagctccgccttctgggttcacgccattctcctgcctcagccttccgagcagccgggactacaggcgcccgccaccacgcccggctaattttttgtattttttcgtagagatggggtttcaccgtgttaaccaggatagtctcgatctcctaacctcgtgatctagcagcctcggcctcccaaagtgctgggattacaggcgtgagccaccgcggccggccagtcaaaggtttcttttcccactccacctaggctttcagcttcctctaaggggagtgatggtttatgaaagagagagtgagtggggaggcagagggccagtgggcctctaggattctgctacacctgtgtatgtaattctagaaacattctcagggctgtgcgcagtggctcacacctgtaatccaaggactttgggaggccaaggcgggtggatcacgaggtcaggagttcgagaccagctcatccaacatggtgaaaccccgtctctactaaaaaatacaaaaattagccaggcgtggtggtgcacgcctgtagtcccagctactcgggaggctgaagcaggagaatcgcttgaacctgggtggcggaggttgcagtgagccgagatcctgttactgcactccaggctggcaacagagtgaaactccacctaaaaaaaataaaaataaaaataaataacaacaacgacaacaacaacaacagcaacaacaaaacgtactcaggcctgctcaggcctggtcttgtcatcggttgctgtggggcctccttcctctcttgaatgtgaaggaggcaccactggacagtttggggagaacagactcccaggtgtctggattattagtttgtctctgtgtttgtttgtgtgtgtgtgacagagagagagagagagagaggatgtgtgtgggtgtgcgattgtaggtgtgtgtgtgactgtatctgtgggactgcattcacagcgtgtgcaagtgtgtttgtgagtgtatgtaattgtgtgcatgggtggctgtgatcacatgtgcatatgtctgtattacaccgtgttggcgactgagtgtctgagtgtggtatgcatgtgtgagtgtgtgtatgttgttgtcactgagccactgtagctgtctacaccaggctgtgttcctattcatgactggagccactatcacagccactgtccttgaccccaggcctgacccttgcagtgcaggcagcacattctcatgcccttgaccccacatctgacccttgcaatgcaggcaacacattctcatgccctygaccttacatctggcccttgcagtgcaggcagcacattttcatgcccttgatcccatgtctgacccttgcagtgcaggcagcacattctcatgtccttggaagcagccctcaacaatgggtggtgagtattggtgggtaaatgccccagctccttttccctgagtgggatgactctgaggtgcatgttctatgctgtctcccagaggtgccatggagggctgagccttggctgcccatggtggaaactattttaaataagttccttttaattgctacatttcctttcctgtctcagttttcagctgtcctactggtgtttcctggacttacctcccaaacaaacaactggcagttgaaatttggtcacctctaaataaattatttgcacttgaatccttgcatcagggtctacttccaggaaacccaaactaa

SEQ ID NO: 95791 - DNA, 20028 bp, Homo sapiens
ccacgccccatgcccatagccttgaaaacagcctaatttattattccctttgcacatgaaacagaggcctagacagaatgtctgtgtttggagtccaccagaagccaaccttgagacaaggattcaagtatttaggaaataaacaggaaatactgtaagtggggtggatatgtgggagagggaagggaaggaagtcagcaaagagtgtattgataagcaggtttctacagtggacagctggagctcaatcccgtgggtgaacactaggggtcagtgtagaacatgaacctcaatcatccaacacaagggtgagggagctggggtatttatccatcaactccccttgactaccacagaggtgctgagctctgcccaaaactgacaggaaatggtcttttggtctttcaactaattggtctatatgtgtctggggctggttaatccaccaggtaccaaaagcacagcacatcagacctgcagccaatgagaacatttagggraaagaaaacacacacgtggccaggtgcagtggctcacacctgtaatcccagcactttgagaggccaaggaagaaggatcgcttgaggtcaggagtttgagaccagcctgggcaacatagcaagatcctgtctctacaaaaaaaatttaaaagctagctgggtatggcagtgcatgcctataggcctagccactcaggaggctgaggcaagaggattgcttgaacccagaagttcaagtctgcagtgagctatgatcacaccaatgcacaccagcttgggtgacagagggagattatgtctctaaaaataataaggccaagcacggtggctcacacctgtaatcccagccacttggggggccaaagtgggaagatcacttgagcccagaagtttgagaacagtctaggcaacatgatgagaccctatctccacaaaaaaatagaaaaatcagcctgtggcatggtggcacatgcctgtagttccagttgcttgggaggctgaggcaggaacatcacttgagcctaggaggttgagggtgcagtgagttgtggtagtgccactgcactacagcctgagcaacagagcaagaaaaataaataaaataataataataaagtaaataaaaataacatgaaaataatttttaaaaaatttgagacagagtcttagtcacccaggctggagtgcagtggcacgatcttggctcactccaacctctaccctctgggttcaagcgattcccctgcctcagcctcccgagtagctgggattacaggtgcctgccaccatgcctagctaatttttatatttttagtagaaacggggtttcaccatcttggccaggctagtcttgaactcctgacctcgtgatccacccgcctcagcctcccaaagtgctgggattacaggcatgagccacagtgcccggccatgaaaataaatttttttaaaagaaaagaaaatgggccaggcacggtggctgacccctgtaatctcagctctttgggaggccaaggtggatggatcacaaggtcaggaaatcgagaccatcctggccaacatggtgaaaccccatctctactaaaaatataaaaattagctgcacgtggtggtgtgtgcctgtaatcccagctactcaggaggctgaggcagcagcatcgcttaaaccagggagtcacaggttgcagtaagccaagatcgtgccactgcactccagcctgggcaacaaagcaagactatgtctctataaaagaaaagaaaagaaaatgtacgcatacaggctctaaaatctgtacagcaactagcaaaatccacaggaataagcatacaaacatcattatgaaacttagaattcataaccatttcattacatacaatttgcagataatctgttctcacttatggaaatttctgattgctaagaaagaatcagagccaatggtgaattaaataggctacatgcaggcaaataaagacaacaggaaaagtacaaaaactcaaaaagatttacacaaaataataataataaatatttatgtggtatgtgggtgtcatatgggtggggctaagggttgctctcactcccatgtcagaccccagctcctctgagactctgaaataccccattgggaccttagtcctgcagcctctaccctcaacttgtaaacaggtattgtcttgacccctgacttctttccccattgtcaatagctgcctcaaagacatctgcgcagggatctcatagggaggagggtgcactccacccttttacagactgatgccccccaaacacacatatccaagaaaagtgaacagcacctaggagaactgtatatcaacagttgtataatgagtataccaatatatgcataatgagagtcccagaaggagagaagtgaaaggagcagaaagaatatttgatgaggctgggtatggtggttcatgcctataatcccagcactttgggaggccaaggtgggcagatcacttaaggtcagaaatttgagaccggcctggccaacatgacgaaaacccatctctactaaaaatacaaaaattagctgggcatggtgacaggcacctgtaaccccacctacttgagaggttgaggcaggagaatcacttgaacccagaaagcagaggttgcagtgagccaagaccatgtctctgcactccagcctgggcaacagagtgagactccatctcaaaaaataataataataatatttgatgaaataatggccaaaaaacttcccagaagcccagaattgatgaaagacatgaatctacatatccacaaagctcaacaaactccaagtacaataaacacagagaaccacacaaagacacattaaaaccaaacacacacagcctcctcgtccaggcctcttggacaccccctcctatacagacctccatcacctgacacctgatctcctacctgaatattcagcagtgaacaacatagacaagcatcacttgatcacttggtggagacccagtctggacgaggaggcagataaactagaacaaaccactgggactgttaaattcaagttgtggcaagtgttagaagaaaggaaactgagtaatgtgatactgactagacagaggtggtggacagaaagggtctccctagaaggtgccattggacctaaaggatgagagagaggtggcctcagaagaaccagggcttcccaggcagaaggaaccatgtgtgcaaaggacctgaggcagaaatagcttgatatgaaggagaaccagaaaggaggccatggtgagtgaatgggacagccaaagagatgaggctggaagtcttgtgagaccatgctgggaatctgaattttattctaggtgaggtgagcagtcataggaacactattcagcaggatggtgccacaatctgatttcagttttaagtccactgtgggtaatatatggagaatgaaatgtagggctaagacaggttatattttcccagatggccacaatatctcccaccctacatccacttgtacaatgtcaccttgacatgcctcccatgtagagaggtataatctgtgccccctttccttgaatctggtggcagaagtgacacagcatgacactcaaggctgggtcagaagagatgcaacttcttccttgttcacttttagagggctgggtggctgtctaagaagtctgactaccccaagaccaccatgctggaaggaaacccgaaccacacggagaggcctgtgtagctaccctggtccacagccccagcaacagctggcgtcagttgcaagacctctgagtgaagacacctccagatgactcaggaccctgccattttttagtcaccctctagcctaagtctcccctgtccaaactgaaccacagcatctgtgagcatcatgtaaaccaaaaggtatctcagataagtctcaataaatttagaaagcttattttgccaaggttawggacatgcctgtgacacagacttagaagctcctgacaacataaactagggtagtcagggccactaccttgattcaggtctgtaatcctagctacttggtaggccaaggcgggcagatcacttgagaccaggagggttttttgttttgttttgtttttttgttttgtttttttgagacggagtttcactcttgttgcccaggctggaatgcagtgacacaatattggctccctgcaacctccgcctcccgggttcaagagattctcctgcctcagcctcccgagtagctgggattataggcatgcaccaccacccccagctaattttgtgtttttagtagagaaggggtttccccatgttggtcaggctggtctcgaactcccaacctcaggtgatccgcccgccttggcctcccacagtgctgggattagaggcgtgagccaccgcacccagccgagcccaggagtttgagaccagtctgggcaacatgatgagactctatctctacaaaaagtagggaaattagccaggtatggtgacacatgcctatagtcccacttgctcgggaggctgaggcaggagcatcacttgagcccaagaggctgagactgcagtgagctgtggtggtaccactgcactccaccttggtctagttttatatattttagggagacatgagacagcaatcaatatatgtaagatgcacatgggtttggtctgggaaggcaggacaactcaaaagtagggagaaggcttccaggttataggtggataagagagaaacaattgcattctttcgagtttctgactagcctttctgaatatgcaatttacagagatagtcacttatgccttagtctggcttagtgaaacaaataggtaaggaagcgatcagatatgtgtttgtctcatgtgagcagagggacaattttgagttctgcctgtccttcatccataaggaatttccttgtaggcaaattgtgggggaggtatgtagctttttttttcttttcttttcttctttttttttagacggcatcttgctctgatgaccaggctagagtgcagtggtgcaattttgattcactgcaacctccacctcccgtgttcaagcaattttcctgcctcagcctcccaaatagctgggattaccagtgcccacccaccatgcctggccaattttttttctttttcatatttttagtagagatggagtttcaccatgttggccagcctggtttcgaactcctgacctcaagtgatccgtcgcctcagcctcccaaagtgctaggattacagaagtgagccaccgcgcccagctagcttttttaaccttgtagctatcttacttaggaatagaatgggaggcaggtttgtcctacacagttaccagtttgacttcttccttttggctcagtgatttggaggtctcaagatttattttcctttcacaatcacgacatggttgttttacatcattacgtttggggatggtttgtcaaacagcagtagtaattggaatttggaggtgagagaattgagtggggaaagagtggcatggggagaccaaggaagaagcttggggtggggtgggtagtggggacggtcattgaaacgaatgacactacggcttgcaccaggttgaagcagtacctggcaaggagagagaggatacgtggaggctgcgatttggagacagacccaagagaacttcctggatgccatcacccagagtcccatccagggagggtgggtgaggtggaagacaagggatcgggcctgcgccacgatcgtcacgtcccatcgaagctggagcggatccgggcacccggagcccccattccaacccctcccggccccaggcaactacatctcccagcatcgcccgctcgggccgcgggaaaggggaaaaaaaaaaaaagtttgggccaagcattcccggaatgtgcttcctgctggcgcggggcggggggcgggcggggaggcccgggcggggcggggagggcgcggggcggcgcggccggagcccggggcgcgcactcggctcggcccggcccgggccgcagcatggccgagccgctactcaggaaaaccttctcccgcctgcggggccgggagaaacttccccggaaaaagtcggacgccaaggagcgcggtaagcggagatcggtggggaacagggggcgccgagccccacccggcctgggagcggggtcccagggccccgaggacagacggtgggggggatcagggggagccccccgcaccccgctgcagactggggtgcctccagccaggggagggtaggggtcctggaaggaaggggctgggagggaggggggcgcggaccgttatgtgctgctggccggggatgccagcgctgcgggctccttgggaggcccgggagggggcctcgcccacgacaggaaatggggccgcgactgagggcctggagggtggaggggaggaggggctgggaggccgggacactggggcccagtcgggctgggcaaggggcatcgggagccctggaggcgcaggatgggagatgggaggcgtactcctgcaaaggaaagagaggggcggcccgtcaatcagagtagctgccccctccgcctcccacctactaacagtgacggcaactgcgcctgccttagccccaggaaactgtcccttttatacagatggggaaactgaggcacggagcaattgggtcatgtgcccagggccatcgacttaaacagctctttggactatgctacaaacagagaccctagagggtggacatcagaggtggccagaggaggagttcagcagggtagcaagtaaaaaccttagagaaacagctgcgtgggatagggggacccaggaaggaaggagttaaaggaggaaggccagaccattccatggrcgtaccccttccccccaggccttcccaaagattcccaatgttcccagggaagggagaagggacagagatgcccaaacacaaacacacacaggaaacagcccaggacatgagacaggagaggagggagggaaggggaagtcccaaagcattgagcgtggggggtctggcctgggctgagggacaagggcccatcccaggatggcgacagagtttggaagacaggagggagggtaaaaggggcaggggactgggagtgactgtgctgcagggaatagaaaacccagctcctcactcctgagcacgtagtgcctgctgtgggctgtatacttttccaaaaggctcctggaagcctccctggacatggaaatcacatccccccatttcacaggaggatactgagcctcagagagggaagcgacttgcccaaggccacgcaggtgcaaagctccatgccacggttattgagagggtagaggaagtggagactggaacgcagtacctacgggccccaggaagcctgacttagaaccctgaggctgcagggatggagtccccttttgggatgccagggactgagtagggggtgctctaagctgataactgagatcgctagcctgtggctgcctattccaaacaaaacagcaggatccaaggaaccatgacttatcaggggccggccagggccgtacacagcatcccacccactgatcaattgcacagggctgctctgcaggcagtgaggggctgggtgggtctcactccccttgctctctgccaggccacccagcccagcgcccagagcccagccctccagagccagagccccaggctcccgaagggtcccaggccggagcagaggggccctccagccccgaggcatcaaggagccctgcacggggagcctacctgcaaagcctggagcccagtagccgccgatgggtgctgggtggggccaagccagctgaggacacctctttagggcctggggtacctggcactggggagcccgccggcgagatctggtacaaccccatccctgaggaagaccccagacctccagcacctgagcccccggggccacagcctggctcagctgagtcagagggcctggccccccaaggtaagaacaagcttcccatccccttccccaaggtgagcaccagctccacatcccttcccttcagggtagcaccagcctcacactccctcctcccagaggagcaccaacctcacactccttcccttcaggggagcaccagcctcacatccccaccccgtcagatgctcccagaggagcatcagcctcacaccctcctccccgccaggggaacaccagcctcacactccttcccttcaggggagcaccagcctcacccccctcccctaagcccaggttcctggaccctgaagtctgctctccacacaggtgcagcccccgccagccccccaaccaaagcctcccgcaccaagtccccgggccccgccaggcgcctctccataaagatgaagaagctgccggaactgcggcgccgcctgagcctgcgaggcccccgggctggcagggagcgcgagagggctgcccctgcgggctccgtcatcagccgctaccacctggacagcagcgtggggggccccgggccggcagcagggcctgggggcacccggagcccgagggccggttacctcagcgacggggactcaccggagcgcccagctgggcccccatcacccacctccttccggccctacgaggtgggtcccrcagcccgggcacccccggccgcactctggggccgcctcagcctgcacctgtacggtctcggggggctgcggccagcgccgggggccacccccagggacctctgctgcctactgcaagtggatggggaggccagggcccgaacagggccactgcgaggggggccggacttcctgcggctggaccacaccttccacctggagctggaggccgccaggctcctgcgcgccctggtgcttgcgtgggaccctggcgtgagaaggcaccggccctgtgcccagggcaccgtgctgctgcccacggtcttccgaggtaggacatgcggctgcaggggaggaggggcagggacccccaaaccccaccgccaccccccgcagagtgcctagggggctgggctccgggyggaaggtgtggcctggagcagcgaggccagggtacatgaagcttcagagcacacccggctcaggcccccttgtgtcctcagggtgccaggcccaacagctggccgtgcgcctggagcctcaggggctgctgtatgccaagctgaccctgtcggagcagcaggaagcccctgccacagctgagccccgcgtctttgggctgcccctgccactgctggtggagcgggagcggccccccggccaggtgcccctcatcatccagaagtgcgttgggcagatcgagcgccgagggctgcgggtgagcacccaccccaccccaaccctctggcccccagacctcagaccactcttcaggacaccctatgtacagatgccagacccctacccccaggcctgagccactcctagctccaatcccaacctagacaagggcagaaggcgcccccttgactgtagcaccctgggcagaacccatgggtcatccattgatttaaaaacaggatccaagccctcctggggctcagagtctgatgggggaaaagatacgactctagtcattcacaaatgtaaaactataactgggactggagttggggtggggtgtacctagggtctgggagagcttaaaacaaaacctggggtagtcatggaaagcctcctcaaagaagtgtcagtttcctaagtcaaaggagatggcagccaagacaagtagtccaagcagagggtttacaaggccaggttgtcaaggtagttccaacctcccagcccacaatgcccattgctgcctggcccagaattccagtgctcaccccactgggccctgattagtctgtggccccggcaagaagacattcactctctcttcccacccccaggtagtgggactgtaccgtctttgtggctcagcggcagtgaagaaagagcttcgggatgcctttgagcgggacagtgcagcggtctgcctatctgaggacctgtaccccgatatcaatgtcatcactggtcagcatggccccctctcccctgcctgctcacccccattcaatgcctcacttcaaggccttggggctcctctgggacctcagtcctcctatctgaccttgctttcacccacctcctcttcccccttagctgtgccctccttagccttagaagccagtggtgccctgaccagaggggrccctgtgttcacaggcatcctcaaggattatcttcgagagttgcccaccccactcatcacccarcccctgtataaggtggtactggaggccatggcccgggaccccccaaacagagttccccccaccactgagggcacccgagggctcctcagctgcctgccagatgtggaaagggtgagttgggcctggtgggagtgatgggacttgagagtgggctgataccaatagaatgtttcacccatgcctgggcctgagatrggcatgagctggcagcatcatcatatccccaagaaataggtgctattagcatcccacttcatagatttggaaactgaggcccaaagcaggtgacagttgcccaaggtcacacagccaggatgtgtcaaaaatgcaggctgaacgctgatctttcaacctacaagggaggttcctggctgagggaacctagacaagtcccatccctctctgtgcttcaatatcttcatctgtaaaatgagattcatggcagctctgcttttccaatgcttagttgcctttggcttcagtcttccctccaacaaaataggctcataatactaacatctaatgattaatagtcttaacccgaccacatcccagctatgagactgtgaacctgcttccctactctagccaccttagtctcttgcaggtaggtgccacaggggcctgactttgtctgacttacatcctctcaaccctctcccaggccacgctgacgcttctcctggaccacctgcgcctcgtctcctccttccatgcctacaaccgcatgaccccacagaacttggccgtgtgcttcgggcctgtgctgctgccggcacgccaggcgcccacaaggcctcgtgcccgcagctccggcccaggccttgccagtgcagtggacttcaagcaccacatcgaggtgctgcactacctgctgcagtcttggccaggtgagttcatgcccagggcctgcaccaccaatctgagccaggctgctacagtgatgccaccttaagggaccaatcagtgtcttgggcttgaagctacgccccctcatggagtaaactggtacctggttgcctcagcaaccagttcagatccaaccaatctgtctgttttgtctttttttattttcatttttttgtaaagacagggtttctctatattgcccaagctggtctcaaacgcatgatctcaagccatccttccgcctcagcctcccaaagtactgggattataaaccaaatcaccttgccccacagagctgattcatctttttatttttattttttattttttttgagayggagtcttgctctctagcccaggctggggtgtggtggcatgatctcagctcactgcaacctctgcctcccaggttcaagggattctcccacctcagcctcccgagtagctgggattataggcacgcaccaccagtcctggctaatttttatattttaagtagagcagggtttcactgtgttggccaggctggtcttgaactcctgacctcaagtgatccacccatttcaggcctctcaaagtgctgggattacaggcatgcactaccaatcctagctaatttttgtatttttagtggagatggggcttcacggtgttggccaggctggtcttgaactcctgacctcaagtgatccgcctgcctcaggcctcccaaagtgctgggattacaggcatgatccaggcatgatccacagacctgccsctacccatctttgatgcagtcagaggccctgcctcttgacatgccaatcagaggcctagttgcstaagcaaccagtcctagctctgccagtgaaaacctgaaasggtcgaaggccgctttccacaggccaatcaggagcctagttccctaagcagccaatcagaggtcggctgtcgcctctttctatgacctaccctgtctcccttcagatccccgcctgccccgacaatctccagatgtcgcgccttacttgcgacccaaacgacagccacctctgcacctgccgctggcagaccccgaagtggtgactcggccccgcggtcgaggaggccccgaaagccccccgagcaaccgctacgccggcgactggagcgtttgcgggcgggacttcctgccctgygggcgggatttcctgtccgggccagactacgaccacgtgacgggcagtgacagcgaggacgaggacgaggaggtcggcgagccgagggtcaccggtgacttcgaagacgacttcgatgcgcccttcaacccgcacctgaatctcaaagacttcgacgccctcatcctggatctggagagagagctctccaagcaaatcaacgtgtgcctctgagccagatgacggggtgggaccccggttagtaaggaccgggcgcccagtggctaaggcggtgccctggtgaccaaggagagccagacctgttgctcaggccgagctcctggttgccagcgagttaccacgggaccagtcgcgtgtatggctgagactcattcccagtttccagggcccggtatttggacactagttgccaagtctggggcctggggattttagggaccagcggttgtgaccatctttcctgagcaccaagggcttccccttttgttgccaaaaaggtagttctcgcgcttgctaggctggcctctcttgcctccccttggccggggcaacaccagttactgtgagcatcaccctggtgtggtgagtcacctctagtcggccctcttgctgctgccaaccaaatcagtattagctttgagcactgcactgtttctccctcccttggacgacacaaagactagcatgaggcactstttgtggggggcagcccctatcctgggttccagcatggacacaggggtagcctggggcttatagagaaacagctggtttcccctaccctttyccggggaagaccccacgattggcctctagtcagcaaatggagataacagagtctggcctttccaatccccatctccttgccccccccttgcccccccccccccgaaaaaaattgagcacttaaacccctcccttttggagggggccccctgaagcgtcaggctgggggcagtctggtacggaacatatttattgcctccatgcatgtgtgtgtgtgtctgtgaggactggtgtgcgtggacacgtctgaagcaggcgtgtggggctctttcakggaccacagaggagggagcagtttgcagtgcccagccaccctgaaatccccaataatggtgcctcagtgggccccagagttccagtgggagagtacggttccctcctgtctccctcttcttttccgcacctccatctttgtggataataaataaatatgcacaggttytgagactgagtacttgggcctacatgggccagaggtggtttattcagtctccataagagaggggacaaacggcacagttgggtccgtgaagaggagggtccaagagctcacaagagagcctctytgagatttgacccctccatcccctcctcagggaggttgtggagtcactgggcctcatgggataggcccagggcaagcaatgatgagactccaaaccagctggacacagtccaggggcaggaaggcagccaagcgtcctgacccacaaggccctatacagcaatggagccatcrcggaagtccgtcctcccaatgaggatgttgaccacaaccgggtggccgtctcggcactgctgctgggcatcgtgcagcaccttgaccacctgatcctcgttctcccgtgagagcagcaagccccgggcccccagacccatggctgccttgtgataatctaaaagaagagattaagtcggatagtggcaaggactcagcccaccgcacatgcagccagcccaggagaggaacacaagcccagctgggactgaaacagcctcctgtcctcccaacctcgctgaggccccctcaccagtgtaggccaggccacaggccacgttgctgcccagagagggcacctgctcccgagaaatctgtgtccagccagcatcattccctaccaaggccatcactgggatctacaggaagatgatgaaggcaggccgcagccttcagccccatggcttggccagccagaggacagagacagggatagggcctctgccagagargaggctccctccccacctcagcccacccctggtgaaatctcccagaaccccaggccctaagcttccctcaggccagcccagtcaccttgtgtctgacgaatgtatcaaattcgatgaggctgtagccaaaagctccgtccccaaacaggcaccagacctagtcgggaggggacccaggatggttagggtggatcaggacctagagagcagcaagtctcccaactccagtgcctcacctcagcatctggcyggcacagcttggccccaagtgcaaatcctgcaccaactcccagagtcccaaaggcccctaagaggaccaagagcaggtgggtgtgaaggcgtcctgatggatggtgcccactgccccaggcgggggcccttccttaccaggatcragccagcgcagggggccgcggggctgtaccagatgggcagcagtgcccacgaagtccccrccatccaccaccagaattgagttgtcaggtagcgtttcctccaccagctgcagcacctgcactgggttcaggtgctgggccacaggcatcgctgccttctccctgcgacaggacagcgaaggtcaccagggttggcagcagggtctgccgggaacccccttcccacatccactccacccaggccccaccgaaaggtctgctccttctgccggtcggcttcccgcagctcctccacccagtctggggcccaggtctggccctgaaggccctccactaacttcagcacgaaggaacccacatctcctggggaaggaagaggacacagctgtggggagctggcttcctcctgttcttccagcatcagaggcctcaaaacagcaggaagccagcagcagcatccgagcaggcagacgggaagcaggccaggggtgctcctagaaaaaaaacaggtgaaacaccccagaacctgccagaaccaggggagggcagcccaggtgaaaagggaagacaaggcccaagaaacaagggttaaggagcacaaggcaggtgacaaacccaagctggcctcgtcccctccctccacctccttctgcctgggaaacactcaatgaaaagagctacatccaccaagcacatctctcaaatccaggcacgtggaagcgcacagcgaacgttactgaagtgaactaacaaacagccccgtgatgtatctttcaccaccccatttttcaaatgatcaaatggaggctctgagaaggtgaggctctgccgctgttcatctccagttcaggcctcctcgcttctgtcctggccattttgagcagcccccctggcctccacccagcccccttccggcctgccgtccatggctgctgagtggaccttcccaacacagatgcaacggtgctacttctctgcttaatacaagagtgtcctgtcgcctaggctgcaggggagtcaacatcctcagaatgatgaaccaagttcaagtccaaggggactaaaataaggggaggggagagatacggcaggaagacaggctaaggggccaacgagtgtgctctctgtcctgagggcagtgggcagtgtgggagggaacgtgatcacatgcacgttttcaagcctccctctgtgtccaccccaccatytgttcctacagaagcatctatcaggccgggcgcagtagctctggtctgtaatcccagcacttttgagaggccgaggcaggaggatcacttgaggccaggagttccacgccaacctgggcaacacagtgagatgctgattccacaaaaaaaaattaacaaattagcctggcatggtggtgcatacttgtagtcccagctactcaggaggctgaggtgggaggattgcttttgagcctgggagtttgagggtgcagtgagctgtgattgcactactgcattccagcctgggtgacagagcgagacctcgtctctaaaaaataaaaataaaaaaaatttaaagaaagaagcattcatcagtttgagagccaactatttgtctctggttgactggctacccctagggcaaggtctgggcctcaatcactgtaccaggctcaagccagctgcagcagaaaccaggaggagagggactgggaggagcacatatgtgtacggggggattaaggggctcaccctgcacagcctcctggggcttccagaagatgtctgagttgagcaacatctcttcccgattacgattgacgatgatgatcttgctgctgtggctgaggacacggccataggataggcggaagtcacacacagttcctggtgtgggggacaggaatgcagtaggcagaggccccatgtcgtctaccttacttgatccactgtggtggactggatgcaaatgagtccctgttcctcaccgagtctccctgcacctgtgccacctacagtgaccttgcagctccccacaccccctgaatcgggactggcctcatgacatgctttggccaacaggatagggcagaggcaggttatattttcccagatggccataatatctcccaccctacatccatttgtacaaggtcaccttgacatgcctcccatggagagaggtgcagcctaggtcccctttccttgaaagtgacacaccatgacacccaacaaggaagatatgcagtttcttccttgttcacttttagaggcctgggtggggccaaggaatgtgctctctgtctaagaagtctgactaccctgaggccatcatgctgggaggaaaccggagccacacatagagacctgtgtagttgccctagtccacagcccctccaacagctggcgtcaattgcaagacctctgagtgaagacacctccagatgattcaggacccccaccccccattcctgcagactctacttcaagaagccacacagcctccactcactctcttgaataaccgcactctcctagccccatagttttctcatccttcaccaagtcggccagcccaggctagcctactggaggatgagaaacaagggggccatggagacaggggtgaagaactctatgaccccagctgaggccatcccagacgagctgcagggccagccaatccccatacaggtgagcaagcccagcctggatcagcacagctgccttcctgcctaacccaagtgcagactcatgaatgagcccagccaaaaccacagctaccacctaccttataggtggatcttgagaaatcagaaatgcatttttagccattgagtttggggatggttgttacagggcagtagctatctgatacacctattatgcgtctggttgggttcaaagygctttatgtgaaaatgtgtatcaagtacaataggtgcccactagaccttcctcctccttcgtgtgaagctgggtaacagggtgagggggttcctgggggaaggagggaaaggaagaggctcaggcccacctgctaggacaatgacrtccgccttcttcagggccgcactgcggttctcccggatgtggagggggtggttgcggcctaacagcccccgtgccatccctccaaggaagcagggaacacccaaggtctccacggcagccctgggagtccaggcagagcagaggtcagtgtggccggggcctcccgcctccccaagagcacccgaggactggggactgggaacgtgaaaacaagggcagggctggcgcttctcaccgaagcttgtcggcagacgttggggtgagcagggcctgactccccagcaccatcagaggcctcttggcccggctcaggatctccacacagcgctgaacctggagcgagaggtggggatcaaagggctgtctttttatttatttatttttttgagacacagtttcactctgttgcccaggatagagtgtaatggcatgatctcagctcactgcagcctccacctcccaggttcaaacgattctcccgcctcagcctccagagtagctgggattacaggygcgtgccaccatgcctggctaacttttgtattttcagtagagacagggtttcaccatgttggccaggctagtcttgaactcctggcctcaagtgatccgcctgcctcggcctccctaagtgttgggattgctgctgtgagccaccgcgtccagccaaagggccgcccttgagtcgccatgagcacccaagattaaggccccagtactgactcagggagagggtcagggggccctctcccctcagggagagggtagggtcctcagacacaaaagagaggcaattcacctgctgcggggaagcctgggggatgtccaggggcagcggtccctcgggctgaggctcccaggctcctgcaaagaggttggccaggtaattctctaaatacctgcaaaagggagggggaagaaaccaagttgccagaattaactaactacaaggattccaggatctgagcaaggaaaggggccgggagaaaagccaggagcaaagtggcatggggacagggtggatgagtgacacctcagggacagacgaaccctagtggccaggtcttcaactgcctgtttgccctcggtagcctctggggtccaccccaactccacgtagccccccagaagcaaggaacgcaggctcagcatgccaggattaagcctgtgggtccaacagatgtgagctcaagtcctggctctgtcacttcctagctgtgcaacttagggcaagtgacttcacccttctgagcttccacctctgtcaatgtaaatatgaacctccctccccaggttcaaggatctgtccacttaggacatgaggcgctttgcatgggagttctgaacactgtcctctcctgcttcaaacagggtcttctcggtctccttgctcactgggccccagggccccaactttcctgaaggacctgtgcagggccctggagacacaaagatagatcctgcccagccctcccctcagggggcgctctatccagcgaaagacagacacatgggcattggcaggaaacagtcggagctcagagtcagaagcctctgctttcaccgttaaggacaggccaagacagcacagaagcagcccaggatggaaccgtgggaagccccgcaagtaaagaaaaggcaagggaggctgaggcaggaggattgctcgaggccaggagttcaaggctgtggtgagctatgatcataccactgcactccagcctgggtgatagagtgaggccctgtctcaaaacaaaacaaaacaaaaaaggcaagataagagatagccttgtgagaggcagcccaagagagaggggcaaggagaacaaggggagggactgactgggaagccagggggcaaagtgcattaagaatgaggctatatgaccaaaatggtgaaacctcatctctactaaaaatacaaaaattagctgggtatggtggactgcacctgtattcccagctactccgggggctgaggcaggagaatcacttgaacccgggaggtggaggttgcagtgagccaagatcgcactactgcgctccaacctgggggacaaagcgagactccgtctcaaaaaaaataaagaggccatagaacaaaatcactactgcctgagctgaccctcaggcgcttcacacacatccggagtacaggagcctgactaccttgtccactgatgatgccccgtgcctgtcctggaacctggcacatggctgccgctcgctaaatgtatggaaaggaagggc

SEQ ID NO: 95792 - DNA, 58080 bp, Homo sapiens
  misc_feature (1)...(58080): n = A,T,C or G
ggtggacgcaggatgactagctgggaggctgctgcagtcttgccacgagagaggttgggcgagtcagtggtgggtggggacggcgggggagcaaccaggggttggttctggatttattttgcaggatgagctgatgggatttgctgatggattagatgtggggtgtgagaatagagtgttgaccgcaaggtttctggcttgaggaactggaaggacagttggacagtattgctatttaccaagacagagaaggctgtgggacaagcaggtttgggaagagcaattaagatttggggtcagctgtgctggggtggggcctatgctggtgggggaggggcatggtgcacatgggtgctgggtcctgcatgttcctgttgctgtcaggaacagcaacaggggttgtgtgaggggccccaatgctaggagtctgttctgtgagaacaaatgtttcctggtcccttcatgtccttttctctctctgcaaacctccctctgcttttctcttccttttggacgaggaaaaaggcagattctgaagcctcattgtcactgtgatggtcctagcctttctgcctggcatgcctcctgacagggagttccttctggggtaggcaaggttgggggcggaagggtggggtggaggttcaggccttatcctggctctgctaccaacagagctctttgccttggtttcccctcctgtatggagaagggttgaggtggccccagggttctgagggtggcagggagcatttgaggaggccacatggcacagtggttaagaatctgggcttggggtcaggcaggcatgggcatgaatccttgcctgctgcttggctgtgagactgtggacgagtaacataacctctctgagcctcaattttctcatctgtagaaatgggccagtgatagtacctgcctcacagggttactgtgaggttgaatgaggaaatgtccataaagcacttagtgccaggtgcagtgactcgtgcctgtaatcccagcactttgggaggctgaggctggtggatcacctgaggtcaggagttcgagaccagcctgaccaatatggagaaaccccgtctctactaaaaatacaaaattagccagacacggtggcacacacctataatcccagctactcaggaggctggggcaggagaatcatttgtacctgggaggtggaggttgcttgtggtgagccgagattgtgccattgcactccagcctgggcaacaagagtgaaattctgtctcaaaaaaataaacaaacaaaaaaataaagcacttagcaaggccctggcatatagcacacctagtaaaccaaggcctctgctcacagtgacccatgcaggcaggcaggtaaggggcttggcctagtgagtgggaggaaccgtgggaggttattgaataggagcatgccaggcatgtggtttgatggggcagctgtgagtgtggagacttgggctgagttttcttagcaagtccaagagccccttccaccttccagagtgagagctgcgggccggccctaatggaccatcttcctttccctagccaagggtcttcattggcttggcatgggcagcctctgttttgcacaggtcccttggggtggggtggtcattttccttaaggcctcctataggaccccttgtctctatatcccagtggctagccttagggaaatgtgagggaagggctttgggggtgtgtgacatcaaagggacttaatttacgtgtaggtagggctctggacagggctgatgggtcaggcggatcctggagtggcagtccactggacactgggagtgacctcggtttctggtctgcatccaggctgggtggtgcttgctccagcagagccgtggagaggttgacaatgggtggaatgtggccccttcagaacccacacttcactggtgcccaggcatgccagccaagccctctgcttctgcaagcctgtttcccagcagttgagctgtgccaggacagccaaggacatttcagagtccccagggctcatagccaggctgtcaccgggcattgcttattttcccagggcccaggagtcttcagggatggtgggggttctggagatgttccaaggacttttcttaacagcttggtaaattgaggtctggagagagcaaggcacttgaccaaggtctcacaaggccgcctccctcatatctgccactcccctctgtttccgtgtcctctgcacagactcctggccttctgcctggacgtttgtaacaacctccctcttgtgggctccctaagagctttgtttgtcctccattatcgtaatcttgccataatctgccagatgcacacactatttgatgtgtctacctcctgtcccctccactgactgcccgtgacagagtctccccgacagagctgtgcagcatgaggtttaggccccaggctctggagccagtctgaactctgtttggatgccagctctgccccttcctggcctggtgaccttgggcatgataccctacttttctgagctgctgtctttgtgaaatgaaaacagtagcaatacttagttgataggaatgtcaggacagttaaatgggataacgtgtgaaatgcagagtacaacacctggtaccaagtaaactctcagaaatggtcatcattgtcccaaaggcccatcagttggttgaactggaaagtcgtgagcatggaggagtagacccaagcttggactgggaggcagaggatgtgggctccaagttcatctcaaacattgtgttcctgtgtgcgtgttgggaagccacttatcctctggaaaccccactttccttttctgagaaagggggaagaaatccctgctatactttaataaagttggcatgtgataccgcagcaatgcctgtgaaaatgctttgcatctgtgtaatgatttaaaaatggcacagcggtggctgtggtgtgctgatggcgatgagggcattgtaaccacagtggtgggcagctggccgggctggaggctggttcatctgtggaatgcttagtgcccacacggacttccccatccctgcctacctgctcccggctgtccaccagcctgccttcacattagccccggcattatatgctagaaaatgtgggaggtgcaaagagctgatggcatttccccagccctggtgggttttctgttatctgtggctgatgccatggaatgtggggattaagaaccagacagatgctggttcgaatctcagctaagcacttcccaacagggaccttaagcaagttgcttaatctctgtggacctcaggctccatatttgtaaaatgaggccatgatcaagtagaggccaagcatttaacaaagagcccagaacataatggcatcaggtggttgtataatgtgtattctgcctggaacgtggtcactgacaacgtggtgactgacaggttatcgatggcaggaagctggggccactgtgcccatttcggggatttgctgcagaggtcggttatgctccctacagaataacccagcttagatttaggagggtctatggaatcatatggcatgattcaattttttaaattaactcgttttttaaaattttattttttttagagatggggtcttgctgtatctcccaggctgcagtgccatagtgcagttgtagctcactgcggccttgaatgcccgggcttccagcaatcctcctacctcagcctcctgaatagctgggactacaggctcgtgtcaccatgcctggcttcatgattctgttttatgtgaccaaactgaggccgagaaaggagtggtacttgcctgaggtcacaggcaggttgtgtaagaaggccgggcctaggatgaggcaagtgaggcatctaagtgcagcgtctcaggaggtgcccgctgtgtgcttgcacattgtggagaataagaacctttgtttttgagagagggtctagctgtgtcgcacaggttggagtgcagtggtgcaatctgggcttactgtagcctcaacctcctgggctcaggtgatcctcgcacctcagccctcccatataactgactataggcacacgccactacgctgtctaatttttgtaatttttttttgtagagaaggggttttgccatgttgcccaggctggtgttgaactcctggtctcaaactcctgggtcaacctgccttgagctcccaaagtgttgggatgacaggcgtgagccactgcacctggcagtgagcaccttctaaaaggctcctcgcgggcctcacctgagcctagtcctgggtgagttcctgatctaggactggaaccctggtctcctggccccatgaactgttctggacccctgcgaggtactttttagagtctcgctgaggcctcctattcctctttaaaaggagcctctgtgaagtaggtcacccagtgctttttgctccacgtttctgttctctagctgttgtctgtgtcctagagaaagccgggcccacttgcccccacctctccccaccttctgccccctccccctgccagctgcgcctccatgtaagtactttgagtcccttaacaccccaaggcgtgttggtggccagcttttgtcgtgatgacaagccccagcaagtctacagggactggctgctttcatgtgggccctcggtgaagcctccttggtctcagcaggccctgtgttgtacccaccaggcctctaggagattagggggcttctgtggctccagatggctcaaagcttttcccttcctctgtgttatccctagcccacctggcttccgtcctcactggccacggggcttgggggattttcagtctctccaaggctctggcatcttccagagtgggctagtcttggagtgtccatctgagccattctttctgtcaccactgctgggcctgcctgctgggccttaggtgacttcttgagaggtggccaaagctgctaatccctggaaggggctcctaggatttccctgtggctggcaggacccttggccacccacgtggtgtgacatgaggagcctggaaagccagcccaacctccatccttaagccccacgtataaacataccttttttttttttttaactgcagctctcagagcctgcagttctactgttgtcaggttgccttgtgctctccttggcatcctctaagaaggcaaataccttttcagctgggtgcttttaagcatttgctgtcaagaagcaagccctggccagcctggcccttttccagtgttctgtgtgaccgtggccaagttgcttctcttctctgggtctcgtctttgtaagacccttttcagctctagcactttgaggctccagcatggattcttacaccctccacacctttgccggtcacctttcttccttctctgcagggtggggcacagggaagggcctggcagctgagctgggtggggccaggggccaaaagccagcatcatagacacttttccctccagctgggcataccagtccttcctcttcttctcaggacaggtggggaaactgaggtctggagggggaagggccagggctggaaccaggacccagttatccttattgccagtgagtgctcctcctgctgttggctgctacctctcttgagagggtcagaagacccactagcatgagggtcagggacatgctttttcctttcccgtggaaggctcctccaggcagggcttgggtgaggcaggcgaggtgccagtggttccctgggcacggggcagaatcggaggaggacatcctctttctgaggttaaggaggtaggggctggaggccttgacaagggaggtggcatgaaggggcgtggaggtttctaggaacgtggttggtggcgcagggtgctctagggccacctccctcccttgcttctgccttccctttctcctggggaggggactgggccaacagtaatgccatttttcctggccctgggattaggtgcagccgtgttaaggagaggacattcgagagggcgtggcgaagtgaagaggaacctcacgccactgcctggagctccggtgggtctgggtctggtcattgtctcgctggctcctgtccactctgaccactgtccctggccccctgccctgtccagtccttccaggtccatctgagtgtgtgtgtgtgtgtgtgtgtgtgtgtgtccccaggagggatctgggggtacaggctggcacttgagcctggcactgggtcctgccttcattccagatcagaagcagctcccggaactgccccagggagaggtctaggctgacctggcagattcctgatggaggagaaggaggaggaggctgagggatgggaaggaagggctcagtttctcctgtggcttctccagacagctaggcatgtccacaaatccacctgaagccagcaggtccaagagtttaaagatttatttcagggccacgggggaagctgaaatggtgagatcccagggctctcagatgttgtgtttgtggctttggtcctgtctagactgtgagagccatggcttgtcaaagccagaggggcccctagagaatttccatgttcttaacttggcttttgatgggggccagtcacaaccactctgaatttgtgtgtctggggagagaatctgctaatagccatcattagattctcaaagggttctataacccccagaaggtcacagacttctcctctagtccatacccctcactgcagttgcagaaactgaggctcagagaagggaagggacttgcccagagactcacaggcrgcaatggaggctgtggcaccccctgcctctgtcttcctgccagcattctgcctgaccttacaagctggggaagcttggctcattcaggggacaatgacctctcatcccctgatgagaggaaggggatgactgggagggaaggactgggaggctgttgtggtttccaggcccgcatggattttggcttctgcatccttgagatggaggcccctgagtctgcctgtgccttggaatctctcagggtgtatctgaggcctggagtcgggcatgcgggagggtgggggctagtggtgacccacatttcccagctcctctgcaggggaggcagataggggagaagctcagggtgtgataaaattgtttttacttcactgggcataaatgacaaataaatgaagtgagggttgggaagtgcttggtagagcgcctggcacatgccaggccgtgaggcgaggtgctcaccattgtcctttgcggtgccctgctagctgagatctcctgcttctgaccctcgctcctgcctcttccttagcatgaggcctctgcctggggcaggaggtggcccccctttctttattttttttgagatggagtttcgctcaggctagagtgcaatggcgccatctcggctcactgtaatctccgcctcccaggttcaagcgattctcctgcctcagcctctggagttgctgggattacaggcatgtgccacacacctggctaattttgtattgttagtagagatggggtttcaccgtgttagccaggatggtctcgatctcaggaccttgtgatctacccgcctcagcctcccaaagtgctgggattacaggcaggggccactgccccgagccgccatccccctttcttatattggggtgtctgatgggggcgtgaggaccctctggctgaagtcctgccttgctgggttccatggtgcacctctctgcagtgcaggctttcccaggaggctgaagctcagctagagaagctgggtcagcagccctgggcctggtcacctccaggaagcctctctcctgggctgcagacctggcttgggagtggtgtggaaagtaggactgcagaagggtaacgaacaggggctgtggggtgggctgggaggggcatcctagctccacctctgcccagctgtgtgacttcgagcggttgcttaccctctctgagcctccatttccttgtctgtaaagtgctcatagcagtgacacctctttcagggtgttaggattgagcgtgatggagcaggtaaggctcctggcacagccccacatgttcgcaggagcttaacgttggccgccagtaagggaggttatgatatgtgttgggatatgctgctttgttccttttgagtgtctgtgatctgagcctaaggaaaaaatagttctggatggatttgactctgtcataggcagatttggggatagggtgggcagagagccccattttgggaagatttgtggccactgcataacattctgtgtgatggacctgacagccttggtgtgcgtgaagagcctcagtgggactgtcaggactgtcccgtccttgggacgggagggtggcaggtgacctgccgtgttccccacacagccccacccccaggctgtctggtatgtttgctcggtaagccctttttttcagagctggtacaaaggtaaactcgcaactcaggccctgttggaagaaggacacattctcaacaagtgaggtctaagttcctgaggttttctgttgggccttccctgccagggaacccagaacagattcacaagttgagaaccagggagtgaaccagtagtgcttaatgctttgtttccttgttgattgacggatgatctgtgagctacttccaagaaagatcactagaggctgcttgtgatactaaaacacatataaaatggatgaaaacaaacacagacagaaaactattgaaaaggaatggagaaagggatgtgcagggcatctggcaaatgttagctgtcttaggtgatcacagaggggctgcggagatgggggatgaggggcccaggctctggagcccagcagctgtgtgctgaagttcccattcacccccttattagctctgtgggctgcagcaagtgactggcctctttggacctcagtttctcatccgtataatggggggaatctaggtcatggtgctgtggtaaggttgaaataatggcatgtaacgcagacatggcatgtctcataaatggaagttaatgttattaatgcatttagcttggagatgccgcgtagcagattcacagaggggaaggtaattggcaagggcacaaggctcttgagtacctgctgtgggtaggagatggcttgtgccttggaaagctttcagtgaagttgggagccccatgttctagttgcaagaacaactgatacctggtgttgcgtggtgggatgtggagcaggggagctcaatcaggactttagaaatccagagcaggcttgttcacctccctgctgaggctggcattggaggaggagggacagggttttaatggacaagaaaatggaccaaggtaaatgagagtggggcacaccagacggcacaagccaggaggtcctttcctctctctgggtctcagtgtccccaggggcttactgcagggtagactgtgctctctgtggccctgcgactctgagccagacctccaacagtctctttcccggtggtggtggtcctggactctggggtgactgacaggcggcagcttggctcctggccaggcagcactgtgggggtgatgggggatggggcatgtagcagattccagcagaggaagggatttgcttctggtctcggcctcccagggatgtaatcacgctggagaaactcccgcacagctgggaagcaaatgtggaggattttccttgctgagctggatgtggtgggtggggcaggctgtggtagggtggctggtggagctgggaagctgtggggtgtggctgggtgggggtgatgatgtgactgtgctgggggtgtgactggctgggaggggctggatcagctatggggagtggccctgggtgcatgtggggctacctgttccccaggcctgcagccactgctacgccctcccctgctcaggtccctgcccaagtccaggtacccacccattcacatccttctgaggttgctggcagagctctttctgcactgacctcctctcagcmcccaccccatgtgcatgtggcccagatgcctatgatgatgccatttgagcctgtcatgtgcatgtgaatgtggtgtgtgtgttgggggggcagggagcagtgtgtggtccacagagggcattgtcaagagtgacctaggctggaaataaaatgtgggctgggtgagcattcaaggccctgggcaccttcccccattcactgcagccatgtcgtaccagagacataaaaccttgggttccagagacctctagaaacccttgtggaaaggtcatggtcgccactgcattttcagtgcctagtggcatgcttggcacctagtggtgctcagtaaatacakgwtgaggaaacaggtcgtttgcttgttccgcactcccagaaagatctcgaacctccttcctggatcccattctcttgctccttccctctggcgtcagcctggcctcccttcctctctctttctcaattcactactaatttgatatgtggccttgggccagttccttcctgagcctcactttccaaatctgttactgagtaatcattttattagcttrtattaccatgtgccaggcactgasctcagtgttttacatgcctcatctctctttgtcttggtagctgccctgcaagatagataagtagtataaaccccattttagatttagtgaaactgaggttcagagaggttgagagatttgctcaaaggtcatgaggctggtaaataatggagccaacattcaagccccagctgggagccactgcacccgggaattacctgtaatcccagcactttgggaagccaaggcaggaggattgcttgagaccaggagttcaagaccagcctaggcaacatagggataccttgtctgtattaaaaaattagctgggcatggtggcacacacctgtggtcctagctgcttgggagactgaggtaggaggatcacttgagcgtgggaagttgaggctgcagtaagtgtgattgtgcccctgcactccagcctgggcaacagagaaagacactgtctcaaaaaatgaaaatatgctgggcacagtggctcacgtctataatcccagcactttgggaggccgaggcaggtggatcacttgaggtcaggagttcgagaccagcctgggcaacatggcgaaaccccgtctctactaaaaatacaaaaattagctgggcatggtggcaggtgcctgtaatccccrctactcaggaggctgaggctcgaaaatcgctcgaagcttgaacccaggaggggaaggctggagtgatcctgggcaacagagcaagactcttaaaaaaagaaagaaaagattcaaagattcaagctcaggcaggctagctccagtctcggcctttaactgttatgctagctgtcaccactagagtgaaatagaagggtgtgcacagcccttctaaggaggcctgctggcgcacagtaggcatggtgtacatgtgagttgggttactgggcacaattcaccatgaaaggcatggcttgctcagtctccatacctgcttttatggagctcttggtctcattcctggagccyacccattcatcacaggcccaagccggacccccttccctggtcccagtctctggacagcttgctcctgtaagaaggcccttgtacctctgccccttttctcttatgggtccggggcagcattttcaggtggggatgttagatagagtgacttcaactccagagcagtggccacggttaccgtggtatttcccgaaagtgcagcgttgccatggcgtctccatgacgaccagagcatctcattcattatcctcagcaccttggcagggaaagctgggactagggctaggggagtgcagtgggagcctggctgagggctgtgggccactggcctttgtggctgaggttcccctcatgcccctgcctaccccaagccaaggttcctctgcaggctctggagttatctcccacccatgggttctgggttcacatttcagctctgccactgaacagttgtgtgatgttgggcaagtgacaacctctctgagccttattttactcaactgtaaatgtggataacaatattagttgtaaggattacatgaaatgaggtataaaaagtgctggctgggcgtggtggctcacgcctgtaatcctagcactttgggaagccgaagtgggtggatcatcggaggtcaggagttcaagaccagcctggccaacatggcaaaaccgcatatctacaaaaattagccgggaatgatggtgggtgcttgtaatcccagctactcgggaggctgaggtgggaaaattgcttgaacctgggaggcggaggttgcagtgagccaagatagtgccattgcactccagcctgggtgacagagtgagactccgtctcaaaaaaaaaaaaaaaaaaaaaagtgcttagcacagtgccaggctcatagtatggcagtattcataatgatgataattataatgttgttggtgttatttttattgtaggaacccttgggtttcagggaggaatgaaagaccaaactcaaagtcaggaaggaaacccatttgagtcaagatttggtggtttccatgtgactgtggcaagtcacttcaccttgaagtctttgtctccttatctgtaaattggaaataataacagctgctcattcattcatatcctgagtattcaataaggacctgaccctgggaaaagtgggagcttccacgatgaatcagacttggttcctgcccttgagtggcacccgggcactgggggaggaggaagaaaggacactgttttgtgctgagggctgtgtgtgccgggtgctggtgagggcctgtgcagaggtcagtaagccctggtcctgccccacagatctgcaggctacaggaggtagagccatgtgcaggaatgcccccagtttactctgcacagaccacatgctcaggtgcacccaggggctgggcaggaagccagatgaaggaaagaggttggctgtgagactgtacatagagatgctgatggtgttaactgcaggatacacagcccatttgaggctggcactctaagtgcctcagctgatggtggcaggtgaggatgtgtgcccagtgtcaccagaacttgccctctttagagacaagttagaagttctgacttttatataaaatctcctgatttaaaaatgttgctaacgaatcccaaattaaagaaaaatactgtgcaagccaaagagcacagtctgcattttgtttgggctccagggtcctggttttcagcctctgcaccgtggagtggggatgaggcgggagcctgaggaatgagacttaggagtgggagagggggcagtggttggtgatgacttcagaggggtcatgactttggaacctggatcttgaaagatgagtaagtgtcccaaggggtccggggaggcattccaggcaatgggaatttcatcagcaaaagcctcaatgcttccccgagattggtgactggctgggtgaggctggaatttaggggaaactgctggtgatgtctgcaaggcccagcaggcccagggtggtgggggtcattgaggcctcagccccagctgtccttgaggccttggtggctgcagggggactagaagcccctcagttacttacctcttgagccacgggagttctggagtgcaggcgggtgaggagggccttgggtggagggtggcagcctctgagtgggttgcagaggggctgtgctggaagccccctttgccagccggctgagtggcyggcactttgctacaaagcaactggcttccccccacccacccccaccccagggtatttggccttctctgaggacaggggctaccttgctctccctctgccctgggttttgccatggccttatcttcagcttcttggcttctatccaggcagccagccagctcccagtaagggccacagcctccaaagatagggctacttttcagacatgctgtgagaggaggacggcagccctggctgcctggccctctgtgtaataagtgtgtgtggtgcctgcctgcctcagcccttgctctccctctgtgaaatgagctgccctcccctgcctgagtcctggggctgtcagactctcaagagagggatgagcttgaaagtgcttcgtgagctaagctgtgatccacatcgtgagggattgtcataagtatgttaaataagcaacaggggtgcgtgataacagcagctgtgtgccaggcgtggttctgagcatcttatgtatcaactcatttaatgttcacaaccttgggaagtaggtagaatttccattttacatgctaggaaactgaggcactgagaagttaaataacttgcccaagattacatagctactaaatggtggagcttagttttgaatcgaagccacttggctccagtctgcacgtgtaaccagtagggtccatcaatctaggactttaggtctgtggatgggtggcagggaggctctgaactccttgaaattattatgatatatatttttttgagacagagtctcgctctattgcccaggctggagtacggtgatgtgatctcaccttactgcagcctctgcctcctgggttcaagtgattctcttgcctcagcctcccgagtagctggaattacaggtgcctgctaccatgcctagctaatttttgtatttttagtggagatggggtttcaccatgttggtcaggccggtcttgaactcctgaccttaagtgatctgcccacctcggcctcccaaagtgctgggatgacaggcgtgagccaccacaccattatgacattttctagtgtgtgtgtgtgtgtgtgtgtgtgtgkgtgtgtgtgtgtgtgtatggctttattgtttagatttttagttttacattcacagcaaaattgaaaggaagatacagatatttcccatatgccttcttcccctgcacacacacacagcttcccccattatcaacatcccccaccacagtggtacttttcttttttttgagatggggtctcgctctgtcgctcaggctggaatgcagtggcacaattatggccactgtagccttgacctcaggggcccaagtgatcctcctgagtagctgggtctacaggcacatgccctgacacctggctcatttttttttttttttgtagagatgggggtcttgctatattgcccaggctggtcttgaactcctggccttaagtgatcctcctgcctcgacctcccagggtcaggggactgcaggtgtgagccactgtgcccaacccagagtggtaaatttgttgcaacagatgaccctgcattgacacatccttatcacccagagtccatagtttactttcgggttcayctctggtagtatgcattctgtgggtttggacaaatgtataatgacatgtatctaccatcgtcgtctcatacacagtagtttcactgccaaaaaaattytctttgctccgctgattcatactctcaacccccaacctctggcaaccgtgtgcatttttttaatgcgcatattttttatgtctgaaaaatgtcagattcccacagggkttcgtggctcccacattcctgagactctgagctgcatcattcacactctgaaagattgttaatctgatagagggtcactgaccacagcactcaagcctgcgaggagtggctggtggctgctctcctccgcttccatgggattgggtggccaacgtgggcagggcgccatcagggcatccccacctcctatccactgtgcttctgtcctggccctaggccaaggggtggggctgggctgcggccacaggctgcccttatcaatggtaaatgggacacctgggtaccctgagtgtaaacaggaccagtcaccccagccttcctggctctgcccaggacacctgctccttcttgccctgctctcagctagaattgcagggagtccctggaaagtgccacacatgctcttatctccaagctgtggtatgtgccatttcctctgtctacccctgcccaacccttactttttcttctggtcagcttaggtacccttcctccaggaagccttccctgtcccctccttccccctgccagaagagttaaggacccctgagctctcccaaacccccatcccatccccgtctgtcacacttatccccctgcattgcagatgcctattttcttggctgcctctggttcctcagggtactggcactgaaatgtagaatatcagaggtgaaggagcccccggagatcacctgccccaacccccttgtaacatgcaggaagcccagagggagccacacagtgcatcatggcagagctgagaccagacctgttgtcccagtcacctcctcatttcacaaacaaaaagcggaaataaaaatcacccagagataatcactgttaatgtttctttttttgcatttagcaccagtttctagcctatgcacaaaaatatttaactaaattatgaccgcacgtacaaactgttttataaatgtttttgactttgacaatacatacggtaattatatttctatgtcagtacatgtccttctccaacatattgtaaatggctgcctaggatttcatcatatgcttgtattataattgctttttttttttagatagagtctcgctctgtcgcccaggctgcagtgcagtgacgtgatctcggctcactgcaccctccgcctcccaggttcaagtgattcccctgcctcagcctcctgggtagctgggactacaggtgtgtgtcaccacgcccgactagtttttgtatttttagtagagatgaggtctcaccatgttgcccaggctggtcttgaactcctgacctcaagtgatccacccacctcggcctcccaaagttctgggattacaagcatgagccaccacgcccgacccttgtgttataattcctaaatacaatctcccattgtttgggatttgctgttataagcagcactaggatttgtgttcttgtggaaaaatctttacacacttctgcagtaatacctctaggataaattcctggaagtgcagctgtcgggtctggagcatgctgtacccatgctgagcacatcatatagtcttggagctggaagggatttcaaagatctttaccctctaggctgggcccaagccttgaattcccccctggcctctttagccctggctcttacaccttccatctagacctgggcaactctccttctagctttgagctgctgtgactgatagttgctccttgggggccaggcgtggtggttcatgcctataatcccagcactttgggaggccaaggccggcgaatcacctgaggtcaggagttcaaggccagcctgatcaacatggagaaaccccatctctactggcatggtggctcatgcctgtaatcccagctacccaggaggctgaggcaggagaatcacttaaactggggaggcggaggtggcagcgagccgagattgcaccattgtctagcctgggcaacaagagtgaaactccgcctcaaaaaaaaaaagtaagaagaaaagaaagttgctccttgggttgctgggaaatctcacttcttgtgacttcattactatttaagggagactggtagactgtgtttggggttgctgtttgggatgagacaattggggcctttgtgtcstgtatgtacgtcttcgttaactctttccagtgagatgagtataggaggcgtggcctgggtgcaggcggtgcggggggttcaggctgagggggaggctggaacccagagttatggctgcctgggtggacagaaggtccagggcgggggaggcctcccctctgcatcctgtggtggcagtatggcgatcctcaggaaggctatttggtcatctgttgtcctgggctgctgtgtgcacctgtgggtacgtaccccgaggatgagagatacctggttgcattatgggcaaatatgacagctgccatgtttcttgtgccaagctcctcagacatatttacttaacgctcagctacagccatgagctacaggggtgctggtgttacagattagctcactgatgctttaaaggtgtaatggtcacctgaggccttctcacacagctaagrcacacatgccctgcagcctgctaatgaatcctggcttggcttcattctgagtcttcagaatkmmwwgactgatggagactcagtcttttcatctatcatatggggctgctgggctcattcaaagagagcaacgggttaggaagggaatggaatatggtgaggatgtggtattcagtcgtgatttagaattctacctctagttcccaggctgtgcaaatgtttatcatctctccccatccgtcctgctcctggatttttcttggcctagtcttggactctgataatgatcaaaaatagcaactccaatttgtagataccatatgctaggtactgctttaagtcgtttacaaacgttgttggacttaatcctccaaccccttatgagatgggttcatattatttattgtctgccccattttacaagtagggaaactggggctcagagatattaaagagcttgctccaaatcatgcaaccttggttcggcagccgtacttgcatttgggcattcctaggtcagctcctgtgtgtccacagttagctgaaccctgaagcccgcactctgacgctcctgttctctccactctccacagccttagccccgtgggccccacggagtgagcggcatgcagcacccccgggcctgtccagtgtcctctggcctgctgccctgcacccccagaaggccctgacgccctggggcacttctgctctgcacaggaccacgcgggggtttgccatggtgacataaaggggcgcggaggaaggaaggagcgtgaccagcctgtggactgcgcccctggctgggaggaaggacygggggcccagatcctccactcccagtgccccacaagggcgtcgcttcctaagtctctgtgaatttgttggtcagtggacgattctcgtgtctcctcctgtgtggggccttggggtagccagggcaggccgggcctccggtggccaagktctcggaggccaggatgcctgccctggcatgcctccggaggctgtgtcggcacgtgtccccgcaggctgtccttttcctgctgttcatcttctgcctgttcagcgttttcatctcggcctactacctatatggctggaagcgaggcctggagccctcggcggatgcccccgagcctgactgcggggacccgccgcctgtggcccccagtcgcctgctgccactcaagcctgtgcaggcagccaccccttcccgcacagacccgttggtgctggtctttgtggagagcctctactcgcaactgggccaggaggtggtggccatcctggagtccagccgcttcaaataccgcacagagattgcgccgggcaagggtgacatgcccacgctcactgacaagggccgtggccgcttcgccctcatcatctatgagaacatcctcaagtatgtcaacctggacgcctggaaccgggagctgctggacaagtactgtgtggcctacggcgtgggcatcattggcttcttcaaggtacacaagaagcagggtccccgagcagttcagagccccctctscagctcagtgcctgaattctcatttgtgaaataggtgtaatggtagcacccgcctcctggggttgttgggagggttaaatgagtgagtatatgtaaagcactgggagcatgcggtgcccactgcctggcaagtgctttgtaagtattaggggagcgtgccagggggatcgcctgctgtgcgtggggtccagcacacagcaggtgcttgcctaaaggaggccacagagtaagtgtgaagtcagaggagcatgctctgctaggtgccccaaaatctgtcaaggcaatctcccctagggagggcgtgtgcacccatttttcagatgagcaaaccaaggctccgggtgttaagttacttatgtgaggttttgcagcctgtaagtggagaagccgagatttgaacctagacatagacagtttgggctctctatcccatgctcttccctcttggtggtggtggagtrtggcgttaatatacctcctgacccagagccattttgcatgaggagaaagaggagaatgaaatcccactggcagatggggagctgctctgggctttatggggcttccagaatgaccgccgggattggggtccttgcaggaagggtgtcccagagaatctgtccttggcggggggaggttgggaatggtgggcgggggatccagaggctgtggtcagagaagtctgacctgcaagatgaaagcagacactagctgggactcttagttggatgctttggaggtggcagggaatttgttccttcattcaacaaatatttactgagcactcacagtgtttgtggtcctgtgctagcggtgatcgaagtggacaaagtccctgctgtcatggagctggcatttcagtgctttgggagtgggtgggtgacaggcagtgagcaaataaacacaggatggggcaggtgtgatcagtacaaaaagaaacaaagcagggaaaggacacagasggtagtgggggtgggagcttgacattattttaggaaagtcgtctttgataaagtgacctgaaataaatgaggggaggagccatgtggctttctgtgcaaagagtcttccaggaagaagggacgttaagtgcacgagtcctaaagcagcctcttgcttggtgtgagccaggagaggaggagcgggagatgggtcagaagtggcctgtgtccgctgctgggtgcccgtttgtgccaggccttcctggtgcacttgcgcactgggccctgtctcctggagggcttctcatggcgtgttctttcacaccctaatacagcaggaagctctgccactgaaaggtattgtgagccaagaatttgaaggcccttagaagtcctgcagtagagcaaccagtgagatttgttctcaactggcttgatcacaaaaccctttcttttacagagcaccctcaggggaacgctggcctggtttatggctttacaatgacatcaagtcagattatctccattgtctggttgtctcttttctcttggactctgtaccctttcctgccatgaacttcgttaagttctattcagagtcccaggcctgaaaagcgtcaagaggctgacgtttattgagtgctcactcagtgccatgcaccgtctacatgcgttgtgcagattcacgcacttcacacgaaggcaggtggctagcagcctgatttaagataggaggaaactgaggcaaaggaggataagcaatgtgtccaagcctacgcctctgatgagtataggtctgggatttgaactcaagcrgtccggccccagaggccttagtcttaaccacgatgtgatgagtccaggagcctcacataccacttattcaggagaagtgacatcagaggccacacccagtgcacagagctcccacagtctttggggaccaggcggtgggctgtggccattgggcgtaattggtacaatggagcttgggcgctgtctggccccaattccttgctctgcagaaggtaaacaggaggcctagggaggggtgcgggcatgttcagagtctcatcgtggggccagtggtaattccaggacttggtgctcttcctaccctgttgcctaggacaagactatccttggttttgagcagaggcctgtgattttctgctcaaatgcatgccctctggtggtcaaggcacatctttccactctttctgcaagaccaacttccccgctgtgtgctgggcttgccaagtggggattgtctgtgggctccagggatctgaaaactcattttccagttcccactgatgctggattcccagggcagtgtgagagcagggacttaaaagtccagacaggttcaaatctctctgtcatttagaaacagagtgacttgggtaaaatgctcaactcatctgcaaagtggggctaattacagctgctgcctcactggtctgtgttgaaaacaagacagtgggtggggagcactgagcccattgcctggtaccggagccactcaatagatggtagctatcktgctttgtcatctccaggttcagtaaacagcagtggtagcactgtgtccgtcttgtggccctgaccaatgtgtgcccctgtgagatcctggagggtggtgggaatagggtcatcctcatctggatccctacttcctggcactgtcgtgcctcaaccttgaaattccaggtgacctggggctaaacacaccctggcaggggtctggcaaggagtacctgacctctttcattgagcacttactgtgtcccagtcactgagctcggtgctttgcaggcatttcatggctaattctcacagctatcctgtgaagtaggcactttattttcagataaggacctgaggttcaaaaagttaaatggcttgtcccgaatgacrtagctacaggttgagtgtcccttgtctgaaatgctggggaccrtaagtgtctcagattttggaatgcttgcattctacttaccagttgagcatccctagtctgaaaatctgaaatccagaatgctgcaataagcatttcctttgagcatgacctttagaggtcacattggtgctcaaaaagttttggattttggagcattttggattttcagattagagatgctcaacctgtggtaagtcatagagccaagatctgacagtcaagcttgttgtttctaacccagccacaggagcaaatgtgctgacagggagcctgaggctcagagaggagatgtaggattcccaaggtcccccaggtaatggtgaggtctgtgcttggcctccacctctgcgttcccgaatcagggctcctcctccctctgcctgggggaccccattggaagacttggtgtctccggagtgggtactcagtggtgaggagcaagagggatttccactgctgtggggtgaggcctgcagtgaggccagcctctcggtgctgaggccctctattcccttcttgcctggttcatttcattgccaatggataggccatcagtgacttggcttcctcccttcctggatggctgggcagctgactgagcctccagcacctggcagtcagctcagggtcgggactttgaaatgggatccctcagcacccgcggtccagtgtggcatcccaggcctcagcaggcgatggacaaggcctgaaatgtctctggcccctaccgcttttgtccccacacagcccaagtagttcccagccttggtcagggctgtcttaggagtcgtgagcagcctggagttggggaggtagctgaggactggtctgtgcgctgggcctcagcaccccaggctggctcaggacagggtggggaggtactcttgatgtttggagaatcacatgcaggctacttaatgtggtttacaaggccagggccctgcagagcctttttgggaattagaggagatgagtgaaaggcgctcttctggacaggtacagctctgcaacgggcacaggctcagctgagactttaccctgcccccgccactgacctgcgcacccctgtgtgtgctccctgagcagctctcctgggggccccacacatgaccccatctccccctccaaactcattttgctttgccctgccccactcactctccaggcagcagccacatggatctttttaaaatgcaaattagaacctgtcatcctttgatggagtctttgagggcttcctgctgctgcttcaatcctccagcaccctgcaggcctggctccagctgacctatctgcctcatctcctcctttccctcttggtcactctgctgtcttcttgctattccttggtcatgctgaggcctgtcctacctcagggcctttgcacttgctattcttggcctctacctttccctttgtttgtgcttgtttgttctttaaatgttagctcaaaagtccctttctccaggagacctcctgagcccactaactgtgcccagtaatctactgttccacaaatatgaacctcctctgtgtagcatgtgccacactgaagttttatatttattcctgtgatttcagtgaatgtctctcttccctccttgattttaaggttcatgagagcaggggccatgtctttgtttttctcactgtatcactggcacttaaaacagtgcctgacacagcaaatagttgtggaatgaacagatgaaacctgtattgagcgtctatctatgccaggtactagagagctggctgttcctcttttattccttttaaaaatccagttctgcattgaattgtgtgtgttcctgctgggtatcaagctgggcactaggggtccaaaggcgaaacatcatagcccctaaccttaaggggttgcaggctggtgggagatagaacgctgaaaatataatattgcagctgaggtgagaaatgctgcagctgaggctttaacatggtctcagggaggccagtgcagagaagagggtatatgcattgggtgtgaattatgagcaggagtttgtcaggccaagaagacggaatggaattggcacaggaacaaggacamattgtaccatattcaggggcaggtggctgagagggtgaggaaggtcatgaaggaacaggggctgtgagcctaaggaagaggggactggggcacactgtcttcagacttccagggagctgagcagccacatgccttgagagaagggaggcagagacttcaccactgatggcartgaccgggcaggcaccatagtgagggagtggcctctggggtgctaggggcatatggggcacccccagcagaaacctcctctttgaacatctgcattggcatccacataagatgtctcctgaagaaaaggttgcgtggccagaggcagtttggaaaccccaggcaaccacgcctaatggttaggtgtgtgggtgctagggctcgacctcttggcagcgattcatagctcctcccaaccactgtgctactgagggcagcatgcccctccaagcctcggttttcacacctgtgaagtgggatacgcaggctgatgtgaggactgaatgagcagtttctggtcatgccacaggccctattctgagcacgttgccggtattgatactgatcatcctctaccactcctggagttactttctgttcttagccacattttacagcagaaactgaggcacagagaggtgatataacttgcccaaagtcaggcagtctagcaggattcatgttctcaactgctagattttcttctatgtggtttagcctctctaggcctccgtctgctatgtgtaaaatgggtatgagagcagtgtctccatctggggtcattggaggattaacagcattcctgtctgcaaagtgcacagcacctagtgcctggctttggtaagtgagtcgtgtgtttgtgartatattattgtgcagggtggagcgcagggccagggtggtgagccctccatgaatgttggtgaatattgataccactgttatggtccacatgtgagagactgtgtcctttggggttctggatgtgacagttctgttccccttcctgccctccattgactgcaggccaatgagaacagcctgctgagtgcgcagctcaagggcttccccctgttcctgcactcaaacctgggcctgaaggactgcagcatcaaccccaagtccccgctgctctacgtgacgcgacctagcgaggtggagaaaggtgtgctccccggcgaggactggacggtnttccagtcaaatcactccacctatgagccagtgctgctggccaagacgcgctcgtctgagtccatcccrcacctgggcgcagacgccggcctgcatgctgcactgcaygccactgtggtccaggacctgggcctgcacgacggcatccagcgcgtgctgtttggcaacaacctgaacttctggctgcacaagcttgtcttcgtggatgccgtggccttcctcacggggaagcgcctctccctgccattggaccgctacatcctggtggacattgatgacatcttygtgggcaaggagggcacacgcatgaaggtggaggacgtgaaggtatggccgggggtgctagaccgggcaaggcaggtggggcctggcaagcttcagccttcaggtgccccatcgtgggtgtgccctgtctgcatctcccctatgctgggagttacttaaaagacagtcccactctgcttcctgtcctgccagttggttcttattaattgtcttattagaagcaagtatcatttaaaacttgattgaagcattggccaggtgtggtggctcacacctgtaatcccagcactttgggaggctgaggtaggcggatcacttgaggtcaggagtttgagaccagcctggccaacacrgcgaaaccccatctctactaaaaatacaaaaaaaaattagccaggtgtggtggcrtatgcctgtcatcctggctacacaggaggctgaggcaggagaatcgcttgaacccaggaggtggaggttgcagtgagccgagattgtgccactgcactccagcctgggtgacagagcaagactctgtctcaaaaaaattaaaaaaataaaactttattgtattgaagtattgaatatgaggaattttgcatctggaatgtggagtttaagtttgtataatatgtatggaagaagacatccagacaaagatgggagctgtacaatgctgtttgtctgcctttaatttaaatatgatttttaactcttaaaaatgtttatgttaatgtcagagcgcctacaaaactcttaaaataaggatgagagcttgaatcatgcatgagrcagattttaactgaggtgtaagtagacagtggaatgcatgtgtttaattcaaaaaaggtttgctggcygggtgtggtggcttgtgcttgtaatcccagcactttgagaagccaagggaggaggattgcttgagcccaggagtttgagaccagcttgascaacataaggagaccttgtctctacaaaaaataaaacattagctgggtgtggtggtagtagtcctgtagtcctagctatctgggaggctgaggcaggaggattgcttgagcttgggaggttgaggctgcagtgagccatgactgtgcatggcattccagcctgggccacagagcaagaccctgtctcaaaaaaaaaaaaaaaaaaaaaaagtttttactaaacaaaactgtgtaaaagtactttgcagaccacaagattttacacacatgtgaactgtcattgtgagaaacagcctacaaattaagaccattaaacaatctttaaaatacagttttcatctactcactattttatttaaacttattcgcaaaggagatggcatcctagtgtaaataggaaatccggatcagttgccataaatagagggcaaccataacaataaatccaatgaaaacaaaacagggggattaaattctagagacattctgctgcctgctgacagcctgtcctctcttataggagattagcaagtgttagaaacatattagcaccaaacccaggcttgtctttgatgttagcaggaggctttaaaaagagacttgtaagaggaattctgaaatctctggtaggggttggccctggggcctggaaggagggtcctggtggcattcatcgccctgccttggtcaggagtgaactttgctcttccttacacctctagagaagagcagaatggatgacattcgggagcaggcactgtctggggagttaagacctaatttgaatcgagtcctaatttgaccctaatgaactaggtgacttgggcaggtcccctcccatgcctgagcctcagctataaaatgatgaaatggggtgaatgggaagttttcaggctatttcctggtgcccaggggtctcccataggtgcctggatagctggggtgggggttagggggatgttttggtgccaggctcagccctccaggctccaccttagttgctccagcggtgctgctttgcgctgcttttacgcattgtgtttcctcctgaaattccattctcttaaaggctctcctgtttaaagaacgttttagccttccagtctaagtcttcatgcagtgccaccacctgcctctggcaaggtagattgctctgtgttctactcgaggtgttcttccagtggcccaagctcattttctcctgcaggaacccaggttcttgctgtctgtccagtgagttctggagagactgtggtccagggtcaggttgagcctgaggagatcaggttcctgggctcactgtgttcctataagccctgaatttctctctcttattaattttccgtattttaaattttttttttttttttttttttttgagatagagtcttactctgccacccaggctggagtgcagtggcgggatcacagctcacttaagtgatcctaagcacaagcaatcctcccacctcagcctcctgagtagctgggatcacaggcacatgccaccatacccagcttacccagctagttttttgtagagcccaggttttgccatattgcccaggccgatctggaactcctggagtcaagtgctgcacccaccttggcctcccaaagtgctgggtttatgagcmtgagccaccgcacctggccctattttttctatttttaaagtgaaaggaatgatagcagtttgaagccatttctatagaacaatagaaatagaaaaataggatacaaaccaaaaatacaaataraggcaccctctttcacacactcagctcagtccagattgcaaagtgcttctccagccacaatcctacttgccttaaacatttttgtgaataagaaagggcagagttttttttttttctttaatcccaagcacagcctacaacagagcccttctttcagagacatgaatgtcgcctcattagcttgtacagtactggctgtacagcgcaatttaaataataccaatagcagctgcctattcagggcttggtgagtccttgtgcttagccctttctggccgttgcttcattgggtccttacagcagccctgtgaggtgggtattgttctgagtcccatttaacagaggtgggcactgaggctcagggagttgaggtaacttgcccaaggccacacagctggagcatgcacgtccaccaggcggtkcacggccctggtaagatgctgatggtgactacattgccyggggagggccaggacttttagtttgtaaagtgttctgatagctggctcttacaggtttcttttttctttttctctctttttttttttttttttgagatggagtttcattcttgttgcccaggctggagtgcagtgacgttatctcggctcctgcaacctccgcctcctgggttcaagcaattcttctgcctcagcctcccgaatagctgggattacaggcgcctgccaccacrcctggctaattttgtatttttagtagagacagggtttcaccatgttggtcaggctggttttgaactcctgacctcaggtgatctgcctgcctcagcctcccagggtgctgggattacaggcatgagccactgcacctggcggctcttacaggtttctgagctgctttgtggctcgtgtgtcctaaccccagagtacacctgtgtgtttgtttcacaagtgtcagtgtcccctcattgactcgaagagtactgggtgcacggtgcgcrggaagaccgcattgctgggcacacagtgtcccatccttggaaagggtatggccctttaaagtcagcactgcattccatcagcaaagagaaatcctccacatttgatagatgaagacacaggcttacagcggcagtgaccacagacgtagcattggccaccatttttcatcacttaccagatgtgaggcagttttacgtacaatatcttttttacaattgtttaatctttttagagcagggtcttacagttggacctgtgttggattctaactgctgggctcaagcaatcctcctgccttagcctcccgaatagctggcatacatgcggttatcttacttgattcttccaagagccttatgagggagatattatcatccctgttttacatttgatgaaaccaaggcctagaggaatgtgaagccttttcaaggacacatagcagagctgggtaggattctagattttcccttgccagaggcctggcggacggcagcatagggctggtttcaagagtatgtgatctgtgcagccacacagagccccacgctcagagggagcccattatgtggtttaatgmctgctgttgccttcttgacattcttttttttttgagacggaatctcgctctgtcacccaggctggagtgatcttggctccagtggtgcgatctcggctcactgcacctccgcctcccgggttcaagcgattctcctgcctcagcttcccaagtagctgggattacaggctcgtgccaccatgcccggctaatttttgtatttccagtagagactgggttttgccatgttggccaggctggtcttgaactcctgacctcaagtgatccacccacctcagcttcccaaactgctgggattacaggcatgagccaccacgccgtccttgacattctttataatttttgaacaagggatttccacgttttttcactgccctcagtgggaaaagcagggagctcctggctttccctcactcattcctttctcccctgcctgtcctaggccctgtttgacacacagaaygaactacgcgcacacatcccaaacttcaccttcaacctgggctactcagggaaattcttccacacaggtaagtgggcctgcccctgccctcactagcaacttccaggactcctcagcacccaaaccctcaaagcacccatccatgagggcagcgggtgggyttactggcccacattagaggcagaggtgacccctctgcccccgtggagccnacagcctacaagagcagtcacancccaggcagaggccatctggggacaacagcagcggcagcaacagcagccgcttgtccctccctgtmctttcgggctgagctggcctgggtggggcatcttctccctcttgcctctccctcctatcttttacaattatgtgtattatttctgcttataaaagaagctggttgagttttaagaacattacagaaacatgtagcatagaaagtgaagatgccctgtaattgtacccaccttggatgaccagtgtcatgggtttattttagagtcctaagggttgagggtgagggctataggttgcttggtgcgcactttccttcctctttggggctctctcacttgctgtcctctcttcatctgctgtccttcagggactgggcagaacccctcagctggtcatctgcagtgaccattccccctagctgccttctgcccaggcctcagtgagacaacctctcttgaattctaagaaaaccatttattcaataattcagcagatggaggggtatatgcaacatagccccaaagccaaataggagtgatcctgggttgtctgtctgtattttttatattctttttaaaattttttatatatttttggctgggcgctgtggctcacgcctgtaatcccagcactttgggagggtgaggtgggcatattatttgaggtcaggagttcaggactaccttggtcaacatggcaaaaccccatctctacaaaaaatagaaaaaatagcccggcgtggtggtgtgctcctgtagtatcagctacttgggaggctaagtcaggaggattgcttgatcccaggagttcaaggctgcagtgagctatgatcgcacaactgtactcctgcctgggtgacagagtaagactccatctcaaaacaaaaagaaaaaaaattatttatttttagagacgggacctctctctgtcacccaggcaggagtacagkggtgcaatcacagcttactgcagccttgaactcctgggatcaagcaatcctcctgccttagcctcccaagtagcaggtactacaggtgcatgccactatgcctggctattaatattttaaaaatttttgtagagatggggccttgcactatgttgcctaggctggtctcaaacctctaggctcaaacgatcctcccaccttggccttccaaagtgctggggtttcaagtgtgaaccactgcacctggttgttttttatattcataacccttagcatatcagaggtggttatagtaatatgtctgagatagagggtcaaacatcctgtatatatacaaagagcttccatagataattagataaaagacaagtgacctgatttggatcattggaatagaatcagagcaggtatgtcagaggtagaagaaacccttgagatcattgactccagaccctgaattgtgcagatggtcccaaggatctagagagcagatagtcttggccaaggtcccccactgagtcaagggcacactctagactagaattcagggctctgggctggggctctgtctgctcctgtgctgtagcccagataactcttccaggcagctcctgggtgggctctggccatgctctcccatccccaggcacaggcccaggttagagggcctcatggcccagtgggnggttctgagctgcctgtgttgctgcaggtaccaatgctgaggacgctggggatgatctgctgctgtcgtatgtgaaggagttctggtggttcccccacatgtggagccacatgcagccccaccttttccacaaccagtccgtgttggccgagcagatggccttgaacaagaagttcgctgtcgtgagtaagattccttgcagggcagagcggggcgggctaagggctggnctggaggtccagactgctggcctcttgctgcttttgcagtctgctctgacggatttttactaacacctctgggccagggccaagggagagctgcctttatagccactgtctccttgaagccccaagagaataacccctttacagacaagaaaccaaggctcagggaggtcacaccagctactaagaggtccagctgggacttaaactcaggccatttgtttcctgtgcccaagctcttactagaaggggaggctctggaaagctggaagaggtggtcaatgaggagggaacgagccctaggtgctaggtagaatgaagagaaggtaggaaaggccctcgtccttgtccctcactacagggtacttgagtcctttgtgctagaggcatgtgcaccggaccaagagtcaggagacctgggttctaatcccagctctgccagttgcccacactgagattctgggcacattccttgccctcccaggcctcagcttcccatcttaccatgaagtctcagaccagcagccatgccgacctaacctctgatttctctctcccattctacaaaggggggataaggcccaaaggggaaggacccctatgctcaccctggcctggtcatcctctccctaggagcatggcattcccacagacatggggtatgcagtggcgccccaccactcgggcgtgtaccccgtgcacgtgcagctgtacgaggcttggaagcaggtgtggagcatccgcgtgaccagcacggaggagtacccccacctgaagccagcccgctaccgccgtggcttcatccacaatggcatcatggtgagtgggcccctggaagcccaggaggtgggagaatggagagcacagtctgtcatgtgtgtgcatacgctgtcctggtaagcacggctctggtttgctggcttaggggttgcagatcagcttctgctgcctcctctggcacccgaggctctctgccccagggaaggtgggctgccactccgacccctttcatgagctctttcttagcttttgtgacagaggatcaagsaataatcagcattcttgaaagaggtttctgatgaggatgtgggacagggctctgttacagtctttttgctgattaaaaatttttttcttggctgggcctgatggctcacacctgtaatcctagcactttgggaggccaaggcaggcagattgcttgagcctaggagtttcataccagcctgggcaatgtagtgaaaccccatctctactaaaaaagtactaaaaaaaaaatatgcctggtgattagccaggtgtggtggtgcatgcctgtagtcccagctacttgcagggctgaggcaggaggatcacttgaacctgggagatygaggctgcagtgagccaagattgcgccactgcactccagcctaggtgacaaagtgagactctgtctcaaaaaaaaaaaaaatttttttttcccctggggcttctaccatgcatctatccctttttttttctttctttcttcttttttgagacagagtttcactcttatctaggctggagtgcaatggcacaatctcagctcactgcaacctctgcctcctgggttcaagcaattctcctgcttcagcctcccgagtagctgggaagacaggcatacaccaccatgcctggataattttgtatttttagttgagacagggtttctccatgttggtcaggctggtctcgaactcccaacctcaggggatctgcccaccttggcctcccaaagtgccaggaattacaggcgtgagccactgtgcccagcctcacatctatccctttccttggcactggggacacagaaatgcacagaacggaggaaagttcctgcccttgtagacctgacattctagtggcaggagacagaccatatgctcatgcatgtgtgttgtgggaagtcagggaccccgaacagagggactggctgaagccatggcagaagaacataaattgtgaagatttcatggacatttatcgcttccccaatcaatactcttgtgatttcctatgcctgtctttactttaatctcttaatcccgtcatcttcataagctgaggatgaatgtcgtctcaggaccctgtgatgattgtgttaactgcacaaattgtttaaacaatatgaaatctgggaaccttgaaaaaagaacaggataacagcgatgttcagggaacaagggagataaccttaaagtctggctgcctgtgggccaggtggaacagagccatatttctcttctttcaaaagcaaataggagaaatatcgctgaattctttttctcagcaagaaacatccctaagaagagaatgcgttcccaagaggaggtctctgaaatggccgctttgggaacgtttgtcttttacagttgttgataagggatgaaataagccccggtctcccatagcgctcccaggcttattaggacaaggaagttcccacctaacaaattttggtcagactggttgtctgctctcaaaccctgtctgctgataagatgttatcaatgacaatgtgtgcccgaaacttcattagcaattttaatttcgccccgtcctgtgatctcgccctgcctccatttgctttgtgatattttattacattgggaagcatgtgatctctgtgacccacaccctattcgtacgctccctcccctttcgaaaatcactaataaaaacttgctggttttgtgacttgggggtcatcacaggacctgccaacatgtgacatctcccctggacacccagctttaaaatttctctcttctgtactctttccctttatttctcagactgacagacacttagggaaaatagaaaaggacccatgctgaatatcgggggttggtttcccccaatacatgtgtaaaatatacagtggtcagatggtgatgagtgccacggacaaagttaagcagggaatggaaggaaggaatgctggcaagagaagctggtttaaataaggtggctaggtgggccttcctggaataagccacgctgccacatgaggaagagcactcaaggcagagaacacaagtgcaaaggccctgaagcgggctgtgctggctgtgtttgaaggccaaataggaggccgggatggctggaggggagtgagggatggtggtagatgaggtyggggtgggtgatggaccagatcgatagggccatgtaaggccagccattggatggccatgggcttttaggctgagatgggaaggttttgaatggagcatgatctgactcatctttgaaagggatttctatcattctggctgttgtgtggagcagagactgtaggggacaaaagtggcagcagggagaccagttaggaggcactgcagtcttccagaccagaggtggcagcagcttggaccagggcccaatgttgggatgtggccatactctgggcttagaatagttaggcctgtggttagatgagttagatatagggtgtgggaggaagagaggagtccaagatgactgcagggtttttagtctgaggtgctggaaggatgagttgtcatcagttgagctggggcagcagtgggtaggcaaggtttgtacatttgtccatcagtccatccatccatccactgacctcagcaccaggccctcgtgctgaactccaggcactcctttaggtcctcaaccctgaactccagggatgaggtggtgacaaggcaggcccattccctgctcccttggagctcacagtttcatgaggggagacagacgacaaatggctaagccagtgtgtgacaacgagtgtcaccaggtgaggttctaatgttgcaagggggcttgcagaacatgtctgggattgctgcttcagagagggccaggcaggggccgtggctgcagcagtcccaagtttccagaaacattcccactctgttactttgaggcctgctcattttgtgcagagaatagcagtgaagtttgtaaaatggcaagggcytgtagttcactggggggaacgctgtgctgtaggctgcacccaagggtaggggctgtgcgaccacatggagactgcctttctgaggarcagctgggccttcttcctctgaggaagagtcctcccaccaccctcatgmcagaaggcaccatagctcctctcccccaccccctcctcaggttctcccacggcagacctgcggcctcttcacacacaccatcttctacaacgagtaccctggcggctccagtgagctggacaagatcatcaacgggggcgagctcttcctcaccgtgctcctcaatcctgtgagtgctccacagcccatggctgctggtgagaaggggctgctgcacagcctgtctgcagctgacacaggcttcctggagccaggaaagggtggagaggcatgagtgagtgcctggcagttgggagacccactctccagcactggccctgcctcggctgtgtgaccttggctaaagaatccgagcatgctttttttttcctttcctaatcatgtactttaatacaaaagtgttggcatttttatgcatgttcccttcagtctttgctcatgtgtgtatacacacatacacagatacacacacatatatgaacaacatttgagttttctaggtctcgctttccttatttgtaaaatgcaaacaattacctctgctttaataatattaaataaacttcaagtggtggttgttattcagctctgtgggctgagtactctttatcttccatgcaccccacccctaacatttacaaaataaaacccaaatagctcccacattgggtctgctttccatttcaggattgtaatatttggggtcagtcaggcctggttcgtctgtcacctcatccaagtactcgcagcgagtttgttgacagcgccagcgtaacttccactggtcatcaggagccttgcaagctaaggcagggtcagaagggtcagagttggcggtgagggtggctcagacactgatgggccctgcctctctcctcccctcccctggagcagatcagcatcttcatgacgcacctgtccaactatgggaatgaccgcctgggcctgtacaccttcaagcacctggtgcgcttcctgcactcctggacsaacctccggctgcagacactgccccctgtgcagttggcrcagaagtacttccagatcttctccgaggagaaggacccgctctggcaggtggggggctgggcagcctgggcaggttgctacagggatggaacgccaccactcacaggcacacactccagatatggactcaaggctcagccatcatgccttcacactctcgctcgaatgtaaactcaggtccccatctacttaccagcatgggtgcgttcactcctttgcacacatgcatgctcatacatgtacatacttccccacgcagacctacatgcatgcagtcatacatagccttggaaaaaacagtgttaaaaaaacgagtgggctggacgcagtggttcacccctataatcccaatactttaggaggccaaggtggctggattgcttgaacccaggagttcaagatcagcctgggcaatatggcgaaaccctgtctctacaaaaaatacaaaaattagccgggcatgatggtgcgcatctatagtcccagctactcgtgaggcagaggtgggaggatcagttgagcctagaggttgaggctgcagtgagctgtgatcacaccactgtactccagcctgggcaacagagtgagaccctgtttcaaaaacaaaaaacaactccaagtgaacacagtgcagacaaagtacagaaagtgaatgcgttgtcttggtcaggctcttagataatctcttgtatctcttctaactccagcaggctctgagtgggaaaagggattgatgggagggtttgggggccagtttttgggaaagtctgctcctacgggcttttaaaaagtggaagcagaagctggaattggtgacagtctcatagttcagaccaggagtccacaaaccgtgactcatgggccaaaaccagcctgagacctgtttttgtaaagaacgttttattggcagacagccacgctcattcttgtatctactgtctatagctgctttcatgctatgacggcagagtcgagtagttgcaatggaaacttccatgccccaaacctaaaatatttactaaacacttaccaaaagattaattaaactttataggaagcgtttcttgaccccctggttcagacgcagcttgtccagwtaaattcaacaagtgcttatgagttcctgttacgtgctaaggggcattttgcgagctctttgggggacatgaaactgaccagaagtggagcctgcctgtcagtggctcagtgtctgggggtggggatgtgacaaggacacatgtagcatgtaggtatcatgcccattgggctgtaagggccacatatccatgtgcagtgggagtccactgactgggttctgggrcgccccacacatcccttccactgttgttttaggacccctgcgaggacaaacgtcacaaagacatctggtccaaggagaagacgtgtgaccgcttcccaaagctcctcatcatcggcccccagaaaacaggcaggtctctctgctcttgaccsagcttccccaactgcctgmtgtctcagccacagaattctgaggactgccttgccctggccccactcccggataatttgctccctctttcccaggaagtaggaatgaagttggggtgaacacaaattgcctgtcagtatggaggggaaagaggtggaggaggggcctggagttctcctatttatcctgaaccatagcctcagggagctctccctgcattatcctgggagtctccaagtccagtcagagaagcccagatcagttgctctgctagtttgagtaatgccaagcaaaactggtacaaagaggactgtgatcaattagctatgtctgccagaggtgcagtagggagaagcagtgacatgattgctaagcatttgtcatccatacaaccctgcaaggcacaaatgggcactcccattttgtagacagaaactcaaggttcagagaagtcaagtgacttcccttaacacattcagttaggcaatggcaattccaggcctgaactctgatctctgtgaccctgaaacatatactcttaattgccaaactctatagcctccttctcttctgggctctctcattatagcatgtaaaccatagacttataccacagaaagtgaatgaactcactgaggaggaggtagggcagggtgcatgagtgagcagaggrtattgggaagaagagacataggaacaagatttcttagttctttaagaatttcacattaacagaactgcagggtgacaaactcccttttccctgagctcctaccaagtgccagaggacagaggcccagagctggaaaggaccagctcttctgggatgctgaggggacagcagtcagttaaacatggctaccagagtgcagtggtgaggcagattctgaggccacgtcctcgtttagtgaagagtgctgtgatagattagcgatgtccgtagtaggtacaggagttgyggtgttcacatgcatgccatatatttgccaccctggatttagtaattcyttcattgcacagatgaagaagctaagaccagagaaaggcagagaccttcccaggagcccccagtgggtygtggggagctaggcccagaacccagactctatcttttggctgggggctgggccctgggtctcaggtgtctaccctccccacaggcaccactgccctctacctgttcctgggcatgcaccctgacctaagcagcaactaccccagctctgagacctttgaggagatccagttttttaatggccacaactatcacaaaggcatcgactggtgagttggcctttctgtccacagcgggacgggaaggccatcctggggcctcccaggagtctgctgtggccacagcaggaagcagctggagcttgctcacacacagctgtcattcctgtaaacagggacaaagtgcagtgacccttgaatcatggtgtgacagcgttgtcatagacaggacactcgatgaggaggccctttgcccctttgctctaccgcctgtagtcagaygctgaggtcgaagtccacccctcccttgcttgcagagaaacatcctgagtcttggggaggagaagggtttgcccagggtcccaaggtcggaaatccaaatgttctggctctcctcactgcgtgtggctgactgtgaagcagaggtgttcttgtgggcccttcagggacaggtcgctggtctttgggcgtcacttggggaagtcattaagattgccacttcccaccagagcctgcagaggttacctttgtagaggttcccagcagagggtcctagtagaggttcccttaagggtgtgggggccagagcagagatggttttactctccaccttttcagttggcatctttctctatttgccttttttctttctttttaaaaaatgtttcatgtcaggtaggtaatgtgctgagatcataacaaggttcgaggtgggtacacctcacaygtgtgtgaacacccaatcatcacgtgcatggactgcaaagtttgcctttttaaaccttgtccatgtattaccattatttattatttttatgtcagtgggttccctgggtggagaggttatgggccttctgtctttcttttttttttttttgagatggaatctcgctctgtcacccaggctgcagtgcagtggcgcgatctcggcttactgcaacctctgcttcccgggttcaagtgattctcctgcttcagcctcccaagtagctgggactacaggtgcccgccaccatgcctggctaatttttgtatttttagtagagacgaggttttgccatgttggtcaggctggtcttgaactcctgacctcgtgatctgcccgcctcggcctcccaaagtgctgggattacggcgtgcgccactgcgcccggcccatctacctacatttctaacatctccacagtctcttgtctaaaatctagtgtggtcagatgaattattggaagtcaacatttttcaggttttagaaaggtaatgtggtgcgaaaccatatatttagtaacatcttcagcgacacctggggcagcaccctgttagcaaattcattaatatgtctgtagcaaagtatgtgaatatttacactaagtaagaggaataagtcaggttttgttgccaaatggctttgctacaaacctaggaaacaaagcctgtgttttcaaagctttctcaattgagatattgtaaacaaaggattgtggacatgcaaagaaaattcagaaagatgagagaagacgtaattccttggcccaattcccaagagcttgattttgtaggtaggtctaaagtggggtgcaggaatccagcaggcccccagaacgctctgatgaagcacatccttgggaccagcctggatcagccccacctcacaggataggatagggaccctgtacccttcatgagagtggactttgcttcccacaagccccagaagttggaccctgagtttgcataggtagattcccctgggagggtctggagtgttcctttggtttccagaggttccttcatccagaggtggccattgctctggtgggatatgggcattagtctggaaagccgtgctcacccacagcaggctggggaggggttgtgggtagcaggaggtcctggtccacagtgacggcctagaaggtgttcccccaggtcaggaaagaaagtccgccctctggaggccccctctgctctgtgccagcctccctggggcagtcctggagccactctgagccccagctcgccccctagaggcagagagagtgacagccctggcagttaagcctggagcagctgagggggcgggatcctagagtttaggattgaggggcattaccccctccccatgacctgcaactgccggcgcacccacaagtsttcagatcctcccaactccagagtcttctggaaaaggaacgaatttgaaacagggaggctgccaagaggccattcccctccagaatccccactggaggcaagtccttgtttggttgggagcaaagcttcccacttgctctctgaggacattctaccccagtgcctcgcccttgtgctgcattcccttagccccctcctcatgagttttgtctgtgagccgcctctctgggcttcctgcaggtacatggagttcttccccatcccttccaacaccacctccgacttctactttgagaaaagcgccaactactttgattcagaagtggcgccccggcgggcagcagccctcttgcccaaagccaaggtcctgaccatcctcatcaaccccgcggaccgggcctattcctggtaccaggtgagtggggctggggtggagtccctgtgtcgggaacacagggctccgtctgacactcagttactcactcactcaacagatattattagtaagcacctactgtgtgccagccctgagccaggcgcctggagcgtggtgatggctgagaatagagtccttggtggaggagacaggcggaaatggaaagccagccaccagttgactgtccacctgcctagtgtcatgcggggtcctgcctctacttctgacactgacaagaggtggaggctggttacgcctagaggaagcttagatttggtgaacagcaatgcaggatcatactgactatagcttcctcgctggacacgggtgggagtgggagctcatggaaggacaagacacaagactgccattcacagtggagaaggcaggcacctgaccaagtgaggcagttacctgggctgtgatacatggagagggtgtggatccaagcccctatctggggcatgtatgaaccagagctgtcttttttttttttttttttttttttgagacagagtcttgctctgtakcccaggctggagtgcagtggcctgatctcaactcactgcaacatccgccttccagtttgaagtgattctcctgcctcagcctcccaagtagctggtattacaggtgtgcaccaccacgccaggctaatttttgtatttttagtagagacagggtttcaccatgttggccaggctggtctcaaactcctgacctcgtgatcttcccgcctyggcctctcaaagtgctggcattacaggcatgagccactgcgcccagctgaaccagagctctctttaatgcctatggcctgacttaatttcctgcctgccagcccactgagcctgcaggaatgcttttaggccttccctggtggggtaggcggagtccctcccctggctgccagcattcctgtgattatgccacacagccaagcactgtgattcagaagtggcgccccagcagaaagccaccctgttgtccaggccgaggtcctgagcatcctcgttaacccagcagaccaggcctgtgcttggtgttggggagggggtggggccctgggtcttagcccatggttgccagagaagtgtcccctgtcctggctgggacagcctcttcaggcctggccactgtcatagttcccaccctgctttgaggctcttttctcagatgtgacagtggctgtctcccgcctgggaccttkcggtctcccgcagggctggcacctgcctcctctttgctcccatggaagtctctcctcctgccactctctgaggctggtgaggaagccccttcttactcttgttctctagggcttctgtttatgccctgatgtctgctttcctgtggctttttctttaggagaagaaaaccgagaaacacttgtcaagtgtttctgttttctgccgtgctgtgtgcccccgcctcctggcgctgtgcagggaatgggcagtctgctttcatgggggaacgtagggtagagagagagccgccacaggttgggtcagtccctgttctgcactgacactgctgtacatctgcaccttactggagagtcacagctggtttctagaaggcagaggaggggtttcacgtttgtgtccccttctcaaagattagaaaaccaagtttcagcamgtttcatgtggtggcatttgaatccaagtcttctaaatctaagaccctattcctttttctgtccatgatcaagaggggtaagggatagaaggagaagggagactcattctccccaggaggacctgggaagatgttggaggagaggaagggtgggggcctgtctcagaaggaggtcgggacgaggaggacgctgctgtgcaccatattgccccagccctgggctgtgtgtgatcctcaggggagggggttggcggctgggggatagtgcctgtcgcacaggtgccyragctctggctttctggacttagtgaattctgcagattcggacctcccatggcattattttaagtgattcagaccagccagtctcccttttatagttctttcccagtccttctgatttccataaaggagaaatgctcactttagtgcaagtggtcttacgtcctttctaacactgtcaacctctgctttcaacaaagagagcatgttcagggcctgttgcacacatttgtgtctggctggagtttgagaacattgtttttattgccatttgtgagtggttgccttctatatatgacaacagtgcagcagcgtgatcttggctcactgcaacctccaccccccgrgtttaagcgattctcgtgcctcagccttccgagtagctgggaccacaggtgtgcaccaccatgccagctaatttttgtatttttagtagagacggggtttcgccacattggccagctggtctcgaactcctgacctcaagtgatccacccaccccagcctcccaaaattctgggattacaggcatgagccaccatgcctggcatcaggaaaccctgatttcgtccagttcccgtatttcaaagatggagaagttggggctctgggaccagtggcttcccttgacactggacacagtgagaggcagagccaggactcagacccagagctcctgggtccagctgaggatcttctggccaccttgcgggctgctgtccctctcaggccacttcctttgtgtcctccaagtggcatgctgaccctctttccttgcctgcagcaccagcgagcccatgacgacccagtggccctaaagtacaccttccatgaggtgattaccgccggctctgacgcatcctcgaagctgcgtgccctccagaaccgctgcctggtccctggctggtacgccacccacatcgagcgctggctcagtgcctatcacgccaaccaggtagctgctgtccctgacccttgtgagggcagtcacagtactggcttgctgtggttagcggagagcctccaactctttctcaccagccgtggggacagatatgccctccttggagagctagacccttgggtctataaaaagattttattattattattattattttgagacagggtctcactctgttgcccaggctggagtgcagtggtgtgatctcagctcactatagcctcgatgtcccgagctcacgcaatccttccacctctgcctcctgagtagctgggactacaggtgtgagccactgtacccagctaattttatttttttaagaaataaggtcttactatgttgcccaggctggtctcaaactcctgggctcaagcagtcctcccttggtcttccaaagtgctgggattacaggcatgagccactgcacctggcctaaaaagactgtagacctgtttatcccaaggttgatacatgagaactccccaagcctgtgtcccatcaccacaggccctgtagccctaaagggacccagaaagccctgaggcaggcaggtgggagcaaggagactgggcgtggtgatggagggagagcctgatcataccaggctgtttatgtatttatttatttatttagagacggagtctcgctctgtctcccaggctggagtgcagtggcacgatcttggctcactgcaacctctgcctcccgggttcaagcgtttcttccacctcagcctcccaagtagctggaattacaggcatgcaccaccacgcccagataatttttgtatttttagtagagacgggatttcaccatgttggccaggctggtcttgaactcctgacctcaagtcctctgcccaccccagcatcccaaagtgctgagattacaggtgtgagccaccgtgcccggccatgcccagccataccaggccttttaggcaaacttgcggagtgtttgagcaggagagtgacatggactggaagctcagagagaggccagagagggatgtttgtagggacctgaggggcaggcagggtttggtgagagcttaaattctaggagaaatggcattgggcagcagaagctggtggaaagcaggcgtgagaccacagaggcctgagcttggggatacctgcccttcaacaggggaggaggagccagttctagagggtgcagggtcccatatttataagcaggcccattcctgctgccgtggctgttgcccttgtttgccaccgaagtcaaagcaggtcccgatcccctttctccctttccagattctggtcttggatggcaaactgcttcgcacagaacctgccaaagtgatggacatggtgcagaagttccttggggtgaccaacaccattgactaccacaaaaccttggcgtgagtgttgccttttcctttctgcaggttatttccctgataaggcacctgggccaacaaagccaaagtcttgaataattatgagagagagaagttagttagagtcagaaagtatggaaagttattaatatgacttaagtcatattaataaaggtatcaccttaaaaaaaagggagatgatgaatctgttctactctggtcagaccatcctggggtcttctctttggtctgggctgaacattttcagagtgttttatgtaagtaaattagatcagtaatgagcagccctaattcccacaagattttcttagcattagcttttttttttttttttagacagggtcactctgttgcccaggctggagtgcagtggtgtgattttggctcactgcaacctcaacctcccaggctcaagtgatcctcccacctcagcttcccgagtagcttgggaccgcagacatgtgccaccatgcctggctaatttttgtatgttttgtagagaaggggtttcaccatgttgctcagcctggtctcgaatgatctgcctgcttcagcgtcccaaagttctgggattacaggcatgaggcaccgcccccagccagcattagattttgacttacgatttcaggaaaaggaaacacaaatgttgttgacagttaataaccgtactcactcagaacctggtgcaagtgygttgagaatgccctcccactatgagtaaaggcctgcccgcattgcatgggctcagggctaggaaaggctgctttcctgtgctatgtcacagataagtgacacactcagctggatgaggggaccccaagagaaggaggaatcaagtcaccctccttggctccattcttgggaaagttttgcaacaagaatattccgtcttcactgtcgtgggagttgaaggtggagaagggaagtcagtccttcaccttgagggagaaggggccacctgctgaggctgtgggccatggtgtcagagatgcctgggttagggccccacatccatctcttcagcctttcaagcctcgctttcctcatctgtaagttggggataaagataataatccctgcgtcctgaaggccactgaattgaatgaaagcttcatgtggggctcttagctgagagcttggcatgcactaagtgctaaataaacggtagctgctattgtccttgtcatcatcatcatcaccatcatcatcgtcatcgtctatacctatcctatgaccctttcagaaatctctgttctccttcgctattcatgggaattctgttttcttgatgccctcatgctcaagaatctcctcatagttcctcatccagggctaaattctgatgtcagtattcctcccttcccataacagcttcggatctcatatcccaaaaatgcctttgaagacaggatgatgttggcagtcttgctgtgtcatttctgaagtttactccaaaaaatgaaattctccagtgacaggcatgcttaagtgcagctgtggatactgcatgttttgataaagatgaaatttattaaaaagcaaaagaacctccactaaacacccctcttcccattgacgctgggaggggtaaagaaggcttcttgggtttaaaaaaaaaaaagagttactcagcattgagaatgctcagaaaagatttcccagaacactgaaggatgggaaactgttcatgttgtagattgctgaagcggctgtggctggtcgggctggaggagagaagactcagaatgtgcgagctgccctttgccggaagtaggacaggcacgtttagtgcagcctaggacacatttgatcccacagatggcacatagcttctgacagtccatgtgggttcaagagcagtagattccctggkctctgccattcctggggtccatgaacatggctttaaggtcggaagtgggtggctgagccagctcccatccaaagactttcccacctccacaggtttgatccaaagaaaggattttggtgccaactgcttgaaggaggaaaaaccaagtgtctgggcaaaagcaagggccggaaatatcccgagatggacttggatgtaagtggtggacacactacctgtagcacctgcataagggtaaggggtccctgtatggagttgagggggattctctttcctttaccatgcactcagcatgttcatggccttagcatttcttggacagtatttgtaagaggaggaaaatgggggctgggacatggtgggtcagacctgatttcgtcaaacaagtgttggttaccttctactaagggctgagtgctgtggggttttgaggatgagccagacatgttctctgccttcaaggaactcctggtcttggaggggtatgagtcccaacaccactaagtagaatacaggcagagagtgctgcgcgcagtcagagagggcacacaagtgctatgggaattcagaacaaggggatgtcacttgaacctgagaggggtaaaaaaggctccttaaaggagggatgggggtctctggagttgcgcctagaaggatgagatccattttgtaggatttggacatatggaatgggagggtaggtaagaacagcatgtgtaaaaccatagggggaaaaaagaaattttaaaaatatatagaaaaagggtcacagactgggggtcttgttacttcctccttttcctacttgcttctgtttttgttttgttttgttttgttttgtttttgagacagggtctcgttctgttgcctaggctggagtgcagtggcatgatcatggctcacagtagcctcgaccccctgggctcaatcgatcttcccgcctcagcctgccatagtgctggtattataggtgtgaaccaccgtgcctggccctggccctgcccgccttgggttttgattattaattctctctcctctccctatcagaagaattttgacttagtgagctatattttgatgctcctgccaactgggagttcactattggaggctaccatttagaaggagattgtggataaataagaggtgtatggggggtggtgccagcagcatggtgggttttttgtttttttgttttcttttgagacggagtttcgcttttgtcacccaggctggagtgcaatcgcgtgatcttggctcactgcaacctccgctttccgggttcaaaagattctcttgcctcagactcccgagtagctgggattactggcgcccaccacctcaccccgctaatttttgtatttttagtagggttttccyatgttggccaggctggtcttgaactcctgacctcaggtgatccacatgcctcggcctcccaaagtgctgggattacaggcatgagccaccgtgcccggccgagcatggcgatttttagaggaggtcactcttaagtcagtacacaaggtctgagctttccttcccgttacagtcccgagccttcctgaaggactattaccgggaccacaacatcgagctctccaagctgctgtataagatgggccagacacttcccacttggctacgagaggacctccagaacaccaggtagccgtggccaccacagccagactgaacgtttgtgaaagctrggacatcccaccacacgctgagccagacctgcagagtgggaagctggaccagggcagctgcrcacttatgagcaakactctgwggaggtctggtggggctgggggagcacccaggcggatctgcaagcacctcggagcacccaccgctgggtctgcggcctaagggacctccctcgccagcagaggtccattccgttcccagctgctcctggggaggccgcttcctggtaggagggagtccacgagactcttttctgtccctcactgtgttccgccgactgtcccctstcgtcacccatcactccctgcttccgcagggcgcccctcagtattcgctgccatatgtccctgtcctccaggctgtaggggaggagagcctggccgggggagacagactggacatttccctgtttcgagccaggctcttccaaggggccagctgggtccccggagtcagtcctaggctggatgggagggtggccccctcaagaggactcccagcctccacatctggttcctaccttcacatctcaccctcccgttctggggaagaatttctggttcctacagtatccactccatcctcaaggcttcccgcagggccttggggcactgccttgccatcgggcccagttctccgggccccasctgcacccctttcttccccctgggatatgatgtgtggtgtttcctgtggtaaaagactgaggcaggccaggggtctgccagtaacatgttcccatgtacagacacggtccccacaccctcccagcctcaggcccaggcagacatgggcgagctggtgagactgccagccacggctttgcttagccacctgtggccgagggctctcagagacccccttaacctcccaaatactaagaagctaaaatattttaatattttgtttttttttttcttggtgccagagtttataccctgggtgctggggtcgcactgtgttatatatatatatatatatatataatgtgtatatatatatattctattttttttggttgggttcgtttttaattcagtcctacaaaatggtggtaagccccagtctcaggggtcaccctgtcttagagctagagatgaggtggcagggagggaggctgtgtcctcagtggcctggggctgagcagaccttaggaaggggccctccccagtgccgtggctgctctggggctaccccaggtgaacagaggtggtgagatgcgcagggaagaccagctctctccaggacatcgggctgcgtgaagtccagtgaccctgaggggattttggccaaaggaaacagccagggctgggctaggagagctggggtcaaaagctgccccacccactctccctcacatggtgctaggctgggagctgccctgagagctgggatgcccaccaaggcccacagaactgtctccaggcccttgtagacagtgggatctctgggctgatttctggttggggtctgctcctaccccaccccatttaacaatgtgaagtgactgaggctggggtgcctctccctggccccctccaactgccaaattctgcttccctctgaaccccaggaaatactttctggagaggcttgtcttgttcagaagactctagcatcttggggctggaaggtcctttgacgggtatgaaacaggtccagaaaggggaggtggcctgcttggccgacgtcatggagccagctgggagcagggctgagcgttgaacccgaggctcccggttccaagtcccatcgtgctcctcttccaatgccacactgcctctgagcccatccttgggaccctactctgtgccaggttcctgtcccttcctccgtcacagcatggtcattccaggatatggggacaaaccactccttcccagccagggtgcctttgagccttctcattccgaggtctgcgtttgcatccctgtcgtgttctccctcgaggggtccttccccagcctgtgggggcctgggtctgttctgagctgattcccttttctccagttctctgctgggatgaagaaagttggacactcagtgggaccagctgcaggtggtttcactgtgtacacagcagtgtccccatcatgcctctcaatggggcctgcaagcctgggaacttgggcatcgttgggccagcaggatgagcagcaaagggtctgaggacagggtggcatgtctgcttgtgtgctcatgaagacatgcccacgccatggagccaggggcttacagagaggggcagtgacttccagagtcccatccgtcagtgaggggactgggctgcgggatgggtgaggatcttacagctcccaggttcggaaatctaccctctaggcctggaggcctctctcgcagagcatggaaggcaggagaggtgggctggcctagggcaggagctccacttctctctgcctctggctatgggaaggagcaggcggttggaaatcctgtgacagcagagatcttctggatttttgcctggacccttctgcaagcctggagactggacctgccacatgttccaagtctgtctgcctaggtcactgctgccacttctcctcccactaacagacctttcttgaagacccactaggtccagacactgccgggacttgcaggtatggggggtagaaggagaggcagataagctgcctggggggctgttagctaatgggtacaaggacaccccctcccgagaagagaagccacagatgagtgggccagcgaggccagtcttcaatgtccactaattcactctaagcatttggccaaaaaaaggagagagaaataactgaaattgttcaggtggctccatcgtctattctgtggtcccctccatgagcctttgccccagggtgggtgcaggtgcgagtgtcacctgcagctgcctcagtcattcagagttccagagccttctgtggtggagcatcctgctgcttggaggatgagtctgaagtttaaaaatgggccttttctgagcccccctgatgagcagtcagtgcttctgggcccagctaaggaagccatctgttcccagcagaggagagctgctgcgctgacctgcagaggttggtggtcccagcacagagctgtgcccatgggcttgttagtgggaaaagcaaatacaacaatgttttaccaaacatttaattatgaatgcccactccccagcatctagatctaaaattattaacattttgccacattctttttctctctctgtgtatgtatatgttttctctgtcctaatttaaaagtacattgcaaacatcatgaaacttgatccctgaaagcttcagcctgcatctcctaagagttagggcattgtcctacacattggcccagtatcacagccaagacgagaagtcatttcccagcgatgtctgctatctaatctgtattcaaatccccccaattgtctcccaggtaacttatgtgtctggttttggaatcagcatccagtcacggtgcacacattgcattttctaactatgtttttaaaacctctttgaatgctgaaaggtcttccctcagctcactttgagtttttaaatgacattgtttttgaggccctaggcctgctgtctttttgaagccccacattctgaatttgtcagattgtttgctcatggtgtcgcataaccacttcttctatcccctgtactttcaaggataatttaggctacatgagattttgccttttgtgctgacttgacagcttcacttctgcctaagatgcgcctccactgtcacctgtaccaagtgccaaaacagcagaggggccagttagagcaagagctctgggggggccggaaagtctccctggagaaggccgtaatatctgggccttggaaggaaggacacagggctctggaaggaggaggctgcatgcctgaaggctgggccttcgaccctggggatgggccacagggcaccaaacacatcatatgtctctctctttctattttggggtcccagggttttcatttcctggagacccgtggtctgtgtgcactggagcagagccaggctctcagttgcagcagggaaaagcctacatggggaactgcctcccgcaagctgtggtgtgagaagagccctggctggcagcaggagctgtgaagtttcatcccagccgggtgcatttagtagctgcctgaccatcttcctcccaggccctcagtttcttcatctgtagaatgagcagataggggccacagcagggattttcacacatcaaaggaggcagcctctgctctagttgatgtgaggatgagggggcggcctagaccccctgctgcccaggccgttgaggcaacactgggttcctggcttgacagctgtgggctggctgcccttgccagctcagacggctggcgagttttcagcttccctaagggactggcatagggttttgtggggtcaatgccaggaacctgggggaaactggatgcgttttatcctaagaagttcatccctcctgctcttactgtttccggccctggaggagaatgagggaggagagggttttctatgactgtgttagcttttattattagcaagagggctccttttgtaatttgtgcatgaaattcatgtcatttcctgggagaggagagggccgactggaragggtggggggcacactggggaagcaggcagaggtttccttcccttgtaggggggtgggragagtggggagagggggtgctatccagttcgcctgatgagggctctcgaaccagccgttttgggttgtgttaaaggtgagaccttcctccattaatgtacaatctcraactaactgctaataaagtggggttctgtttgtacaccttggtcctgtctgacctttttgcaaggcccgcagggaagggtggagtaggggtgtttgcatgcacggccaaagcccgcttgtccctgccacctcaggcatgcacacgtgcccacatgtatgtacacacctatacacatggtgacttggtcaacgcagatcattttcactgggttataartggaagatttcccagatacagcagaggcctatcctagggcagccacagggggcatctcaggtgatagaagccctcagacaagctggattgctcagaagccctgggtgtcgggcactggaccgagaggagacttgggggctggaacaatttctgctactaatgtatattgtagctgggggcaagccacttttactgttttatcccatttccctcaccttttagacgcatggagggagttggactccatggcctcacttgaagaacttgcctaaaacatgcagattcccaggtctacttccagagattcagctccagcagatgtggggtggggcccaacatctttaaggagccctccagtacactgaggaatttataaggagccctccagtacactgaggcagcccagtgtaactctggctcagagtgggaaactctgactcagatccatggttcctatgggttctaattaatacggagagccccactgtccaggaaaacttagggtaaaacaaatgactgaagccctcacagcctaattgagggccagactcgagatttgcctggagaaggagagttcacaggtaggggcccaggccagtgtctgcaatgcaggtgatcagacatgctccttcagaatccccttgggaagctttaaacaatatacattcctgggctcccccaaaatctgctcactcagaacctctggggtgggacccagcactgtgtactttaacagactccttggtgttcagggaagtttgggaacactgaatcaggccaccatgtttgtcagagacggtacccagaaatgtgcacagcttctgagggacagaggaggggcatgctggggacacagctgggcagtcctgcttcccaggacccagtatgttcaaagtgaaataccacagtgccacctctgatggcacaagggcagcacctgcagagccctctttgcagttcgtcagctgggagcttggtttgggtcaggtggccctcaccagcaagaacacagctggaggctgcatggacaagagcagatccagaggcatggtgcagaaaggtgactgtgccaactgaggggtcagcctgcaacagggatttttgaatttacatacagctgagattctgttttgaaagaatcacttaattgaaaaccaggtaaaggtgggggtgctctgtggttggagtgggagtgaagctctggactcttcccagctcacctcctccctgtctctcaggctatcttggaaccctaagatttctcaaaacacattgtgaaaacccagcccagttgcttccagaggtcctaaaagtcctgcagttctaataggctgaatgagtagcagcccatcagcccctcctcaccccccacggggatgtccacccagtaaatctggtgccccaggagtggtttgggcttctagaggtggggagttaccttggagaagcctggatcatgcgtgtagggcagtgtgtttcacaataggaaaacgctgggaacaacctagatgtccatccacagggtctcagctaggtaacctccagtgtatccattcactgtaatgatgattcagttgaaagtaatgagctcagtctccaagccctgctagggaaatttctatgacagacttatacaatgtgaccatcatggaaagagaacactacagtttgtatttttcctggggttgtagatagacgtctcatatcaaactgatactaggggaggaaagactgagaaggggaactttcaaaggagacttcagccttggctgaaatatatataagacaaggataatgcatttgcatatcatttgtggaatgaaaaagtcttaatgaaaaatagaaatggacaaagcagaaagggggactccaagc

SEQ ID NO: 95793 - DNA, 97980 bp, Homo sapiens
aataacaggccccaggtctaactctcaagctctacctcttaagcactctgggtactgtcttcttaaaacaacctgtacatctcatctgctggcttgtcctgctctctggagccttcctgaacaaactggcaccctccctcacccccaacagcctttcagagcttcctcacaattgaatacccccagttccttcaccatggctatttgcaagagtgatgaatggcctgtggagacctttataccccacactagaatttgtggtggccgatcatatgctgaccagcctgttcacattctagtaggtcctgaatttcagagtgctattttttccaaaaagggaccttgcaaaacatctctccttgatccatttgattccttacttggtcctgtttcttttctttattccctcttctttacctccaaatttgcagtcttttttttttttttttttttttttttttgagatggcatctggctctgtcgcccaggctggagtgcagcggctcgatctcggctcactgcagcctctgcctccagggttcaagcaattctcccatctcagcctcccgagtagctgggattataggcgcacgccatcttgcctggctaatttttgcaattttaatagagaccgggtttcgccatgttggccaggctgggctccaactcctgacctcaagtgatccacctgccccaccctcccaaagtgctgggattacaggtatgagccaccgtgcctggcccaacttgcaatcttaaaatcacctgtggaaccagcagttctgcttctggatatatacccaagagacatgaaaacatatgtccacacaaagacttgtacaagaatgttcataatagccaaaaagtggaaacaacccaaatgtccatcaactgatgaatggctaaacaaaacagggtatatctatgcaatgcaacattattcagccataaaaaggaatgatacttttcattcaaaaaggaatgatacatttcagcacagcatggtgaaaaaaaggaataaaatactgatacatgctgcaacatgtatgaaccttgaaaacattatgctaagtgaaataaatcacacaaaaagctacatattgtataaatccatttatatgaatgtccagaataggcaaacccatagagagagaaactggattagagcttaccaggggatagtgggagaagtaaggttggactgattgctaataggtatgacgtttcttgtggggttgacgggaattttctggaattagtggtgatggctgtacaacacagcaaatacgatggcctccctcattcaaagcccacctggagtcacagaactgggagtattaaagataaattattcaactcctttgttttgttgatagggaaatcaaagccttgagagaggatgggactttctcaaagttacaaaatgagtcgttggcattgctggacctaaaatctcgtattcctctttctagtagtacatgcacttttctaaactagattacacaagacatctccccaaactctactggtagcccctattgccaataaaagaagcttcagattaccagtttcttccctgacgtctgaaatcaggtccatttcataagttagtgttaggcgttaggtgactcactccaaataccaacttatttgtacctacctagcaattagactgaagtttttcaacagccttgccttcctcattctggcatgttgaaaaatgagataaaagtagattttttggcaaactgttgcttctatttctcaccagaacttggtggttctggtggacatgctacggaaaaggacatgtgctgagctctttgggaaatctctttttaaagacagggtctcattcgctcaagctggaatgcagtggcatgatcataactcactgcagcctaaaactcctggcttcaagtgatcctccagccttagcttcctgagtagttggaattacaggtatgagccatcatgcctggctctaggagacattttaaaatgggccaagttttacttctatagttcaaggagtttgtccttgatgaaagtacaggtgtgcagaaataacacaacctgaaatgtagaaactccccttagaatggaaggaaaccaatagtttgggagttgtgagtagaaaaagagtttagttggtacatcaaagaagaatcaacagaagtaatgacattcggacagggtggtaagggacaggtggagggcacagcaagaatgaagaggcaaaaccgaaaaagaatgaaaacattagggtgaagcttggaatatgtgtagagaaattgtggaaaacaaaataagaagtgttggggacaaattctagagagctattaatgccaggattaagaaaaagtgtttaatttactaggcracaggatgttgttgaggggtgggttaagggttagggacagacactgtcattcacactggtaaagccttggagacaaaatttggcattatttatcaaactccttagacagctgcacactctttggacctggaatttcacttctaggtattttctactaagaaatataaggatgttcattacaacattgtttctaatattaggaaattagaaacaacctaaatatctaactatgggataatggttctcaactggggcgatttggaaatttctggagatatttttggttgttacaacttgaggtgggtgttattggtatctagcggtagaaattagagtaaacatcctgcaacgtacaggacagcctcccacaacaaagaattactggacccaaaatgctgatagtgtcaaggttgagaaacctggctgtggacggtagtactatggtgttctggtacctccatacagtgaaatgctttgcaatcattaaaatgaatgggacaggctgggcatagtggctcatgcatgtaattccagcactttgggaggctgaggcgtgtggaccacttcagtccaggagttcaagaccagcttgggcaacatagtgagacccctakctctatgaaaaatacaaaaattagctgagcatggtagtgcacaccttcagtcccagctactcaggaggctgaggtgggaggatcgcttacgtccccgaggtggaggttgcagtgaaccgagatcacgccactgcattctagcctggctgacagagtgagatcctgtcaaaaaaaaaaaaaaaaggaaatacctttgaaaggttttcatgatatagagttcatagccctgccaccctgaatgtgtctgatgtctcctgatcttggtagctaagcaggattgacctgttattattcgagaggagaccactagctggcctccaacttctgggctcaagtaatcctcccgcctcagcctcttgaatagtataggtatagcccaactcacttggatcttctaattcaattaaatcctgacattttctacctggagatagcctcagatcccataggttgagagctcagtcccacaagactgttcccctgtgcctcgcctttgggcctgcagaacttctgaccagccagtttcaagttggggttcccatgacaccctctttgggttcaattaattactagagtggctcacagaactcaaggaaatttactaacctttactggcttattataaaggatatcacaaaggatacagatgaagagaggcatagggtgaggtgttagggaagggactctgggcttgcacggtccctgggcttgccaccttctaggaacctccttgtgttcagctgtccagaagctcatctgagccctgtccttttggatttttatggaggcttcattacacaggcaagattgattaaaccattggccactgatgatcaactaaagcttcaggcccctttccccttcttggaggttggaggatgggctgaaagtcccatcctctaattgtggtttagtctttcaggtgaccagcccctcagcctgaagctacctagggattaccaggcactggtcaatcattggtatacaaaaatacatcactctggagattctaaggattttagaagttgtgttacctggaaatggtgttgaagaccaaatacatgtatcacaatatcacaatactgaataccaaggatgtgtcaggcacccttgcaaggcctagggaatcaacactgacaggtccctgccctcatgaagctcacagtatagtgggaggccagacaataggacaaggaaacaaaaacaaacatgataattgctgatagtaataaatgtaatagaaaaaataaataggctgatatgacaggcagaaaccggggagagggtatttgggggctacttgggataagaaaactagagatgacctgtatgacctgaaatctggaagttaagaaggagatggcatgcagagagctgagaaagcgcattaggttagagagttccagttccttatgatgggagtgtctggaaggtttgtgctgctacacagcctgccagattggggggtgagcactcgtgcacactgctggatgagtgcagtgccccaagaatttattacactctacaataaaggaggcaatctgcttcccagtaaaggtcatttttgaagttcaaagtgctagcaactgtctataattatgcgttccacatagtttacaacatagaggtgccaggctatagtggatatagtcatggaagctaaagtaagtttcatccagaaagaaaagtgctctgtctccttcctagtgggcaggargggyattttaatgaagattctggtatttcaagattcactggagttgctagaatgtggaccattgtgtgtatttctttctttccttttctttttttctttttgagacaaagtctaggtcttgtcgcccaggctggagtacaatggcgcaattttggcttactgcaactttgcctcctgggttcaagcgattctcctgcctcaggctcccgcgtagctaggatgacaggcagtgccactatgccctgctaatttttgtatttgtagtagagatggggtttcaccctgttgcccaggctggtctcaaactcctgacctcaggtgatccacccaccttggcctcccaaagtgctgggattacaggcgtgagccactgcacccagccccttgtgtgtatttctgacagacaacccaagaaattacaggctgaaaccagaaaagaacacattaaagcaccaagagaaagttggagtgggttgaagggaaacagatttttaaagttaaggctctgtgaaatgggtagaattaactacaggttaaaaataaaatgttaactaaaggttgcctctgagtaacaggattatgggtgattttaattgtcttctttgtgtatgttcaacagtgactataatatgtattacttttggaataaaggaaaacctgaaaggtgtgttgttttataagggcccttaggttgccaaaattagagtcattgaaatctaaagctgataaaaactttagtgcaaagattgtgacatgggagactacacataccagatccataatgtacatgaggacagtaggccgaggggccctgcacattgaaagcccacatgggagaagcccttgggaaggggagtggaaggatgaggcaaggggccggggggatgcagaggctggcaggcagtcatttctcagcttcagccattcccgccatgggggaatgtggacagagaagccaaacaaatctcctaaacagtaaatgtcagtcttctgtgtcagatatttaagaaaactaacagaggtcagagaagacacacctacagcaagtagactgtccctgtgctgcctttttgcaacccctgctttggcagtgctcaagcccacctcctgctctgtgcagacatctcttctttgctcttactagaccaaggtgaaagaaaactctcaccttctcccatctggccccacagcatctggaacacactgatcctcataatccttgttcttgagaaatattaatgacttaatctcccaagcttgctcccwctcctgtgcaggccatctcagtatgttttgcagacaagacccagagaagtccagactggacttgttgcagactgcaaaactgccattggaaggcctcygtcccagtccttctacagagtagccagtgggattcccagccatgggcgaggtgacagcagaggaggtggagaagttcctggactcgaatattggctttgccaaacagtactacaacctccactaycgggccaagctcatctccgacctccttggggccaaggaggctgccgtggacttcagcaactaccactccccgagcagcatggaggagagcgaaatcatctttgatctcctgcgggactttcaggagaatttacagacagagaaatgcatcttcaatgtcatgaagaagctgtgcttcctcctgcaggcagaccgcatgagcctgttcatgtaccggacccgcaatggcatcgcagagctggccaccmggcttttcaatgtccacaaggatgctgtcctcgaggactgcctggtgatgcccgaccaagagatcgtcttccctttggacatgggcatcgtgggccatgtcrcacactctaagaagattgctaacgtccccaayacagaggaggtactctcttccccatgagagagagggcatggggcattattacatggagttctggggtacaggtggggtgaggggcattggccaccaagacaaggctggtgacaacatggtgcttcttctttatttatttacatatttactcataattctttattttgaaaaaaaaattcaaacttaacagaaaagtttgaaataatacagagaactgtatgtctttcatccaaatttatcattcattaacatcttgccacatttgctttctctctccattttctctgacccatttgggagaaagttgcagacatcatgccctttgtctgtaagtactggcgatgctcccatcattgtactgtggataggtaagaaatgtccctgttctggaaatacacagtacttccacagtacttctacacagtacttccacagtacctccacagtacctccacagtacttccacagtacttccacacagtacctccacaatacctccacagtacttccagaacaaggacatttcttacctatccacagtacaatgacggaatcatagaaatgtaatgtggatacgacaccattatctgctgggagtagtggcacatgcctgtagtcccatctactcggagggctgaggcaagagaatcacttgagcccaagagtttgagaccagcttgtgcaacatagggagactcctgtctctacaaaaaattttaaaattagctggatgtggtagtgcactgtgggggaaagaaagagagatcagactgttactgtgtctatgtagaaagaaaaagacataagaaactccattttgttctgtactaagaaaaattattctgccttgagatgctattaatctgtaaccctagccccaaccctgtgcttgcagaaacatgtgctgtgttgactcaaggtttaatggatttagggctgtgcaggatgtgctttgttaaaaatgtgtttgcaggcagtatgcttggtaaaagtcatcgccattctccagtctcgagtacccagggacacaatgcactgcggaaggccgcagggacctctgcccaagaaaccctgggtatggtccaaggtttctccccactgagacagcctgagatatggcctcatgggaagggaaagacctgaccatcccccagcccaacacccgtaaagggtctatgctgaggaggattagtgaaagaggaaggcctctttgcagttaagataagaggaaggcatctgtctcctgcttgtccctgggaatggaatgtctcggtgtaaaacccaatcatatgttctatttactgagataggagaaaactgccttatgrctggaggtgggacatgctggtggcaatactgctctttactgcactgagatgcttgtgtaaagtcaaacataaacctggcctccgtgcacatcaaggcacagcaccttttcttaaacttatgacacagagacctttgctcacatrttttcccgctgaacctctccccaccattaccctatagtcctgccacatccccctcacctagatagtagagatagtgatcaataaatactgagggaactcagagaccagtgctggcacgggtcctccatatgctgagtgccagtcccctgggcccactgctctttctctagactttgtctctgtgtcttatttctttcctcagtctctcatcccacctgacgagaaatacccaggtatttctcatggaggggctggcccccttcagttcacacctgtggtcagcatcaatatggtgacttcccaggagtaagggaccaccaggctgcctaaggtggggtgaaccagcccaggtcagaaagggaacaggtcaaactctcatgctggttagtagtgggattgcacctgtgaatagacactgcactccagcctgggcaatatagcaagaaccgtaatgaagaggaaaaaatgaaaaaaggctgggtgtgrtggctcacacctgtaatcccagcactttgggaggctgaggtgggaagaccacttgagcccagaaatttgagaccaggctgggcaacacagggaggtccctgtctttacaaaaaataaaaaaactcgctgggtgtggtggtgcacacctgtggtcctgtctactctggaggctgagatgggagcatcacttgagcccaggaggttgaggctgcagtgagccatgattgcgccattgcactccagcttgagtgccagagtgtgaccctgtcaagaaaaggaaaggaaaggaaaagaaaggcaaggcaaggcaaggaaaggaaagctaccatccaatcggctgggtgaaaaggaaaaaagaaaaaaattgctaaaaaataaagaaaaaaaagatgcaacaccatgatctaataaacagttcatattcagtttctgtcagttgtctcagacaccgatgtagcgctgtcttttgagtctccttgaatctgggactgttcctcagtctgtctttgttttccacggtgctgacatttttgaagggtacaaatcaaatcttttgcagaaatgtcctttcatttgggcttgtctgatatttcttcataattagatgcaggtcacacatttccggcaggagcagcacagaggtgatgtgtttttctttgtgctttacrtgyggaggcacaatggcagtctgtcccattactggaagtgtaaacactgatcacttggttaaacacttggctctttcttmcaggatccactgttccctgagattctcctggtggttytgacaaagacttctttgatcaccttgggcaaatcactccccctctctggatgttggtttttaaaggcagtaatgcagttctccacatagccctctgcccaggccaactcctactcatccttcagaaaaagtcacccttcctcagggaggccctttctaatctccctgttatagccccctccctaagccatttctcataataagccctggaggtcagggaccaggtctgccttgtccaccaggcttttactccaggacccagcacagtgtctggcacaaagcatgtgcttggtaagcacttggtgtaaaagactcacaatcaagtaattatgcaataatttctttaacactgtctcacccagaagaatgtttgtcccattacggcagggcccatgcgggtcttattcactcctacactggccaaaccaggagctgtgttccggcatttccaaaatccagcctttggacatggtgtgattttgtgctcattttacctctggagttacttcagattaagcatcttaaggttaaaaataggagaggaagggggcttcagagactgtcttatccaactgccttatttaatagacaaggaaactaaacctaggagagtgtgggcagaggcttgccaatgctccacatgcatgaatgcaagaattcaaacaggtaggccgggcgcagtggctcacacctgtaatcccagtgctttgggaggccgaggcaggcagatcacttgaggtcaggaatttgaaaccagcctggccaacatggtgaaaccccatctctactaaaaatccaaaaattagctgggcctgggggtgcatgcctgtaatcccagctactcgggaggctgaggcaggagaatcatttgaacctgggaggtggaggttgcagtgagccgagaccgcaccattgcactccagactgggcaacaagagcaaaactgtctccaaaaaaaaaaggattcaaacaggtatcttttggtcttgggctccttagtgagataagccagacttgtgcctctgtggaaagcatacccggtgggctcccacatgggcgcatggctcccgtcatctcctcttgggcatccaggggccgggcaatggttctccactcaggagactttcsggaggactcatccaactggactggagtctattctcccttcaactcttctaactgtaattgtagccaacaaggattgcctcactcgtttcccctcataacgatctatgtcataactgtcattatctctgtttcacagatgatgaaacagaaacccagaaagttttggtaacttgctcaggattatgcagatagaaagtggcagatcctggctggttcaagtacacaggtgtttataactaattgatcacagccagttatagatttctttgttccccctccactcctactgcttcactcgactagcctaaaaaaagaaaaaaggaaagaaaaaaaaaagtggcagactgggaatgatttgaactcaggcattctgaccttgagctcacaatctttttttttttttttaactagttggttcagccagggagtcgttacagagccttaattcctcttaattgctctgctattctgtactccctcctcctctataaaatgagggcatcgcactgggtatttgagcaaggtcattggatcatgtagcagagagttaagatcttatgctttaaggtgagatctggatgtgaaccaggactctgtcactttcaaagaatgtggccttggcaaatcgtttagcttgactgggtttatttcctattttataaaatggggaaataagagctaccccacagcattgttgtagaaattaaatgaatgaattatctcatcagcagtgttcttggcacaccgtaatggctcctattggcagctcccgttccttattactattacgaccattttgctactgttattgttgtcgttgttaaggatctattctaagtgatggatgctgtaccaggtttgagtggaatttggagaagaatccagtcttgcccttctggagctttcagtttagattctgtttgtgggaaaacagagaacataaatgctgagagcttctctataccttggtgttaagggattgaggattcagggtgtttttctgagtctagaagatcctgacttaacagtttttggagcctctgtgctaagggacggcctgttgctttctgttcatccgtcagagtttacccaggaaaccacacctcaccttccctggaaacttttggggcctgagtcagtgtccctggccagtgacttgggcctgtgggtgaagtctgtctaggccagtcatccctgcgtacttggtatttgcacgtgtttacttcaggaaatcttactcaattcatggccctgggcagaatgcaaccttgggccccagtggcagaatgcaaccttcgccaccaaacagtgactggggctgggtgaaggagaaggaaggtggtgtagacaggggtctagattctttctggaccaccaaaaagtgatactctcaacctttagcaccctccaaaaacctgagaaatggttgcaattgctgcattgttgaaatgcgaaatcacaaaggtagttcttttgggctgtaatgaacttccccaccccctccaaattcctacttatcttgggaattgccttgggaagatttgccacaggactgccagaaaaaatataagatgcccagtaaagtttgaattttagataaacaaagaatgatattttagttaaagaagatcctgtgcaatattttggacacagttacactaaaaaattatttatagtttatctgaaattcaaatttcattgggaaggcccacttgccattcaatatttacttgtatatcattcctttgccctttctcctggcaggaaaacccatgaggtctgtctgtctgtccctgtcgatcttattcaccactggcccctggcacctagcccagtgtcttggacagagtgcatacttaccatagtttattgagtgagtgaatgactaaatgtcagcccttcaccagcacttcctctggctaataaattccatttctgaaggctgtacctgagatgaccgtcatttgtagaccctctcacatttgttatctgcccctgctttccttcatttcccatgagacctgagacctagcaggctagaacaggaaaacaaagaaaaaaaaaaccttcacagaggaccttattcaatactctgacttcagcaaaggggaaattgaggttcagagtgttttcaactactgacaatgtactgagtggcccttgaagccactcataggacaagtttctccttatctgggtccccagcgtggtctgcttcacatgctttgagtcgtgggctcatgttttgcatgacattccactataccatgagaacccactgagaacaacctcatcttacaggtctttgcatatacaatgcctggcatagtgagtgctcaatgaatatgaatgaatcaatctgtcaatcagtgaatcaatgaataagtcaatgaatgaataagtggagcaactgtgccacttaccagcaagggagttgtctataaaatgggaaaggtggcagttctatttggcagggctgatgtgagagttaatgagataatatatgtcagttgtctggctctgagcctagtcattattactcagtaaatagtagatctcatcatgagatgcaacagagcttggcactgtgaatgtttgcaaaggggaaatgaggaatctgggaatgagaagtagtgttgcattgcactttaaaatccaaactcagccaggtgcaggctgacacctgtaaccccagcactttgggaggccgaggtgggaggatcacttgagcccaggtgttcaggactaccctgggcaacacagcaaaatcctagtgttacaaaaaatacaaaaattagtcgggcatggtggtacgcccctgttgtttcagattctctggaggctgaggtgggaggatggcttgagctcaggaggtcgaggctgcagtgagccatgatggctacactgcactccagcctggatggcagagcaagactctgtctcaaaaataaataagtgaatacataaaaatgaaatcaaaactctttcccatggcctccaaagccctgctggatctggcccctgcctgcctctttaacttccttgccctctgctttccctctccctctctatgctttagctacactgattttctttctgttcctcacgaggaccagcctcattcctacctgctggcctttgcatgctccgtgcttagaatgtgcttcatatacctggctcccttgatccttcagctcttagctcagcattacatcttcagagaaggctccctacccaccagcctgccatccctttcatcactctctacagcaccatccagtccatttccttcaaagcagtttcctcaagttggaggaagaatgcctagttgtttacttgcttttttgtctgtctcgccgtttgaatgtaaggttcaccttatattacaacagtaatgttcattgctgtagtttcagggtctggaagagtgcctagcatatggaagacactctgataatgctaactgaatggatgaatcactttggtctttccctagctcagcctctgattctaggatttaaaataaatataagttggtgcaaaagtaatcgtggttcttgccattacttttactagtttgagctaaatggcttctaagtctccttctgcctttgataatctgagattctgtgacatggttgtttagaacactttatatgctgaatatatagggatgataatgatcatgtaaatgccagtcaattggcagttgaagtactcatgaggggagttccaggactgagtacccagtgggaatgagctttctggtggatttggtagcatctgccttggatgcaggtgaggcccaaatatttgcttttcctgaaagaagtgaacattgggaaactgaaatgacttcatgaaatgaatctgagcatactccacctagacacgtgctcaggaactcatcagtagcttagaaaatgacacagataccacttcttgactaatgcctttttagagattttgcttaatcctcaaatgttaattcaagtacagcactacaagcttctcttaattcctttacccttcacctggttttaaacagcttcactgataataatgctgttgactatttatttaatcccattccaactagaagaaatctatagatgcagagcattatgctctgaattccttccttccttccttccttccttccttccttccttccttccttttttagagacagggtcttgctctgtcacccagggtaaagtgcaatggtacaatcatagctcactgcagcctccaactcctgggctcaagcaatcctcctgcctcagcttcctgagtagctggaactacaggcacatgtcaccacacctggctaattttttttgagttttagtagatacaagatattgctatgttgcccaggctggtcttggactactgaacgcaagcaatactcccaccttggccttccaaagtgctgggattatagacgtaaaccaccacgcctggcccagacttagttttagaaaagttctgtgaattggctctatgaagtacatttccactcagaacggcgtgagctgagcatgtttgggctggcccgcctcccaagcaatgctgacagtccaaaaacctcacagtgctaccaataaacagraaggaggattcttgtaaatttaagagaacaattcaagctctgtcttttcatcctgaccgcatggtccaccacagcctataatggcttctctgggctgcattaggggaggtttatggaggtgtgtgctcctctatacactcagagcttcaagccaatcccttgtgacctacattactattattgatttttctttgagctggcctgaaccttggtcacccatatcccccgtgcttaacataaggcctgacacatagtggggtttctactaagattcgtagaatggggatatctactgaactggttgtgtggtgctagaactggattgtttaaaaagctgaaaataacaaattcttttgttcaatgacctagacccaagtctaaccttatccaggcttctctaagaggcagcagagctgaaggcaggctctggagttacacatacacacacacacacactcacacacacagtctacacaatctacacacatgacattaaccttcttgagttacagatcccccttctgtaagatgggctactgatggtacttatctcatagcttattgcgaagataaaagtaagataacgcaggtaaaatgccatgcacgctgcctgctagcaactgtcgttgtacttcctaaagtctttacccrgcttcctcttagctgtaccctgggtttttattctgggcttaattgtcatcacctcaagaaagccttctctaaccctccttctccaggcaaagtcagtcccccactcccatccctggaacccacactgctttgcacacctctcctccacagccctcagtggatttcatctcagactttcttcttctactggattttggaagcttccatgacagatgtcatctctgatttccctgcccctgttgaagaggaatagatggaagcacctttattcccttgtcaacaggggctttgggccgttccactgttcttgctcttcatttgcctgtccgtgcttatctctgccttcctttaggatgagcatttctgtgactttgtggacatcctcacagagtacaagaccargaacatcttggcttcccccataatgaatgggaaggatgtggtggccataatcatggctgtgaataaagtggatggatcccacttcaccaagagagatgaagaggtaagaatgctttagagactaaggatagccatgctagcacattctcccwgcctatgaagtcccctgaactttgctgtttgacctggcctcagttttcccatctgtaagacagggaattcacctgatgttctctgagggaggcaggataaaataatagttaagacattgggctttggagtcaggaatagagggataattgttctggctccgccaatagctgtttgccttttgcaagttatttaacttctttgaactttggttttcttatttgtaaaatgttgataatttttcagtatcaacctcatagggaacttattaataaatagtagctatttttcatgaatacactcccatcaacatcaacattctacattcggtgagttttatgctcatgcaacatcttatgagtctgcattctaggatccatctgcccaaattgtctctgatgaagctttgaaaatattcagatatttgctgayggtaaaagtagccagaggatggatttcttcttctcacctgcctcccctcatgctgtttgatttttagattcttctcaagtacctcarttttgcaaatctaatcatgaaggtgtaccacctgagttacctgcacaactgtgaaactcgacgtggccaggtaaggggcttgggccaagggaatggacttgactcgtcctttccctgaagcattgatgtggtcaggactggcaggcagatgggaatgaaggtgcctaggaagccagtctctggccagcatcacgagtgttatgaggtagtggttgtctgtaaagctgtataccacagtggttatatgcacaagcttcaagacagatggctttgatctgaatccctgctcaaccactgcctagctctaagaccctaagtgagtcacttaatctctctatgcttcagtctccccatttgaaaaatagggatgattatggtgccaccctcaaaaggttgccatcaatagtaaacgagataatgcatatagggcaatagtgctcaattgaagtttcttattatttttattaaaaacctatgagataaatgaaagggaaagagctggacccaatgtaaagcagccagttacttcatctctctgagccccagtttgtttgtctacaaatggaagataattggactgggcatggtggctcacgcctgtagttccagcactttgggaggccaaggcaggaagattgcttgagcccagaagttcgagaccagcctgggaaacatagtaagaccccatctctatttttaaaataaaatttttaaaataaatggatgataatgggctgggtaaggtggctcatgcccataatcccagcactttgggaggctgaggtaggaggattgcttgaggccagaagtggaaactcatctctacaaaaaatttaaagattatctgtgtgcagtggcgtccacctgtagtcccagctgctggggaggctgagatgggagaattgcctgagcccgggagttggagactacagtgagctatgatcgtgctactgtactccagcctggatgacagagtaagactctgtccctaaaaaataaatacataaaaacaaacactttagcttttgcgcttctgccctggccctctgctggccactccgccggtgctgtgcctgggcgcctccgtgctctcggccaactgcctctgagagcgcccacttgagcgccctgggagccggagggcggcggtcctcaccgggaccctcctgtgggcggagggggacaaaagtgtctctcaatccagcacatgcacattgaagcaagttaaaggatttaatatgaagcacagaagccgacagtgccaaacagcaagcagtagttggtacacatttggtgagtggggcagcatttccttctcccactgctgctgagatggcagaaattagtcgaattcgtacgaaatggaatatactgaaggcattagtcagcgaatgagggtcccagaaaagttaaaagtagcaccgccaaacgccaacctggaacagggattccaaaaaggagttccaaatgctagcgtgataataatgcaagttccagagaggattgttgtagcaggaaataatgaggatgtttcattttcaagaccagcagatcttgaccttattcagtcaactccctttaaactcctcgcactaaaaacagcacctcgtgtacttaggctaagtgaaagaccactagattttctggatttagaaagacctcctacaamccctcaaaatgaagaaatccgtgcagttggcmgactaaaaagagagcggtctacgagtgaaactgctgttcgccaaaatggacagctggtcagaaatgattctctttatggcatttcaaatacagatacaacaattgaaggaacatcagatgacctgactgttgtagatgcagcttcactaagacgacagataatcaaactaaatagacgtctrcaacttccggacgaggagaacaaagaacgtgctaaaagagaaatggtcgtgtattcaattactgtagctttctggctgcttaatagctggctctggttttgccgctagaggtaacatcagctctcaaaaatattatctcaacagctggaaatataaaagatttgcaaacttctttgtttctgtctcttcattgtacgccattttatagtccacaacctgaaaatatatttcttccagaaactctggaggtaacacctgcttaaaattctccttttgcatgttttgtaaataggctccagttttgttttttaaaaggaattcatcttttgcctcatcggtccacacaactgattctgaatgggagagagtctgtagagaattgatttagaaaaatgtctgtgaaagaaaaacaattattttgtcgtgtttctcaaacactgtaagcagttttgttaatagacatttttscatcaacacttcaacattaacactttcaaagtcatggtctgttgccagatttgagaaactcgaaccacctaatatttcataaccttcttcattaggtacttgtacagattaatttctaacatttcagcagtttaatatgtgtgcaatamgtgcattctttcattttagttttgtacttggttttctataaagtacgtttttactcagttcatgtgtgaacaatttttaaaaactacagaataaggtacaaatgtagtgtatttaataaactgtcaaccaaagcaaaaaaaaaaattaaaaactttaaaaaaatctaaaagtaaaaataggggatagttaacctgtctatttctctggattattgtgaagggtaaatgaaataaactccagacaactttacagaattgttgttattctccagctaagtgagctactactttgcacctcaaaacctatgaatatgtttttgtgttttttcagatactgctgtggtctgggagcaaagtctttgaagaacttacggacatcgaacgacagttccacaaagccctgtacacagtccgtgctttcctcaactgtgacagatactctgtgggtctcttagacatgaccaagcagaaggtgagaaaacttcagcaacagacatttccaagaaaagattaaacagacactgactgayggctagagtcttggcacacattcaattgcacgggggaagaggctgggtgaattgggatggttgtagaaagtcttacataggtctcyactgaggagtatcagcctttaaaggggaaaagtcaatctagggcacaggtgagtgaaaacaatctgtactttccttagtcatttggaaagaaaaaaagtgtacatgaaaagaaactgatgaggtgatgaaggccagtgataaagaaatttctatgtgggttgagagtccaggagaaagttgccaacttcagggattctcaaaaaatgtactgaaagttgtgtgtaaagctttgctgcaatttatctattccagagctcacccaggcaattaagtggaggcagatgccgacatcgggtccctcacatgttcaggggccagatttgtggcagatacagcagctaaggaggcagagttcgatgtcgctcccagcgatgttttttagatatgttttcccaaacaacttcctcatttctctttgtttatttgcttctgccttatgaggctaatcattttctgccttgaaacagagtttcagagttatctaagtttaatatctcctatcctgaaaacccaaggattccagccagtttcattttgtacgccttgtcatgctgagggtggtgcccagaccaatgcagactctccaaatatattggattgagtgaatacatggatcacagaatctggggttggaaaagcccttggatatagtccagaggctcccaaacttggcagttcatcagaatattctgaagagctgattaaaaaattactggactgcattttctgatagtctgccattttttacttaatgttttacaaacatctttccatgtcagcacataggaattctttttaatgagcctttatattgaaacataggcctggcacagtggctcacacctgtaatcccaggactttaggaggttgaggtgggaggatggcctgtggccaggagttcgagtccagcttgggcagcatggtgagacctgtctctacaaaaaataaaataaaaataaaaaaagaaggacaacgtagacacagaaaagggacattaattatagctgctgatataacagttcaatgagtgaacattcccatgaaaccaccaccaaaattaaggaacagaacatgacaaacagcacctcagcagcctccttcatacctttttcagtacctcccacagcctcctcctgaaaggttaccaccatctgacgtttaacaccatattagttttacctttttgaggttcatatatatgaaatcctacaatacacatgcttttgtgtttggcttcttttawttatttatttatttatttatttatttatttattttttgagacggagtctcgctctgtcacccaggctggagtgcagtggcgcaatctcggctcactgcaagttccrcctcccgggttcacgccattctcctgcctcagtctcccgagtagctgggactacaggcgcccaccaccatgcctggctaatttttttgtatttttagtagagacggggtttcactgttttagccaggatggtctcaatctcccgacctcgtgatccgcctgcctcggcctcccaaagtgctgggattacaggcgtggtgtttgacttcttttgattcattcttattacttcatttagcatgagttcattcatttttattcctgtggaattttccatcatatgtacaatctacagtgtatttattcatttccactgttggtggacatttgagttttcagatctgatctattattaatactgttattatgaaacttctagtatattactagtacacagttgtgccctttctgttaggtatttacctagaagtagaatttcagagtattagctttagtagatattgcccatctgattttcaaaatgattgtaccattttataccctcaccagcaatgtatcaagggtttcttcatcaatacttggtattattattcttagtaactttagccattctggtgagcatgtggctttatctcttttgttatcaacataaattcccctaatgactgatgaggttgaatattttaaaatacgtttattggccatttggatgtattattttttgaagtgactgttcaagtttctcctccatttaaaaaaatcacattgtcttttttatctcactgatttgtaggagttctttgcaaattctgggcacaagtccactttcaaatacatgcattgcaaatacagtcacacaccatataacaacattttgatcaatgatggcccgcctataccatggtcccatagaattataatggagctgaaaaattctatcgtctagtgatgtcatagtgcaacgcattcttcacatttgtggtgatgctggtataagaaaaacctaccgcactgccagttgcataaaagtatagcacatacaggccgggcgcggtggctcacgcctgtaatcccaacactttgggaggccgaggcaggcggatcacgaggtcaggagttcgagaccagcctgaccaacatggtgaaaccccgtctctactaaaaataaaaaaattagctgggcatggtggtgggtgcctgtaatcccagctactcaggaggctgaggcaggagaattgcctgaacctgggaggtggaggttgcagtgagccgagattgtgccactcactgcactccagtttgggtgacagagtgagactccgtctcaaaaaaaaaaaaaaaaaaaaaaaaaaaaawatatatatatatatatatatatatatatagcacatacaattatgagctgtagtacataatgcttgataatagaaaactagaaaactatgttactggtttatgtatttactatactacaacttttttccattattttagagttgactccttctacttattaaaaaagaaaaaagttaactgtaaaacagcctcaggcaggtccttcaggagacattctggaagaaagcattgttatcataggagatgggagctccatgcgtgtttttgcccctgaagacgttccagggggacaaagtgtggaggtggaaratggggatattgatgatcctgaccctgtgtaggtctaggctaatgtgtgtgttygtgtcttagtttttaacaaaaaagtttagaaagtaaaagaaaaaaaaatttaagagaaaaaaagcttgtagrataaagatataaagcaaatatttttgttctgattcaagcaccaaagacataaaaaaagaaaaaagaataacagaatttgagatttttttaaaaagaaaatatttttgtacagctgtataatgtgtttgtgtattaagctaagtgttattacaagagagtcaaagtttttaaaaataaaaaattttataaagaaaaatttaaaaatttatagagtaaaaaagttacaagccaggcttggtggctcatacctgcaatcccagctactcaagaggctgcggtagaagaatcgcttgagaccaggagtccgaatctgcagtgagctatgatgagcaagatctcatctctaacataattaattaattaattaaaaattacagtaagctaaggttaatttactattgaagaaagaaattttaaaaatacatttggtgtagcctaagtgtccagtgtttataaagtctatagtagcgtacagtaatgtcctaggccttcacattcactcaccactcactcactgactcacgcagagcaactctcagtcccgcaggctccattcatgctaagtgccctttataggtgtatgattcttaaacttttataccttatttttactgtgttttttatgtttagctatgtttaggtgtgtagtaggctatacaatctggagtaatgcaagtgcactctgcaatgttcacacaatgacaaaattgcccaaagaaacacacatttcctggagcatatccccgccattaagtgacgcatgactgtattctcccacttggtgttttcattctctctctctctctttttttttttttttttttggagacggagtttcgctcttgttgcccaggctggagtgcaatggcacgatctcagctcattgcaacctccacctcccgggttcaaacaattctccagcctcagcctcccaagtagctgggattacaggcccccaccaccacacccagctaatttttgtgtttttagtagagacagggttttactatgttggccaggctggccttgaactcctgacctcgtgatccacccacctcagtctcccaaagtgctgggattataggcgtgagccactgcacctggcccatgctttcattctcttaatggtgtgtttttatgaatataagttctgaatgataatgtagttcaatttatcaatcttttcctttatagtcattgattcttgtgctgtaatgaggaaatctttcctggatctaagattgtagagatatttacatatgtcaaattctaaaagctttattgttttaactttcacatatagctctacaatctacctggaacttttttatgtttagtgtgaagtaatgtgagtattcatttttctgtacaagcatccaattggcccagcactgtttattgaaaagaccattctttccctactcttctagtgaaaagatcatccttccctatcatacctttattatcaaccaagtgtccatatatgtatgggtctgtttctggattctctattttgttccattggtatatatatatgttttttttaattaatttttttttcaagacagatatctcactcttttgcccagcgtggagtgcagtggtgcgattttggctcactgcaacctccaactcccaggttcaagcaattctcctgccttggtctcccgagtagatgagattacagacacgtgccaccatgcccagctaatttgtgtatttttagtacagatggggtttcaccatattggccaggttggcctcgaactcctgatctcaagtaatctgcccaccttggcctctcaaagtgctaggattacaggtgtgagccaccatgcctagcctccattggtatatttacctattcttctgcaatactatcctgtcttaatttcagtatgtttataaaatatcatgatatctggtaatgaaaagacctctaagtttattattattatatgttagactttttcaccatggtttgtgtctcttatacttctttgtgtgtttttcatcatttcgttttttgtgctttagtttgaatatttcttcgatcyatcttctattaattactaactctttttttttttttttttttgagacagagtctcattctgtcacccatgctggattgcagtggcatgatcttggctcactgcaacctccgcctcctgggttcaagagattctcatgcctcagcctcctgagaagctgggactatgagtgcaggccaccatgctcagctaatttttgtgtttttagcacagatggggtttcgtcatattggccaggctggtctcgaactcctgacctcaagtggtctgcctgtcttggcctcccaaagtgctggtattacaggcgtgagccactgcctggctaactctctcttcaacagtgtctaattgactgttaaactattgagtttttaactttagatatttttcaattttagaatttccaactcattctgtttttgtagtttccagttctctgctaaagttctctgttttgtacttgattcttggacataatcacagttatttttgagtctctgtctgaaagctataatatttataggcatcttctatggacctatttctatgatctgtttcccctctagatttttccgtgaattgtctgttacatgctttattatttttgtttgaagactagagacatgtatggaaatatgttatcttcctccaaaggggatggttttacttctggcaagcagttggggtaaaggcagagaacctcaatccatttaggaattgaactgatgtgaagctggtcttcagtcttcgtgaggcctggtctgcttctggttcacttttacttcttggggcgtgaggatcccagcctagggtgttttcaagggtctctcctccttggcaggctctgaattccaattttgtcctccttgcccagtgagtcttccgtaagcttggctcagcttcttagctgctcacagcatctttggtatcaacaagtgggtcaaaaggaaaggtcgaatcaagggtcaggtttacatctctgggtttcctttctctctgggattttggcccactaactccctgctgccttgccrgctatataagtccttcacataaacaaatgttcatacacatacacacagtccagatggtgtaatttttccagttggaggattggtctgaaacaaacgagtcatcatgaacagaagtaggaatcctctctctttgttttgtagtccatatggatttatctcattcatttgagtagtataaatataccgtaattaatttatcctttcccctattgctagacattaaaaattatttctaaatattcttataactaaatatatatatatwtctatttctaaatattcttayaactaaatatatatatatctatttctaaatattcttataactaaagacaatgctggccatacaaccccttgtttgacaacttctcttctccttgggacaatctttggagccactcagtgtttggcccacatgaggtgtcaggccaatatatttgttcttcttctgggctcctctagcatttatcctctccttccagcactgttttggttcttgcctcatttacctcactattagttatcttcttcatgagacaataagttcttccaggatacaaactgtgccttattcgcctgtgtataactagcagtcagcaggttgtggggctcaggtagggcctggttatatttttgcctagaattaaaattgttttctaaatgttcacctagaattaaatttcttcctgttgttggtagtctagaaaaagagctcaactggggagaagggcaaaaacatggactctgcatttcatgtggcttcccttctgcttctctggatgatattagaataagcagaccatgacaaacatgttcaaatgagaggaatgaggagggcttggcatcctacccacagtaacccagtgctaatagatcacggtttgtccctgtatagtaacagatgaatgaacagaaagggcactggaggatggaagcccctctctcaggcccagacttgaccccacacaagctttgctgctctatgggcaaaggaaaccatgaagaagtagtggggaagaacctgtgtggttctcagttggcctctcctgaggctgcatgactgtgcagctcctttgctggctctttttcctcttccctctgcctgtgtcttggccacttttatttaggtgttgttgtttgttatgttatgttatgttatgttatgttatgttatgttatgttatgttatgttatgttatttatttgagacagagtctcactctgtcacccaggctggagggcagtggcacaatctcagctcactgcaacctccccctcccgggttcaagtgattctcctgcctcagcctcctgagaagctgggattacaggcacataccaccacgcccggctaatttttgtatttttggtagagacggggttttgccatgttgctcaggctggtgtcaaactcctgggctcaagtgatccayccgcctcagcctcccaaatggctgggattataggtgtgagccaccgtgcccgaccttggccacttttagacaaaacaaattcaacagagtttatatgagcaacgaacaactcatgaattgggcaaccttcaaaaccagaagaggttcaaagagctctgctgcacagcaaggccagtgagctttcatagctgaacatggaagtaaagtatagaaataacatgattagttacaatagggcatttgtctgatttggacatgatctgatcagttgggctgcctgtgattggttgaaactcgaccatttgttacagtaatatactcctaaattgggttttggtttgtttgcctactgaggttgcagtttcttttgtaggagctcaaattattacatggaaactggaagaacagagatagcctcaggctaaggcacctgtgtattttgctttagcagccacttatcttacaggtgtcagcctttcttattggatcccagatataggtctattgtccatatttgatatcatttttttctttcttatttgtgaaaaatattttttcctgattacaaaagcaataaagtttgttatgaaaaatttctaaataaattgcagtctgattccaatcactcagagaaaatcacttgttaatactttgttgtgggccaggcatggtggctgatgcctgtaatcccagcactttgggaggctgaggcagatggatcacctgaggtctggagttcgagactagcctggccaatatggtgaaaccccatctctactaaaaatataaaaattagccggatgtggtggcacacacctgtaatcccagctacttgggaggctgagccaggagaattgctagaacccgggaggtggaggttgcagtgagctgagatggagccactgcactccagcctgggcaacagagcgagaccctgtctccaaaataataataataataataataataataatttgttgtaaatgtattcatgacagtttctatatataattgaacattagggtcacatgatatattctttttggcctctcacatttgtcacttatcagtgtatcatctttccaatcagcacacacacgtctgtaacatcattgttaatagatgtaccataattgatttaataagtcctttcttcttgggcacttatattgtctctaatttttcactactataaatgatactgcttgggacattgttttagctaaatctttgagcacatattagcatggtcttaaggtraatttcttagccgtaaagaccctgctttccctctcatgtccaataacactgagggtgccccagttcagctcccatgtttttggctaatgactagacaggcccagttcatcaatattttgaagggcaaatgtgactattttctaactgtagtgagtcttactgyctttccaagtttaggtttcactgarttcttctcactttctaaatttcagtgttagctgactcatggaggtgggacrtcttaatctcctttccttgatctcttttcaaaacatgtaattattgtttttctcattcctaggaattttttgatgtgtggccggttctgatgggtgaagttccaccttactstggtcccaggactccggatggaagagtaygttctctctgaccttttcagtatgatttaatatattcaaatgcaaggcacagtaaaccctgttaaaggattttttattagcatataggtatttgtctttgcgttgggttgtctcctttgaagttagaataatctctcatattcaatagcagacaggtgctaaaagtaaaataaaacaacagagagaaaaaaagtaaaaaaaaaacagcaacaataattcctcataattgtcatgccctaacatccctaacatttgcaaagtggtcttccttccttccttccttcctgccttcctgccttcctgctttccttccttccttcctttttctttctttctttctaagcactatactaacaagaagctaagtgtttaatatcttattggggtttcacagtaaccttgcggggtagaccaaacagggaccaacatactcatttcacagctgtggaaagagacccagaaaggtcaagcaacctactcaaggcttcaccttgcaggaatttagagttatagacaatatgagcttagaaaaccttcatatctagtctataatgtacaaattggtagccagaaagccaattccagctgacagatacacttgcttggctacgtaggttttctattttctttctttttctttctttctttctttctttctttctttctttctttctttctttctttctttctttctttytttttctctctttctctctttcttctttctttcttttcttctctctctctctctctctgtctctctctttctctctcagatagggtctttgtatgttgcctaggctggtcttgacttcctagtgctcaagtgatcctcctaccttggcctcccaaagtgctgggaaattggcggctaacccttaaaaatcaaagtctttccataaatacctgaattctcagtttcttttgaaaaggtggatgattaatccatactggacccacaatccagcagggcaaatttgattggagctgagtagcagctacctccttgggatgtggcctgagttctctagtttgccrcagtccccgccactttctctttttgagatggagttttgctcttgtcacccaggctggagtgcaatggcgtgatcttggctcactgcaacctctgcctcccgattcaagtgattctcctgcctcagcctcccgagtagctaggattacaggcacctgccaccatacctggctaattttcgtatttttagtagagacagggttttgccatgttggccaggctggtctcgaactcctgacctcaggtgatccgcccacctcggcctcccacagtgctgagattacaggtgtgagccactgcgcccggcccccaccactctcttttatgtacatctgtgccctgctttcatttttgtttttatcaacctctctaggcatttaagtttctgatctctgatctcatccaattgcagcattttattttatttgtttttgttttttatatagagatgaggtcttgctatattgcccaggctggtcttgaactcctggcctcaagtgatcctcctgccttgagctcccaaagtgctgagattacaagcatgagccaccgcacctggcctaaattaggccctttaacattccctctgccttctaacatccctctcacgctttatctgccacattcacttggaaacacagcttttgtctgaattccaaccaattaatgttcccgaatcttaggtcgaaagcctcacagtgtcagctacatcttgcttcatctacttttaaaaataaaatagtgtgtgtatgttttaaatatttaaaagttatacaggctaaaaagccttcatggaaaaaaaaatagcagtcttttaaaaagtggtgtatttccatgggtatctgtggctctttcaaagccccttgtgtcagctgctcaggtagaaggtaacaaaggtactcttgatgactcagttttgactttccagaggctggtgaatttgtacatgaatatggctttaaagactttgactgagmtacagtgwgtggaaaaagcctagttacccaaagcacactgatctttttgttaattctgggaaagaaaaactttgcwgtttttctcctgtgggattccaaaaaaaatgtccatttctttttttgagatggactgtcactctgttgcccaggctggagtgcagtggcatgatctcagctcactgcaacctccgcctcctgggctcaagcaattctcctgcctcagattcccgagtagctgggattacaggtgccccaccattatgtctggctaatttttatatttttagtagagatgaggtttcactatgttggccaggctggtctcagactcctgacctcaagtgctctgcccacctccgcctcccaaagtgctaggattacaggmgcgagccaccgcacccggcctagaaatgtccatttctaacctttctaaagactctcgtgggaatccctgggtaggacagcagccaggcccaggaagccctgagcctgccaggagtacagtgagcagcacaggcccaaggacaggtggccctaaggcaagacraagatgtcaagaaggtcctggaactctgcctcctccccytcgcaggcagaaacttatctcctaggaaataagtgttctagaaagcagccacctttgctttctagaactgcttatagggtacaacttgactatttaaaaatatttttaagaaagtttgttgtgccaggtgcagtggttcatgcctataatccaagaactttgggaggctgaggcagaaggatcacttaaggccaggagttcaagacctgcctaagcaacaaagtgagaccttgtctctaactaaaaaaaaaagaaaaaaagaaaagtagccgggcatggtgacgcgtgcctgtattaccagttacttgggaggctaagataggaggattgcttgagcctgggaaactgaggctccagtgagccaagattgtgccactgcactccagcctgggtgacagaatgagatcctggctcaaaaaaagtaaattaataaaataaagcaaaataaaaaatataaaaaaagaaaattggtttgtatgttggaaaaataatatatgagcacagtgaaaagttcactccataygaaattaagtgccaccttcctcctagtcagcccctgtgaagcagctgctgttagcaaactctctttgcaggaacatttaggtatatccagatatccacagagaagtatacgtattccaccaccaccmctctgcactaacgctatgattctattttgtgccttgcttttttcacttaactgaatattttgtcacctttccctttcagcacaggcacagcaatcttgctctggaaacgtgtggtgtccactgtacaaccactttcctaataagagaccttacatcatctccagactttttaaagcagtctagctaagacccttggacggggcaaaaaatgcttttacccacatttgggagtatatctctaggatccatcaccacatgtgggtcaaataatatgtctgttttgatctttgagagatattgctacctatcttatcataaccttagaatcatagcttggagggtctttatggattttctaaaacaattttctttctcccccattgtccttagaaccttagagttccacagtagctgccttgaccaggggttaatagaaaaggaagaggacaggaaagggagtaagagagaacaaaggggcagggactctatatacccggccctgattccattaggacagtttcatataattagcttccatgctttgcttggggaaagagagctgctactgaacagctgtagcaaacacataccaccattccaattttacagccagagaaactgaggcctagagaacacccatagtaggaccgaaactagaacaggaatcctcactctaggtctagtctcagctccattttatttattgtatttcagcgttcatctagtctccccttggatgcttcctattttagggagctcactacccctgggggtagcctgtgccattggagtggtttcagcttctgccttttgtttaaccagagctcgcctcctagaagtattcagtcagtgcagctgccgccaatgctaggctttgagcagcagagcctctcccttatgagttggaagttgaccattgctgattgcccgtcaaccaaacagaccttcagacatctttaactggttcaggaattcctctttgtggaggttctgagtcgggaggcttggggtggagcccaggtatctgcactgaaatctctagggaggtacttctcaaaatacctgtagtaaaggaacagtttggtttttctttttaaaaaaatttccaatttttttttgtgtgtgtgaaaaacacactcaagaaaggggagtgcaggcatactcaagagagtgagtcacgcctccagtatgttttgattgctacttttaaaaatatgataaaatatattcctagaaaaacaaaattgtataaagacagacaaaatataaacttggatcatgccactgcacttgtactccagcttgggcgacagagcaagactccgtcacaaaaaaaaaaaaaaagatatccccttttattcaattaaacagacctgatctaactcagtcaaattgttacaaaacttcctaagtgactctcagtttctgtttttatcttctcctggaatagtaaagagttcacaagacaggcaccggcccagggattacactctgagcaaccctgttcaaggtgacagtgatgcggacagtaaaacactaagctgttaacgttaggtgacatagaggaaaagcactgagctgggaattaaggacccaggttctgattttggttcactgtcttgctacaagtgagtcctttcctctctctgtgtctcagctttctcatttgtgaaatagttgctcatcacgcttgggcatacagaggacctaagaaaaaggtaatagaatttcccctggagagctaggggaatggagtcacatgccaacatccaattgcatgctagagagtaatgtaattgaagagctctgctttaagagaatgggaattttaacaatgcaaggaggcgggagagatggaagaggcagagagttagtttggggtcatgaaacatgatgagaaggtaggtctgaagtgacgacacagcaaagagaacagctgagtggtaggcatgaaggagaaatggggccatgacatagagatgcaccctgcagggaggatggctggttggctgtgattttaaatgggatgggaacctcctgaccacttccccatctccctagattctggcagccgtctttatctctttcttcttgcacttatcaaagtcaaaattaaaacgcagagacgaatctctatatttaatgttttggggcaaaggaagacttgcaatttggggcatacatgcagactaagtagtcttcagtatgtccaaagaaaaaagagaaggtagacggttttataaaaaagagaaatgaggccgggcatggtggctcatgcctgtcatcccagtgctttgggaagccaaggcargaggatcacgtgagcccaggaattcgaggctacagtgagccatgactgtgccactgcactccagcctgggtgacacagcaagaccctgtgtttaaaagaaaaaagagaaatattacatgttgctctctgagaaagttcattgacaccagtaagggtctggggagctggcaagttttgactgatgagtaatggcagtgggtaaaattagtcctagagttgcagcaggttgtttcagcaactatcagataaaactggtttcaagtcacagcaggtagcgtaagcagccaggcatgcaaagaattacattctgggagcaatgctagtgtcctgagtacttttttgccccctggcttctcaactctcttttatttgggtatgacaaaaatgtcccaacttgtgtgatcaacttgcacacaatcaacctccagatcctcttagaggatttcctatccctcttcccagcctcagatcccagccctcttcctgatcactgtgagctgcctccaaggtgaagcacgctgaattctgagggtcagcagaggacagggagcaccagaaggcagcccaggcacatccttggagggagtttatggccaggcttggcacttcctgaaaaccatggggcaaaatatgtacaactactgtatatcaataaaaacattaatttattaaaacaacaaaaactacggggcatacgatggtaaaaggacaaagttggtttcagggacatactcctgttgaacttctatttgactcttgaaggtataattttttggctgggtgcagtggctcacgcctgtaatcccagcacttygggaggctgaggtgggcagatcatggggtcaggagttggaaccctgwctctgctaaaaatacaataattagccgggcayggtggtgcgtgcctgtagtcccatttactygggaggctgaggcagaagaatagcttgaacgcaggagatggaggttgcagtgagctgagatcaagccattgcactccagcctgggcgacaaagtgaaactgtctcaaaaaaaaaaaaaaaaaaaagtataatttttctctcttttgccaggaaattaacttttacaaggtcattgactacatcctgcatggcaaagaggacatcaaagtcatcccgtaagtttcacctgtcaaaagacaaaatgacaacaaattagcttaaagatctcaattggctttatcggtgattctggaattgggcaacacttcattccataaaatacataagtgttctgacaaggttgactttatagacagagaaggactgaagaaagacaagcaaagatcaaagaacatgttaatcatttttaagatacttttcttataaggtgggagagggagatagaacartagaaaaataactgattaatgtcaggttactgctacctttttttttttttttttggtgtaaggattaaagcagaggaacttcattatcatgcctattaaagactggaacaggactttttgggaaattggcgtttacctctctcctaatctctaagaggatcagaaaacaacttagtttagatttggtgaagtggaacgttatcacggtgactccacactgatttttagtttggtttgttggagcttggtgcagagctttgtccaaaacaagggcctcctatagtttttattttaacacatctcaaaacatggaaaactgcaggyacattatcaacttccaaaagatactcattccaagatcaacactgaccaaatccaatgagaccccacagttggttagaggcagggagagtgggaaggaggcagtgtgagacggtagagagactcagagggtgagcagtgaggcccaagaagggggaagacttgaccagagccttgatgagggctacagtggaccaggttgtgagtcaggtgctctgagtcccaatctcacagccagggccagtaagtggtttgtctggaccttagagtcccatgtatagaatgagactgggatgaaatcagggattttcaactgttttctgcagtgctactcttctggtacttgaaggaggcaaagcaaaagcaggaagctgcaaaggaactgactcagcccccacagaaagcctattctcaatgtcccctcatgtgtgaccaaggaagacagtgaaaagaaaaggaaagaatgctctcagtcctgcatctaggtagctgagactcaatgaccattagaagatttgaacggttgcaaactgtttaaatatgggcttatacttttttggtcagtagacctttctcaaaaacctagttaccttcttctctgtttgaatcctctccacgtgctaaaagccacatccatggttctgtcctgagacatggccctttttctcaacttaactgcagaggccttgaggctgtaattcggttcgtgggagagccacacctttagtcttagcccccacagcaattttgtccaactgaagggatttactgcatgccaacttaatcttcaagaagtgggtgtgataggccatgctgattcagtttggtcaccagaccaaactgtartaatcccgtcacccagataaacaagttctcagggttgtctgttacyggtgaggatgagaagctgcctcaagtttctcaatttctaggttatctctattcctttattgctgcctgcataaggactgattaccttattctattctcttttttttttttttttaagatggagtcctgctctgtctcccaggctggagtgcagtggccgaatctcagctcactacaacttccacctcctgggttaaagcgattctcctgcctcagcctcccgagtagctgggattacaggcacacrccaccacacccagctaatwtgtgtatttttagtagagatggggtttygccatgttggtcaggctggtctcaaacycctgacctcaagtgattcacctaccttggcctcccaaagtgctgrgattactggcatgagccctggcacccagcctgattcccttattatcttctaaagttcatctctctttttttttctaccttatcaaaagcatactcttcaacaattctgttttctagccccttttctagcttctagagccacaatcttattaactcattatctgtctcttaaatggtcacaggtcgcaattttctgtttgtctctgcttgaccagcatcacatcctactagcttctgataacattcatcttgttgcctaccacccagtccctaacctatgtttctcgttttaggttttttattatggcagcaccctgtttctgacacaaatctttgtttcagccaagataggccaggctctgctttcataacaagacctggagacctgagtggtataaacaactaaaatttatttcaccatcccagtatgggtgcactgccagctagcgggtgtggttggagatatggtgggtgggttgtagtcaggcaggagccaaggctgataaagcagctgccattttgaaccttgcaagatagaataaccttgccacagagaagagaggaaaaatacacactggctcttaaaatctccatctggaggtgacacacacatagcacttatactcacattttattggtcaaagctagttacatggccacacattacttgagtggttaggaaacgcagtctgaccttgtgcccaggatagacagccagaatgtctgtaaacatgcagaatggctgtcacagtatatgccatccacactaacagaggggaaaattgaatagtaaataaatgactaatcaaaccaaaggaaggcaaaataaaagttcaggaagaacatagatgttggatgtggatgcactgtctatagccccagctaatcaggaggctgaggcaggaggattgcttgagcctaggaatttgaggctgcagtgagctatgattgcacctgtgaatagccactgtactccagcctgggcaacatagtgagacactttcactaaaaaagagagggagaaagaaggagagaagaacatagagcaggtaggaaaacaaaatgtacatatcaaggtgaaattcgaattcaaatatatcaattatttgaattttatttatttaattagcgtgttagtgttttatagagacagtctcactatgttgccaggctggtctcaaatttctgggttcaagcgatcctctcacctctacctcccaaagtgctgggattacaggyrtgagccaccwtgcctggccaataawttttttttttttttttttttttttggtaatagagatggggtctcaccatgttgcccaggctggcttcttcaaactcctgagctcaagcaatcctcccaacttagcctcccaaagtgctcagattataggcataagctgatgcaatggccaataakttaaaaaaatataaatcaactagatgttcaagttaaatgacaaagattgccagcctggttaagaaagaaatacattacctttcattaattctaagatgctgttttctactttttgacatttctgaaatagaattgtgtgatcgttgttagccatggcagacatgacaaagttgttattgcctaggtgtgaactcggtcataaccatagtcaaaagacaaagttacaataagtttcatctacagatctcaaatggctttatttgagaytctagaattgggcaatgatttgttgtgtaaaatagagtaagtgttccaatgagttgagcagaaggggttggttttataggaacaaagaacaaaaaagcagattggtcattttaaagctacttttcttgtaaggcaggacagggaaataggacaatagaaaaatgactgagaagtaaacatcaagctatttcaggctacctttgtgtgtgtgtaaggactaaagcagaggaaacttcatcatcatgccaattgaaactggcttgttgccgggcacagtggctcacacctataaacccagcactttgggaggctaaggtaggcagatcccttgagctcaggactttgagaccagcctgggcaatatggcaagaccccatctccacaaaaaaatacaaaaattagccaggcatggtggtgcacacctgtggtcccagctgctcaggaggctgaggcaggaggatcacttgagccggggaggtggaggctacagtgagccatgatcgcaccactgcactccagcctaggggacagagtgagaccctgtctcaaaaaaaaaaaaaaaaaaaaaaaaaaggaaaaagaaactggcttgtttggaaaattagcttttgtttctcctgatttctcagaaggtcagatagcaatttagtgtttggtgacttggaactttgatgtaggtgacttcattttaatttttagttcgatctgttagggcccctactacaggagtttagttgaaaacaatggtctcctgtaattttcatttcccaccattcatattgttgtaagtatagttattgttgagcaaccattgctggttgctattcacattgaattcaattgccatgtaaaataattttaaagagagattatgctatgattcagcattgaagtgaaaaattatcttaactggcacaaaatgacagaaaaaagtgtgagatatgataaaaaatctgtgtataaatgctaaaagagcaatgttgatctgaataaagtaaaaattacaagtgataagcattatagattacgttataggttaattggcagcatttaatctttctctgcacatacaaaagttagtcaacaatgattactcccaagatatgatgaaaaatcctatatcctgtttacaggagactaatctgaaagagaatacaaagaggttgaacataaaagactgaaaaaagacataccatgcaaatgctaatcaaaagaaaacttgtataaccatgttaatatcatagaaaaatagacataccaaagagcattagtagagataaagagtcacttaatgataaaggggtcaatctacctcaatattacaggaagatattaccattctaaatttgcaagcrcctcataacatgacctcaaaaaatataaaacaaaaactaacagaaatacaaggagatatagatgaatctgtttgctaattgacttaaggagcaaactaaaatgaacaaacagaatatagaatatttgaataatccaattaatgaatttaacctaataaatatagatagaacactgctttaagccagtaacaaaaagctaattaggaaattctcatatgcttgggaactaagaaatacccttctgaaaccaaacaacctatggataaaagaatcaattaatggaaattagaaaatattctgagctgaaagatatgaaaatattacatattaaagcctctgtaaaaaataaaaaacctgtgtgatgcagtgaaattgtgcttaatgtaaaatttacagcctcaaatgcacatgtttaaatgtaaaaaggctgaacaagtaatgagctatgcatccatccatatcagtcagggtctcaactgaaaataggtgtcacattcaaaccaggataattcggtgagggtttatttacagagggacaaattgcaaaggtgtgtgtggaatgaagggaaccataagagaatgtgctattagtgggggagctactaccacttctggccccaaagggaaatttccataatctggaataaaaaagagtctcgtagagcaaaccatcttgacagaagcattgaccttcaggcaaggaacatagccagctcaaagcagccttgccagtggttgccctgtctctataaaaaaattttaaaaattggctgggtgtgatggcacatgcctacagtcctacacgtgaggctgaggtgggagaattgcttgagcccaagaggttgaggctgcagtgagccaggtttgctctgctgcactccagcctgggtgacagagtgagaccctgtctcaaacaaaacaaaaaacctagccaggtgtggtggcacatgcctataatcctggctacttgggagactgaggtgggaggattgcttaaagccaggaattcaagaacagcctggacaacacagtaagaccctatcttgaaaaaaagaataagaggaaaaaaattaatagtaaaactgacaaaatcaagaagaaatataacagttttattacaataaaatatgtattacaataaaataaatcaaaacyttctcacaaagacaacccagacccagatttttttcacaggtgaattctacttagtggtttatatttacttatttatattttttagagatggagtccccctatgttgcccaggctggccctggactcttggtttccagtgatcctcccacttcagactcctcagtcgctggggctataggcacacaccactgcctgagttctaattaatatttaaggaacaaaaatgagtaaaagtagtatttaaggaacaaaaaatgagtaaaagtaaatttaaaagtaatttttaaaaatgagtaaaagacatgaacagaggaacttcacaaaaaaacaatgcaaatgacaaatacatttatggaagttactccattttattaattttgtagagaaatatgaaagaaaactatgatgagataccactagacctcaccacaaggactgtcatttaaaagtctgaaaatagtattgacagagatggagaacaaagcaaactctaatggaccactgataggagtgttaattgctacaatcattttagaaaacagtttggcctcatctagtaaagttgaagatacaaatatcttatgacttagtacttcttctcctaggaatataccaygtagaactgagagcacatatgcaccaatgttgacagcagcactgtttatattagcccctaagtgaagggatgggggatgtccaccaacagttgaatggatagattgtgctacagtagtgtagggaacactgtaagtcagtaaaatgaatgaattacagcaacgtgacaagccagacaaaataatatacgttgtacagtgccatctaaatgagttgaaaaataagcaaaattaaactaacaggtacaggaaaacatgcttagaagctaaaactctacaaaaaagcaaaaatgcaatttagcataatttcagaataatggttacctttggggttagggagaaggttatgattgcgggggaaagtcaatggcttccaaggagctgacaatgctgttcttgatgtccatgtggttttataaatgttcatttcctaatgattggtgaagtttttaatgcttgtttatgtgtgtgtttttttctcacaacaaacaagcaaaaagtaataatacaaaaaattatagtattgtgagggataagtatataatgcacttagcttagtgcttagcacatggtaggaattctccatagatgaattttttcattctctacatagtattagtagcttctaactttatgagggaagtgatggtgtttgtttctgctcagcagcaggtaacaatctgtagaatgaatgctgtctcttttctcagatggtgaaacttggtgggcagacagtaaaatgttatatttgccaccctttctccatgtctagatttgaacattaagatggttggccaacattttgggtttggtcaggtgtagtgaatgtaagcaggtgctgagagccacctgagagcagggggagcgcaaacacccagattttagtctttagtccagcaatccctgcactgagagtcaccgttttgtctttggccttcacaggaatccacctcctgaccaytgggctttagtaagcggtctcccagcttatgttgcccagaatggcctggtaagtaatataactttgaagggggagagttttrgatcacgtggaagaaagagtggaaggatttcagatcaagaagagagtggaaaagatgatggcaagtgtggatctctaaaagcctaattctcttgtttctctcaattcagttggcaactggtctaaatgaatgaacagataattgacatttgaggaaatatcaaatacatagataaataatccttaggtagaaaggtgcatagtcttggccgggtacagtggctcacgcctataatcccagaaytttggggggccgaggcaggtggatcacctgaggtcaggagctggagaccagcctggccaacatggcagaactccatctctactaaaaatataaaaatttgctgggcatggtggcaggcgcctgtaatcccagctacttgggaggctgaggcaggagaatcacctcaacctgggaggcggaggttgcagtgagccgaaatcatgccattgcactccagcctgggcaacagagtgagactccrtctcaaaaaaaaataataataaataaaacaaaataaaaaggtcttaggcagatggggtcataaaaggaggttccaggtggaaggaagaacatgggcaaacaacatgggcatggaggmctggagcagtgtgctgtgtatggttaagtgtggctggagtattagatttgagacaggaagacagcaaaacatgaggctcaagagggaggaaggggctaaattacaacaggccttggatgccttgtctaaaaggtgggatttttttttttttttttttgacagtgtctctgttgcccaggctggaatgcagtggtgagaatttggctcattgcaacctccgcctcctgggctcaaacaattctcatgcctcagccacccgaatagctgtgattacaggcatgcaccaccacacccagctaatttttgtatttttagtagagaaatggttttgccatgttagccaggctggtttcgaacacctggtttcaagtgatccacctgcctcaacctcccaaagtgctgggattataggcgtgaaccaccatgctcatcctcaaaaggtgggattttaatctacaggtgacaggtagacaagcaggagattcacatagtcaattttcattttagaaagataactctggcagggcatagtgactcacgcctgtaatcccaacacttagggaggctgaggcaggaggatcacttgagcccaggagtttgagaccagcttgggcaacataccaagactccgtctctacaaaaaatttaaaaattagccaggcatggtggtgcaagcccacagtcccagctactcaagaggctgagacaggagtatcccttgagcccaggagttccaggctgcagtgaggtatgattgcaccactgcattccagcctgggcaacagagggagaccctgtctctaaaagaaaaaaatagaaagaaaagaaagataactctagcagcttcctgggaagtggatctgaaggactaggactgcaggcaaagtaaccagagcatcattcaagtaagagrtgatgagaatctcagcaaagacaggtggggtaaagaatactatcattcttgctaacagccactgggtgcttaccatgagtcaggcactacctaaatttaatactcacaacaactttgacagaggcaagaacacaagaaggggataatgggtcaggtccaatattgagagggtgaagctggcagggctttgtgattggttgtaggcagagaatggggaagagaggagtcaaagctaatttcaggcttctagactgaatagatagtgctgtcatcatgcttggatgtaagatgacraggtcagtttcagacaaggtaaaactatgacattttttaggagcagctgtccagcaggtagatgaagagacaattctgatgccatggagagagaggagtgttggaagcagagatttggaagatatcaggaccagatggtgtttgaaatyatgagtgtggaggaagccacttagggagagggagacaggcagtggacctagggtgcaataatggagggtgttggcatctacagagtgggtggagaaagaggagggtggatagagaaacagaaggaaggttcagaggtgtttggagacccaggagagggcagtgtctctctggaagtggaaagtggaaagtgtctggaaggaagtggaaagtttcaacagggaaggaaatgatgacatgcagcagagtgaactggtgagagaattgaaaaccctcattgggtttggcactggagaggttattggtggccccagtgaaaatggatttggtggtgaggtggaagcagaaccagcatgtggtttgctgagtagtggatgggtaacgagaaggtaaagaatgcaaaagaaaagaggagaatgcctgggtgcttgctatagggaccatgatggatgcaggaaggatttcattttcaagcatgagagagacaccagcatgctcacagatggagaggaaagagggctccaagaactctgagatcaggagacaatgatagtaactgatagagttggtcaaaggagaggtcagaaggctggtgcagtgagcaggcagtccttggacaggaaggagcaggtacagcctgctctctaagaccacagacagcccactcctgtgttgtcaggcagggtcactacaagcccaggtggtgcctttttgagaactagaaggcaccgtttctcaaggatgactaaagaaaggtcaaggtcatggcgctgcaagcagatcacaggctggatttcagctcccagttgcccctcagccagatgcctgtgtgcagttcacacattacacaactgtacacggtggccccacagtgctctggggagatcagataagtgtcatctgatcccttaccagtagggtaaactggttcaattttcaggagaggaatctggcaatatagaaccagagctacaacacctttcatttattattctactttggggtttatacgcaaaggaaaaacccctacctgcccaaacaaaacagaacccaaatgtagttttttattttattttgagacagggtctcactctgtcgctcaggctggagtgcagtggcacgatctcggctcactgcaacctctgcctcccaggttcaagtgattctcccacctcaacctccagagtagctgggattacaggcgcacgccaccactgctggttaacttctgtatttttagtagagacagggtttcaccacattggctgggctggtatttatattaacttaaagaccatggatacaacccaaataagcaagaaaaggggaacaacaaaatgggataccctccagctactagtaatgacaaattgtagccttaactttttcaaagcttagaaatgattcaagagtggagcaaatcataaaaagtaatgtttataaggtgacttttctgtctagtagcctcagtgaataattsaaaactgtctcgactatgtctacctgatgaaaagaatgtgaatgccttggacaagaacatggtgtttctgaaaatggtatacagtrcttcrctgggcaccctctcaggcctaatcacaccttcattattccccttcactgctctcagatttgcaacatcatgaatgcgcctgcggaggacttttttgcatttcaggtaagtcattttttatttgcagtcttagtcatatgattttttttcctccccaaagagcattagaatacattagaatccacccactctgctgggaagcagcctcaacaaagtgaaaatatgacaggataaaattcctgtaccaatggaaatggggacagagttaactgggtaatttccaaggtcctattcagttttaacrttcacactctttgctttctggcctcaggatctatttttccccccacaagatatacaatatataatatacaatatataatacaacattatacaattatacaatatatatacaattatataatgtatacaattatacaatattgtatacaagatatacaatatataatatacaaaagctccaaagtttcatgatcagattcagacattaaagttgtatttcaataaatataatcaaaatgccactttgccaggtgttttgtcgttgttgttgttttcttttgtttttttttttttttttttttttagagagggtctcactctgttgcccaggctggagtgtagtggtgcaatcatagctcattgcagcctcaacctcgtgggttcaagcaaaactcctgcctcagcctgccaattagctagactataggtgtgcaccactatgcctgactggcctcagcacctttgcttatgctgttccctatcatctcctgttcaaatcctgttctaccatctcctattgaaatcctctctgcccttcaatgacaacctcaaatgctactacttctgttaagttttattatgattcctctggctgaatgtaatttctctctccttggtttttttttttttgagacggagtctcgctctgtcgcccaggctggagtgcagtggcgtgatctcggctcactgcaagctccgcctcccaggttcacgccatcctcctgcctcagcctcccaagtagctggaactacaggcgcccgccactacgcccggctaattttttgtatttttagtagaggtgggatctcgccatgttgatcagattggtctcgaactcctgaccgcaggtgatccacccacctcggcctcccaaagtgctgggattacaggcatgagctaccgcgcctgaccttccatttgattttgtcttttttttttttttttaacaaatgtttcatggaagatatcttctgtgaaagcattggcaaaatgttaacacttgctacagtggtgggccagacaagcatagtctttgtctccatgaagctcatgattgcatggggaaagagacaccgagtggtgattaggagaagggcagaggggagaggaggggcatcgctggagattctgacttaatctgggaggaatcaagaaatatgtccccaaaacttatgtttggacagtagagagaggggagaagattgcaggaaaaagatggcttattggaaggaactagaataagccaacaaatctgagtgagaaattgagggagagactggcaggagaagattctagagaggtggacagagaccagatcctgcagggcctggaaaggcacaccaaggaacttgtgtctcttatgtattttccttatgtcatcttttattatccttgtctccgtgtcagactaattcttcttagtaaaatgtgacttcctttggtcaaggttgggtcttatctttcttgatatcctcagctctgggggccctgtcactactgatttggtttagcatgctaggctaaacaaataaaagaaaaacaaatcattatcaatcaggaaataattcagaaggaaataaaaatgactcagaaaagtcagaattacttttttctccttcaagaacattatgaaaaagcttagacagaaaataattccaaagttaaaattgcacttcatgtgttgtgattttgaccacatcaatgcgacaagcctgaagacttgctgagggttgctaacctgaccacaaccacagcagaacgtagtctttactcaagtcatccacttgattgcagtttaactacattagtaaagcaaatttaatcttgtttttagattctggtcttcctcctccaactcatactccataaagtagcctaaataatgttgttttttgtttgtttgtttttgtttttgtttttttgagatggagtttcatacttgttgcccaggctggagtacagtggcacgatctcggctcaccacaacctccgcctcctgggttcaagcgattctgctgcttcagcctcctgagtggctgggattacaggcatgcgcccccattctcagctaattttttattttcagtagagacagggtttcaccatgttggtcagggtggtcttgaactcccgacctcaggtgatctgcctgccttggcctcccaaagtgctgggattacaggcgtgagccactgcgcccagcccctgaataatgtttttaagaaacataggttgggccaggtgcgatggttcacacctgtaatcccaacactttgagagaccgaggcgggcagattacctgaggtcaggggtttgagaccagcctggtcaacatggtgaaactctgtctctactaaaaatacaaaaattagcagagcgtggtagtgggcatctgtaatcccagctayttgggaggctgagacaggagaatcgcttgaacccaggaagcrgaggttgcaatgagccgagatagtgccactatactcctgcctgggtgacagagcaaaactccgtctcaamaaaaaacaaaaaacayaggttgaatcaatgatttctttgcttaaaaatctttaatggtgtcctctttcattttcaataaaatctgtctttttatcatggccttcagagggaagggattccatgaagattaggtagagtgctacgggcagccaggtctgagttcaatacaaacctgtgctcttcaggcagtattctgcatccttttggagacactctctcaccaggtgctaagacagctgttttactttccagtattatttaaataataacaattatcatctcaccatgttaagaatcttgaaacttcaggattggaagactcacctactccaggaagccttccttgacttccttttctcctctggctcccatagttccataatgtaactctcttagagaacttcccacactgcagtgtaattgctggtttaccttacagattatgagcaacctgaggacaagatctgtgccttggcttcctcagtttctagctcagtttctwgcacattctaaatgtytgatgaaccaayggatatatatatatatatatatatatatatatatacatatatatttttcgagatggagtctctgtctgttgcccaggctggagtgcagtggcaygatctcagctcactgcaacctctgcctcctgggttcaagcgattctcccatctcagcctcccgagtagctgggattacaggagcatgccgccacatccggctaattggctaatttttgtatttttagtagagacagggttttaccatgttcttcaggctggtctcaaactcctgacatcaagtgatccgcctgcctcgacttcccaaaatgctgggattataggtgtgagtcgccatgcctagcctcaccaaaggcatcttataattgatcaagaacttcatttgttcagtgaggcacagattctttccattctatagatgagaaaattgaggccccaggagagaaaatgaagtactaaaagtaacataggaagtcagggcaagaggcaaaatgtgcaggttatatctaggttattaattcaacgttacaagaatcatagcattgcccttttaagccagtcccctgccactgcctcccatatctgaaagagaaacactacctctctgggatgttctgcacatcattacatccctgtaacacactgcctgacacacactggccctgacatctgaggggtgaacacaaaatggctacttggcttaaggaattccgaccagatgggttatttctcatggtagttgtcggtaattaaactcatgcgaaatccaatgaactccatcctcttgccacctcctctcagccaatcagggtcatgatgtagggtgaaatctatcatcgttgcctctgtggcctgaaacaagaggaaacctaatctagcccttctcttgtagaaagaacctctggatgagtctggatggatgattaaaaatgtgctttcaatgccgattrtgaacaagaaggaagaaattgttggagtggccacattttacaatcgtaaagatgggaagccctttgatgaaatggatgagacgctcatggaggtatggcttgctaggaggccttttgctgttgggattcagagtcagcttgctgggggaggctgggtgtcactgcgctatcacatggggcagcaacctggttgctataaccctgactctgcctcatcaaccactttcttcactctcactgctgtactgcactgatgtgctgtcagagaaatccacatttcctttttaaaaaatgtaattaagctgagcatggtggctctcacctgtaatcccagcactttgagaggttgaggcagatgaatcacttgagcccaggaactcaagaccagcctggccaacagggcaatatcctatttctacaaaaagttaaaaaaagattagccaggcatggtagcgcatayctgtggtcctagttactcaggagactgaagcaagaggatcacttgagcccaagaggtcaaagctgcagtgagccatgattgtgccattgcaatccatcctgggtgacagagcaagacccygtctcaaaaaaataaaaaataaaaaataattaacaaactttactttttagagtagttttaggttcttagcaaaattgagcaaaaagtacagcgttcctagatatcccctatccccacataggcaaaaacacattctctttttgtgaagttattacacataagaatggtactttctgtatgttagtgctttawgtacagtgtggtcacatccattcctttatcttagccttataagaactccgcaaggtgggcagcacacagcttatcaaacccattttatagctgagaaaacagaggcctagagactcttgctatgagttttagagtcaagattaaacttaggtgttctgtctctgattcctcctttctttctttttcagtctttgactcaatttctgggctggtctgtcttaaatcctgacacctatgagtcaatgaataaacttgaaaataggaaggatattttccaggacatagtaaaatatcatgtgaagtgtgacaatgaagaaattcagaaaatcttggtgtgtaatgttctttacttgtttctactctaatacagactgcgtctcagagatgtggccagattaaggcaaaacttgcaactccatgagggcacagcctgggcrtgggtttgtgcactgttgtgttccttcctgcctagcacagggatgcagcagccctcaacatttaatgaatgaatgaatgaatgagtgcatgagcagatgagtgcctgagagtggtacataacgactgcactgtgtggcctggggacagctattgcttgcagaaacacctcattcttggggtcagatgttggcttgacagctctagaaactccatttttcacagtgctcagggatgacttgctactggagacagagtcaaccagccatagcccctactctgagaggaagctttatctggaagaccagtagacaattatcagtttctcagagcctccctcctgtggggtcagctcacttaaaagaccctattaagttgggtgcagtggcttacacctataatctcagcactttgggaggccaaggtggtcagatcgcttgagcccaggagtttgagaccagcctgggcaacacagcgagaccctgtctctaccaaaaaaaaccccacaaaaattagtcaggcatggtggcgtgtgcctgtagtcccagctactcgggaggctgaggtgggaggatcacctgagcccatggaggtcaaaggctgcagtgagccgtgattgccacaccatgcttcagcctggctgacagagtgagaccagaaaaaaagaaaaaataaagacaggctaatgtttttagagggcatttcttaagctgggaagataccacaacaaatttgatcatttcattccaataactgttaaattcagaagagaaaacatcccgtttaaataaattgcctcatggtttgcttgactcagtccacagtttcagccaaagaatgggtatgtgcaacctatcggggcacagcctcggtgaaccagttacaagttaacaaattttgctctgggtcaagaaatcaggagcaagtaactgggtccagttccccctcctctggcacatggggacacaggcccagagagagaaggaacttgcctcaagttacacagtaaatgagaggaagaactaggactatgtccaaggcctccttactcccagtcagtaatagtaacaatgaaactatcaacaacaacattaatttatgttagtgcttactatgcgccaagcactgtgctaagtgctttatatggattatttaattttacatatgttacttgagaatgacttttcacaattaaattttaattcaccagttaagtatgtttattatcctcaacttacagatgaggaaactgaagmtcagaagcattaataacacggctagtaagtggtagagcttgaatttgaatgcaggtctctatggctctaaagcccaggaccttgtgcatcaatggatgttaaatggaatcctctttgagctggtggttctgttgcaaggactttggaggaaggagataaatgggaatggaaacgcggaggcatgttgtaacctrttttttttcccctgccattttgggtcctggcagaaaaccagagaggtgtatgggaaggagccatgggagtgtgaggaagaggagctggctgagatcctggtgagctgaaccggggcagcacgagccccgatgtataacaagtgcaaagtgctcctgagcatgcagggktttctccttgcaaagcatgttccccatcactctgttctgatccttccagcagacccaggatggggacagggctggacaggrggtgggcacccagaaacacttcatgtttcctaatcacctgactctattccttatacagcaagcggagctgccagatgcagataaatacgaaattaataaatttcacttcagtgacttacccctaacagaastggagctggtaaaatgtggaatacagatgtattatgagctcaaagtggtggataaatttcacattccacaagaggtgaggtcaaaacaaatatatatgatttccctttttaattttctttcttgcttgctttaaaaaaaagactcaatctgtaaactaccttaaaaagagtttactctcagtatttaggatttaaagaattagtcatgttgcacagatgagtcatttataagaaaagagayacgctgttcctctgtgtcctgtgaagtgtgatgttttgggtgcgttggtttcttgcagtgggttctgaggtactaagccctgaaggctgggaatagatatgctgcaaaaaatgggtcctatagttaaatgagggcagaaaatgtgggctaaacccatttaaacagggctcattccctgcaggattccttactaaggtttgctgtgagtctagggtcatgggggacggcagagaaggtatgtgtgggaggcagtgggatatgatatgcagaattgcctgaacttgtttgattttgwttaaagcagtggttctcaaagtgttaccccagaccacatccacaccacctaagaacttatcagaaattcacattcttctttttctctctctctctctcctctttcyctctctctctcrcacacacagacacacacacacacacactcccagctctgataaatcagaaactgttttaacaagtcctccaagtgagtctcatgcacacgcaagtttgagaaccactggataaaagagtccttttgtttttgttttttttttccctgtagagcccttgttagcttctccaaggatagttgctctccagggcacagttcgggaattactgatgaagctcagtcagaggaatgatgcatgctcacctcgtttcctaacaacaacaacaacatcttcttagtatttagcatttagtatttgcaaagcactttcgcagcatgattgcatctagtacaagctctcacctcctggtccaatgatggggttagagtacctcaaacctcaaaagagagggccatgggccatgccttcttcatatttttgttattccaaccctcatgagaccatttcaggtgtgtcctgcctcactgatgtgcatgtgttcacaggccctggtgcggttcatgtactccctgagtaagggctaccgcaagatcacctaccacaactgrcggcacggcttcaacgtggggcagaccatgttctccctgctggtggtatggcggggccggtggggctggtagggtgggcttgcatcacactagacaatctcatgcagactctacatggtagcaacagcgttgttcttctttctttatttattgtcttttaagagttatgtgaaagcagtacgggcttagtgtaaaaggattccaagaatagagatgcatataaaataaaaagtgaaagaaagctgcaagctacccccaacctcagtcaggttatttgggggtaaccatgtcacaagtataaaagtagttcaacagggccgcctgtaatcccaacactttgggatgccgaggcgggtggatcacgaggtcaggagttcaagaccagcctggccaagatggtgaaaccccatctctactaaaaatacaaaaattagctgggcgtggtggcgggcacctgtaatcccagctacttgggaggctgaggcagagaattccttgaacccgggaggcagaggttgcagtgagccaagatcgcgccactgcactccagcctggtgacagagtgagactctgtctcaaaaaaaaaaaaaaaaaaaaattcaacagttcaattggtcatggttatagtctttgcttgggggcataatgacaattaggaacatatttcatttttaaatggcctgttataaagaggtatccatttctgtagttagcctggcaatgcaagtcatagtaatgtggaaatccacttaaaataaataaataaagattagaaaaccttgaaatagaaaagtttgccattcaccattcgagatgcctccaaaccacctgttagctgctcccataaacacatcatgtgttcttttccccagagaaattttctgaaatttccttaaattgtggcagtgtctagagaaacagcagtatcagccacctttaaattaagcttcctgtagtactaaaatcagagaaaagataagtgcaacattcagttttgttcagcctcatacacaagccccaacaaggacaaaaaggaggtctaaagctgcatcatgttccattaggtgtttccatgaatcttctcatccactttttagagagttgcttcyacctgtctgaacactgggaggcctgattgactataaaatccaagatttccctctaatgtataatcagctttaaattccctataactggtacccctctaccagcaagagtgagcccccaggagccccattggaaactttcctcagtagacactaacttatattcatctattttgaggtcattagtaattctggttattgattgctttggcctctgattgtgggagttattatgggaactttcaggggcaagctatctgggagcatgagtgagcctggccaaataacaagttctgaaccatcagggagacagaacagagtaagcaaacccaatataagcccttgggactggaaaagaggccagctagtgatgcatgaacagagttcagttaagtctgtccactcataagtctgcatagctcctgaacagggtccagtgagacacttacttttttgtagtcccttcatagcatactgtaaggttgcataaccatatttagtggaaagaaaccttactggatttaatccagtgacatcctacaagcaattactcatacccacataggtagtctccaggtcttgactatacaatacctgaaagcaggatataccttttgtaggcatcacttagatgggttttctatatttggcagtgattaggttattaattagaaaggtcagagtacggtttccttcatgatggcagagaagtcttgatctatgatccctgtctagaatgccatctgtttctgtggaaaaccttccctggttagctttacccgaaggagtccaacaggtgtatacttccaggaatctggagggaccttttgaattgagagatgtagatccaagactcaaggccctaaagttttgcggtagagaagaacttggtatggtcgcgtccaatggagttcaagagcagtcttcctttggtgtaatttccaaaagacctaatctttgggttctagatcatgaaagatctggttgtcatcaactggtgggtcacaaagggcttctttaacctgatgaaaatatgctttggcataatgcactaaagttctgcactactgagtcacgtcagagtttataaaagtggaagataaatgaggttctcttaccaggggcatacaccttcctgtaactatttcgtatggggccaatctgtttttcagcaggagtggatctgattgccatcaattgagaatacctttgaccaaggcaatccaattgattcagttagctttgcctaatgcaattgtgtttaaaatatctttgtaaatggttttacgatgtgtctagtgaaatgagtatctctttatctctatctataaattttatacaggctgggtgcagtggctcacacctgtaatctcaacactttgggaggcttaggtaggtggaatgtttgagcccaggagttcgaggtcagcctgtgaaactccatcactacaaaaagtacaaaaattagccaggtatggtggcgcacgcctgtggtcccagctactcagggagtaaggcaggaggatcctttgaacacaggaggctgaggctgcagtgagctgtgatggcacaactgcactacagcctgggtgacagagtgaatcattgtctcaaaaaaaaaaaaaaaaggaaagaaaagaaaagaaaatgtcatacaatttctgaaacacatattaataacatatccatagactataactcaaacaaagcttagcattattatttgacagtgcttccagaaaagtctctggagattttctcaagaattcctcacaagggaaaaacatttttttaagttttttttttgatttgagctcctactctgttgcccagtccggaaagcagtgatgtgatcatagctgaatgcagcctcaaactcctgggttcaagtgatcctcccatctcagcctcccaagtagctaaaactacagacaagtaccaccatgcctggctgatttatttattttgttttttagagagatggggggtctcactatgttgccatggtcttgaactcctggcctcaagtgatcctcctgctgcagtctcccaagttgctggaattataggcacaagctattaaactcagtgaaaaaatattttctaatagctttttaagtagtgttatagcatcagccttcctgtatgggaacggttctataaaaccagaaaagaagcactaaaggagcagttaagtgaaatccatttgtaagtgttcagatgatccagtgggtgctggaaatgtgttgcctgagatttttattgtcttgctagaattatgagtttgacaaaccaaactttttttttccttttttttttgagatagggtcttgctctgttgcctaggctaaagtgcagtaatgtcattatggctcactgtagccttgacctctcaggctcaagcaatcttcccatctcagcctcccaagtagctgggtcaacagacactcactgccatgctgggctaatttttaaattgttttgaaaagacagggtctcactatgttgcccaggctggtcttgaactcttgggctcaagtgatcctcctgccttggcctcctaaagatctgggattttaggtgtgagttaccacgcctggccccaaacatttcttgaaaccatttcagcaattctacttatttatttattttgaaatggaatctcgctctgtcgcccaggctggagtacagcgatgtgatctcggctcactgcaacctccatctcccaggttcaagtgattcttctgcctcagcctccccagtagctgggattacaggcacgcgtcaccacccctggctaatttttgtattttttgtagagacggggtttcatcatgttggccaggctggtctcgaactcctgacctcaggtgatctgcccacctcggcctcccaaagggctgggattacaggcaccagcctccgcacccagcccattttagcaattttagagcagtcaccttgtcactattttgtcatcatttctgtcattttatctcttccatgatgagtcatggagtgcagtaatctaataatggaagctttaaggactcaagaaggatgaggaggccatcgggactccttatgagtccacacttaacattggatttacatccttttaaataccaatttcatttctccaattcaggtgcatagcactgtttattaaataggttatcataggtaacttgacttggatcaatgtttggagttcattaaaattgtatatctcaccaatttcagtactggctgacttagcataaaaatctgccaaatcatttgttttaattttcaattattttttattctgcttaatactgagttagcagttttatgaaccagtttcttcactggaattctggaaattcttccccagtccaatggtatgatcttatgaagaagaaacactttaggcttagagttgctcaggaaagtagcagagtgaaaaaccacctgtggatgacaagactttacatggtcatggttaaagatctcatgagagttcattacaataatgacacaattgacaaggaaatttggttatttccgttgcaaacattttaagacaataactaaaattgtgactgatagtgttataccaggaatactagatttctatgaattttatacagtttctgaaacacatattaataacacatctttagaatacaacttgaagatttagcattaattgtatttgacaatgcttcccatataatttaatatataaaataagcctaattagtttaatgtctctctttttacaagaagagatatctttttgagatgttctaagggttcatctgaaaaattccaaagttaatttgcagtcaagaaaaatacttaatttagaatatgattttggggccagacgcagtggctcatgcctgtaatctcagcactttgggagactgaggtaggtggatcatttgaggtcaggagttcaagactagcctgcccaacatggtgaaaccccatctctaccaaaaatattttaaaaattagcctagtgtggtggtgtgtctgtaatcccggctactcaggagggtgaggcaggagaatcacttgaatctgggaggcagaggttgcagtgagttgagatcgtgccactgcactccagcctggacaacaaagcaagactctgtctcaaaaaaaaaaaaaaaatgaatatgactttgggaagtttctaaatgcttgaattttttttttttttttgagacagagtcttgttctgtcacccaggctggagtgcagtggcatgatctcagctcactgcaacctctgcttcctgggttcaagcgattctcctgtctcagcctccccagtaactgggattacaggtgcgtgccaccgggccaagctaactttttgtacttttagtagagacgatatttcaccatgttgccgaggctgatctcgaactcctgacctcaagttatccgcttgcctcagcctcccagagtgctgggattacaggcatgagccactgcatccagcccaaaataagataatttagcctagtgtggtggcatgcgccagtagtcccagctactcaggaggctgagatgggaggattgcttgagcccaggaggtccaaaccgcagtgagttttgattgcaccagtgcactctagcctgggtgacagagcgagactctgtctcaaaacaaaaataaaataagataaataataaataaataaataaaaatacagaaagttaaatacttatagaaagaccttagctcttttaataaagaaaacagttttcttaagtgatcaaaaacctaataaaggcaacctggagtacaggaaattaatttggtaaagcacagaatctttgtttcctaggtcaattacctaaaagataaatttcctgttaacagcagaccaatactcaaagaaaatttgttgttttaaaagagaggtccaagttctagttttgcatcagtgtacttttgacatcaatgttcaagatagcattaatttcaaaattttagaaaaacttcaaacaattttcttctgatctttttttttttttttttgagacagagtctcactctgtcgcccaggctggagtgcagtggcacatctcagctcattgcaagctctgcctcccgggttcacgccattctcctgcctcagcctcccgagtagctgggactacaggcgcccgccaccatgcctggctaattttttgtatttttagtagagacggggtttcactgtgttagccaggatggtctcgatctcctgacctcgtgatccgcccgcctcggcctcccaaagtgctgggattacaggcgtgagccaccgcacccagccattttcttccaatcttagccagcttcatcacacatacaattactttcacaagatttatcttccacaagccttctacaactttcttatccattcaacttttgtcctatactttttcctcttctcattttggagtaaccagttatcctacattaggacaaaagtttctcttttcacccttaacaaaataaaacatcctcatatcttatagctttttcttaccaaaagcagtttttgccctcttgtataattgcttatagaattgtttcccttattattttattaataatatattaattattagttattaatatattataaataacatattaattatgtgttaagaattctaaataaagaaatatatattaatatatgttaatatatccttatattaattagaattcttaacccttagtgaccttaatttccagtgaacactaggaagcaagcaaaaattgtgaactgtctgtcacaccagcaatctgtagatcaatcgtctgtgaataataatttctagaagcatgtagttccccatagtacaatctgtcactgtggcacagaaaatttttagtaacagtcccaaatatttttagtctcttggtaataagaaattgtagaggaggcaacatttaatctctatcctcttagatctttttttacttttgagatatgatcttgctctgtcacacaggctggagtgcagtgctgagaacacacggctcactgcagccttgacctcctgggctcaagcgatcctcccacctcascctcccacatgttaggttttgaagggaaggcgagggttaaagaaagacacacacacacacacacacagaaagagggcggctcaagagcaaatgcaggctttacgcccagcataaaatctacagaagtaggaaccagcctaatgccagagcccaccgctgcttacaggctggtggtacttataggtatgggcgggaggggtctgggcagtatggcttgttgcctggcaggctattgataagatgttctcatgatgaggcggttttgctyttgtctcggtgggatgccattgtggtgtttcttggacttttgcccagcaagatatgataggaatgtttctttagttgggcctttgtctgccttgtggtcaggtggttaggaaggctgtttctcccgacccaaacccccatgaaatgtttcactttgaccaaggtctgcaaaataatggggagcttacaaaatggtgcagttgggactaacaccaggtagccgagaccacaggtatgtgccaccatgtccacataaatttttagttttgtagagacagggtctggctgtgttgcctaagctgatcttgaattcttaggctcaagtggtcctcctaccttggcctcccaaagtgctgccatgtgtgacctgccatgcctggccctgtcttattttttgtttctttcatcttgactattctatgcacctcatatacagtgaggtgaaatcatacagtattcgtcctttcgtgtctggcatatttcacttaacataacatttttgaggcttatccatgatacaattttgtggctgcatagtgttctattgttggacttggaagtcttttcaatctttcactattacaaacagtgccacaatatccttggatggacttatctttgtgtatttgtgttcgtatttttcactgagagggttcggagacttttatgttttatttcaagttatttccccatccagatcatgatgcaaatccctgcccttcctcaacatcatcccttcccccttggctgaaatggtcaggccagagtaggtgctagggcccggaagcaggaattctgaccaggctaccttaaagggtgacaggaacaccacttagagtgattgctttcataaagtcagcatcagctctccagagcactttcccacatttggtttcaacacccagcatcaacaaggagttaagtgtctggcaaaatcccagggaaggattcctccaggctgtgcttaaaccagtagaccacgtttggaagatttgctttaccagcctggccatgttcagaaactctccaaatcctaaaacctgacttctacaagtttctcaaaattcatctgatccaatatgctcgaccctcattatggagattgggctaccgaggttcagagggagatgagaccagctaaggtcaactcagaaatagggtgaccagttgttcccatttacctgggactttccccattctagcactgaaagtcccatatccaaaaaacccctcagccctgggcagtcctctggtcagcctctggagccaggatacagccaagatcagacccatgagttttttagttctgggccctcctccttacacccgccttttcagccctgcttccagcccctacacaaaaggaatgatttgcactctgattgcccttccagacgggaaagctgaagcgctacttcacggacctagaggccttggccatggtcactgctgctttytgccatgacattgaccacagaggcaccaataacctctaccagatgaagtgagtcagcctccctccccacacccaaccctccggattcattatccagctctgtgtggctcccaggcagactcactggccaacagggaagtcttgtggtccacagcttcccaccgccttctgcccttgggatccgggtctcctcctgtagcaggcagaataatgaccaccacaaagatgtccagatctcaaatccctgagctggggaatatgttgccttacatacaaaagggactgtgcagatgtgattaagtcgaggatcttgagatacagggattattcattcgagtgggccccatgtagtcccaatggtccttataagagggaagcaagaggtcagagaggaaagaagatgctaccctgctggctttgaagatggaggcatggcctacaagcaaggaatgcaggtggcctctagaagctcaaaagagcaaggaaacggattctcctctggagcttccagaaggaaagcagccctaaggacccatttcagactccatacagagctgtaaaataataaattttattgctttaagccattaagtttgtggcagtttgttatagcagccatagaaaatgaatgcattaaactcctgtacttgtctccttccttgtcctacctgctgcactaatttgagccaagatgttaataaccagtaatggttcattcactcatctcgtatttacagtgcttctaatatagtgtggtaggctctatgccaggcaaaaaaggtgctctgatgagcaaaacagctcctgtccttacagagcttatatttcagacagcccataaagcatagtccttgaaccatgatctcattggatcctcacaaccacccagtgggctgggcagagcaggggctaatgttatccctacttacagatgagaaaactgagtytccgctcagggccgatggcctgtaagtcattaacaagctctgaattcatgctgctgagtcttctcaatactttcatgctgctctggggctagagattgggtttacattttacattttgagaatctaaatacttagcacagtgtgtggcacatagcaagtgctcaacaaataattattgaatgcagaaatgaataaatacacggcttgcggaaattcagttgtttccttcaagacttggatgtgaagaatcagggctagatgatcttgaagcatggcccagtgctaatgtccctaaaatcccttatggcattgtgtgtgtttgtggctttctctggggaaggggtccatgctatttagtagattctctaatgagttcacgacccaaaagtaactcggaatcacttgtggagaaggctgaagactgagtcaggagacttgatgtttagtcctaattttctattgtccactccatattgattctctctctttctcattcagatcccagaacccactggccaagctccatgggtcctctatcttggaaagacaccacttggagtttggcaaaacactgctcagagacgaggtaggatgagggccaagggtctacaggccgcggggcctggatcagaggctctatttcacaaggagcctgagtgtgcccagggagcattcttcccattggcctgggctgcctctgccatcatctggggtggccattggtaggtgggtgactttactgccagcatcaattctctcccatctsgcttctctttttttctttagagcctgaatatctttcaaaacctcaatcgtcgacagcatgagcatgccatccacatgatggacattgcaatcattgccacagacctcgccctgtatttcaagttggtatatcttctcattctaatagtaaaagcaacaatgattatatgtatgcatatatatatatacacacatatatatacatatatacacatatatatacacacatatatacatatatacacayatatacacacatatatatacatatatacacatatatacatatatacacatatatacatatatacacatatatacacatatatacatatatatacacatatatatacacatatatctacacatatatatgtgtgtgtgtatatatatatatatatwtwttttttttcttttttgagacaggatctcactctgttgcccaggctagagtgcggtggcaccatcacagctcactgcttcctgggctcaagggatcctcccacctcagcctcctgagtggctgggactacaggaacaccaccactcctggataattttttaatttgctgtaaagatgggttctcactatgttacccaggctgatctaaaactcctggtctcaagccatccttctgcctcagcctcccaaagtattgggattacaggcatgagccactgcacccagcaacaatataataacaataataataacaaacatcatagttccaattaatttagcatatactatgtgtcaggcacaacacgtgtgttatggacacattgattcttgctacaagcctgtgagttagatatcattacccccgctgtacagatgggaacactgagattcaggacaagagatttgctaagagtagataacaaatcagtggcagagacttaggttaaacctaggtcttcactcctgggccttggctctttcaaccttgttttgtgaattttgttgatttaataaggctccatctgaatcagccaatgttagcagctcaggtgttgccttattctaagacttgctccctttactagactgatatgttttgtaggaagaggacgatgttccaaaagatcgtggatcagtctaagacatatgagagtgaacaggagtggacacagtacatgatgctggagcagacacggaaggaaatcgttatgtgagttgggatggggttaaaacctgatcctcttaggcttaggatcatgaggcgagatgcactgacagctcttgctgccctcaacaagccttgggactatttcattttggaggccttcaacatatgaaaaaaatgaagttatgccaaattccaawtgcacaagccacatgtttaatctttattttagcactaaaaatgcaagacagtgtattattgttttatttatctgaataaaaaaatatgttatttgaagtagttcaatcataatatctaagatttgggtggtaaactgatataacttttaagtttttgatacaacggaaagcactatagcaattaaggggtttttgttttgttttgttttttgttttgagacagagtctcgctctgtcgcccaggctggagtgtagtggtgcgatctcggcttactgcaacttcygcctcccaggttcaagcaattctcctgcctcagcctgcctagtagctgggattacagtcacccaccaccacgcccagctaatttttgtatttttagtcgagaccgggttttgccatgttgcctaggctggttttaaactcctgacctcaagtgatacacccacctctgtctctcaaagtgctgggattataggcgtgagccatcatgcccggcccgaattaaagtttgagtgatagttaatgtgttattcaaaacatataggcttaatttttaacgtattcctttacataggacaatatcccacaatatagctgtgctagtcacaaattggttatggttggtatgaaatttacagtgcatggtctgkcatggttggtaatgggactcaaatttaagttgtctggtgaatgtcttttttcagttttctcagtgtgcttccatgattcacctcaattgacaatggggtgagaagtgtaaatttgaggccttttatgaatatgtggcccaagccaaatggtcccctggctcctctgtgatgggtcctgggcattgaaggcaatggtcaggaaaagttgcaggggagacaaggctgactagttgcctaggaagcattgggttatttgtttatccccagatgcttctgtggaaatgaggcttgattaagtcacaagcattgcaaatgtctgcaacagagaagaggagaccactgggacaggctccggaaacggggggggcagcagcaagttgccactccttcagccctgcagttgtccaaccaggcctcccacaaaggtcccctgattctgggagcagtgcaatctgctttcactgaacaagggggcatgctcagcccacagttactcatagactggccaggagctgcccccctggacattttatttatttatttatttatttatttatttatttatttatttttgagacagggtcttgctctattgcccaggctggagtgcagtggcgatcagggctcactgcagcctcaaccttccaggctcaagcaatcccctcacctcagcctccttagtagttgggactacaggcacacgcactatacctggctaatttttgtaattttggtagaaacaggttttgccatgttgcctaggctggttttgaactcctgagcttaagccatccaccctccttggcctcccaaagtgttgagattacaagtgtgagccaccacgtccagccacatttatttatttataatttcaacttttattatacattaaagaatgcatgggcaggtttgttacatgggtatattgtgtgacactgaggtttggggtacaaacgatcctcacgcaggtagtgagcatagcactcagtatgtggttttctggcccacactctcctccgtctccccttgtgtagtccccagtatctattgttgmcatctttgtgtccatgtatatgtaatgtttatctcacacctgtaagtgagaatatgcagtatttggttttccattcttgtgttaatttgcttaagataatggcctccaacaccatccctgttgctgcaaaggctatgattttgttcttttttatggctgtgtagtattccatggcacgtatggaacacattttctttatctaatccaccgttgatgagcacctaggttgattccatgttttgctattgtgaatagtgctgtgatgaacatgttagggcatgtgtctttttggtagaactctttgttttcttttggatacrcacccagtaatgagatgttgggtcgaatggtaattctacttgaagttctttgaggaaactccaaactgctttccacagtggctgaactagtttacattctcaccagcagtgcataaggattcctttttctccacagccttaccagcatctgttatgttttgatttttcttttcttttcttttttctgagacggtgtctcactctgtcacccaggctggagtacagcagcacgatctcggctcactgcaacctgcacctcctgggttcaagcaattctcgtgcctcagcctccacagtagctgggactacaggcacccgccaccattcccagctaaatttttttgtattttttggtagagacggggtttcaccatgttggctagattggtctcaaactcctgacctcaagtgatctgcctgtctcagccttccaaagtacccagccttcttttgactttttaataattgccattgtgactggtgccagacagtatctcattttggttatttatttattgacttttgcttgtgcttttctttttttgagatggagtctcgctctgttgcccaggatggaatgcaatctcggctcactgcaacttccacttcccgagttcaagggcttctcctgcctcagcctcctgagtagctgggattacaggcatgcgacaccatgcccggctaattttttttgtatttttagtagagacggggtttcatcatgttggtcaggctggtctcgaactcctgacctcgtgatccgcccacctcggcctcctaaaagtgctgggattacaggtgtgagccaccacccccagctgacttctgttttttcctaatgtttttctttttttgacttccatagctggacatttcaaaatggctcagcagaaggactaaatcattgaaaggaacaccctgctattggatagggggacttgatttagaaagttgtctattctccctaattttaatttattcatttaagggtgattccaaaacaaatcaagcaaccaaccaacaaacaaacaaaaaaaccctgctttattctgggggaattaggaagctgattgaaaaattcttatgagaaatgagtatgcaagaataaccagaaaaagaaaaaagataaaaaagaatagccagaaaattctgacatggaagagtaataatggtgaccagcagaactaaaggcagttctgtcctaggcaggagaagtcgttcagatcaatgggatgaacttaaggactatgtctgtgttcaaagtgggttttatactagtggagaaaggtgtaagttcatcagtggttttgggacaatgggatggccatgaagttagatctctatctcattccttataccaaaataaactccagatgtaataaaaatttttaaataaccagggaaagaaaagagagcacgaaaaaagcatggaagaattaaggaaatgtggcacatatacaccatggaatactatgcagccataaaaaatgttgagttcatgtcctttgtagggacatggatgaaattggaaatcatcattctcagtaaactatcgcaagaacaaaaaaccaaacaccacatattctcactcataggtgggaattgaacaatgagatcacatggacacaggaaggggaatatcacactctggggactgttgtggggtggggggaggggggagggatagcattgggagatatacctaatgctagatgacgagttagtgggtgcagtgcaccagcatggcacatgtatacatatgtaactaacctgcacaaggtgcacatgtaccctaaaacttaaagtataataacaataataaaaaaaaaacctaaaaaaaaaaaatttcagagcgagcttttcaaaatgtgacatgaggctgggcacagtggctcatgcctgtaatcccaacactttgggaggctgaggcaggcggatcacctgaggtctgaagttggagaccagtctggccaacatggtgaaacgccatctctactaaaaatacaaaaattatctaggcgaggtagcaggcgcctgtaatcccagctacttgggaagctgaagcaggagagtggcttgaatgtgggaggtggaggttgctgtgagccgagactgcaccactgcactccagcctgggtgacagagcaagactccatctcaagatagatagataaataaataaataaataaaacaaaataaaataaacataaataaaatatgacatgaaaatcgtaagtcataaaattagatggagaaatctgactatgaaaaattaaggatttctgtacaacacacaaaaacacatagtctaaataggaaagtaagtgataagctggaggtaaatatttgcaccacttctaagagaaaaagagctaatttcctcagtgaataaagtgttaatatgattccaggaaaagactaatccaatagaaaatgggcaaaaggcacaaaccgacagttcccagaaaagttacagtgggatataaacctatgaaaagacggtgattataaaactacaatgaggtataattgttaactcctattgtcaaagatgaaaacatttgcttacatactgtgtcgggcagagtgagggaaagggccacctcgttccccatgcgggagtgtaaacaggctcagtctttgcagagggcgatttggcaacacctatcaaagctgtaagtgctcatgccctttgactcagcaatcccacttccaggatttcccctccagatattctcccacatgtgcaccaagtgtatgtacagaattgtttgttgcagcattgtctgtaacacaaacaggattgaaaacaatcgaaatacctagcaatggggaaccaggttaaataaacgataacactttcatacaatggaatatcttacagatttgcaaagaaatgacatcaaatgaaaggaattatgtttaattttaaaagaaaaaaaaaagccaggagcaggatctcaatcattgtcaaagtcaaggtgaccttacgtaggcatcttcagctgacggcacacatacccctctgggaactcatgtccttccaagatgtatatcagcatagatagccttaagggaatcagcattttcttttgtaatattaatcttcctgagaaagaagcagcccagtaggcacagcattctctcattcttccccaccttacaaaataaaggcaaactccattctttcttgaatcttcccacattgcattgtcgtagagacaaaaacctctgggcagccaaacggagggactatttgaaatacagtcatccctgggtatactcaggggatcggctccaggaccccctagtataccaaaattggtacaaactcaagtcctgcagtagccctgaaaaccccttggatgtgaagagtcggcccctccccacatgggttttgcatcctgcaatccatgttcagttgaaaaaaattcatgtgtaaatggacctgcatagttcaaacctgtgttgtttgagagtccaccatactggtggtgtcacagcctcttataattaaggcattataaatctaaggaaggggctgggcccggtggccatgcctgtaatcccagccctttgggaggccaaggcaggtggatcacttgaggtcaggagttcgagaccagtctggccgacatggsgagtctccatctctactaaaaatacaaaaattagccaggcattgtggtgcgtgcctgtaatcccagctactcgggaggctgaggcaggagaattgcttgaacctgggaggcagaggttgcagtgagctaagattgcaccgctgcactccaacctgggtgacagagtgagactctttttaaattttttgtagagacaaataaaggtcttactatgttgcccaggctgatcttaaactcctgggttcaagccattcttacacctcggcctcccaaagtgctgggattacaggcatgaaccactggacccagactatttggacccagactatttgttcaagagtttttacaactttaattgccaggcactccccctgaaccccacccccattcccagccagtgggtggggttttataggggggcagcaggtgaaagatttttcatttaaatatcttacttctttcagaaaatgtatcactgtccagggaccatgacactagggcaaaggcacatcagtaatacgtactgaagatggtagcaactgatttaatccacttcactgtcttctttctatcatctgtctttacaattttttttctttcttttttatttggtcaatagtctctcaacagaatcatattatctatctatctatctatcatctatctatctatghatctatctatctatctatcatctctcatcatctatcatcatctgtctgtctagtctacctacataccctccatgtacctttacctttcttagaattaaaaataaaagataagttggatgtattgtaacatgcttatttaaatttaaaaataggaactgggcatggtggggaggctgagacgggcagattgcctgagctcagaggttcaagaccagcctggggaacatggtgaaaccccatctctattaaaatacaaaaaacaattagcagggcatggtggcttgcacctgtaatcccagctactgtggaggctgaggcacaagaaccgcttgaaccggggaggcggagtttgcagtgagccggtatggaaccaccacactccagccgggccacagagtaagactctgtcctggaaaatttaaattatccaggtacggtggtgcacgctacttgggaggccgaagtgggaggattacttgagcccaggagtttcaggctacagctagctatgatcatgccactgcactgccctccagcctgggcaacagagagactctggttaaaaaaaaaaaaaaaaaaaaaagaggaaaaatgggcaaaaaataggtgctgaatccgactccagtctagtaacaagaaatattcattcataaaccaatactttttaaaaaatccaccctatattgttaatagatgaattcaaaaaagggtgctttgagtgtttaataattatttgtaaaaataggtagtatattttgttatttaattgtgtaataataacttaatccaaaagaaaatttttcaacacttagaggcttatggtcaaagaaaaaattttaattacataatttcaataaatggatataattgattgcaagtaattatgaaaatcgatcaatgaaagactttcaagcatatatgtagtgtacacacacacatatatatacagaaacacatatgcacatacatgtacacgtatatacacacaatattaggataaaattctgtggggaagtcaagtggaaatagaggtttacagagacaaggaaagatgtaaaactctagactcttaaagaaaagcttgctcatgtgcttttattgtgggtaaagaatgatgtaacaaatttattttaaaaagtcagtatggccaggcacagtggccacatgtgtaatcctagcactttgcaaagctgaggcgagaggatggcttgagctcaggggtttgaggccagcctgggcaacatagcgagaccttgtctctataaaaaataaaaatttccctgggtgtggtggcacgcacctgtggtcccaactactcaggaggctgaggtggarggactgcttgagcccgagaggttgaggctgcagcgagccctgacggtgccactacactccagcctgggtgacagagcgaggctcctccgactcaaaaaaaaaaaaaaaaatagtcagtatgtataatgtgctataaattagatcctttgaaaatattaaacttgtaatagtttaagatgtcaacttaaaaatgtgcaagaaggtagcacttttcaaaattctttaggtagggatttaacgaaaaatattgggagacctgtaatgcagcgtttctcagtctcagccctgttgacatttggggctggcaaccctgctgtggagctgttctgcgccttgagggatgcacaggattagacaccaggagcacccccacccctccccagctgtgacaatcaaaaatgtctccagacattgccaaatatcccctggggcaaaaattggcccagctgtttgctataaagccatctcggggcccattgcttaggtgtataattggaacttcttcacacctgggtagcatgtagctgttacacacttggggctttggtatcagacagcctgggttcaagtctcagctctttcatttattggtggtgtgacctcaagcaggtgacttactccctcacctcagtttcctcatctgctcagtgaggatcatggtggtgcctactttgtggaccatcatgggggctgagctggagtatgtggaatgcagtgcagcaggtagtggtgttcggtgcttcctgtggtataagaagacatatatgtttggtcttcgttcctggttcctgacagagatcctaaaacccttggaatttcctgagtgataggagcatcttttgttctgatgggatgactcttggcaggaccctagacagcttcaggctaggggctggtcaccagaaagaccaagccttcatttgaagcttggaactttcagccccatccccagcctccggggagggaagaggctggagattgagttaattgccagtggataatgatttaatcaatcatgcttctgtgattaaaaacaaaaaaagctccatacaaacctctaaacagcagggtttagagagcttctggtttggtgaatacttcgaggtggtggcacgcattccccctcccataactttgtctatgcatcacattcatttggctgtttctgagctgtaacctttataataaactagaaaatgtaagtaaagtgtttccctgagatttgtgagctcatctagcaaattactgaacccgaacgcagggacacatttcaactttgttgccaagtcagacagaagggtaggtaacttggggaccccatacatgtggctggcctctgaagtgaggcagtcttgtgggactgaaccctttaacctgtagaatgtgatgctaactataggaatttagtatcagagttgaaatgaattgtaagacacccagttggtgtcaggattgcttgttgtgaggaaaaacccaacactcccttcctgtgttttgattatcttggagtgcttatgtccacgggcttcctgtggtgggaggtccacaccaattgactttgacttttttcttcttctttttttttttttttagagacagggtcttgctctgttgctcaractgaagtgtggtggcatgatcatagctcactgtagcctcaacctcccaggctcaagtgatcctcctgcctcagcctcctaagtagctaggactacttcagtaattttaatctagggtcaagatattatagaaactctagagtgagggtgtgacttcctattcttcatcaaactcttgacatttccccttaattccagattttgcttctgacagtctgaccaaaccatgagttggaaaggctcacagatcctctagcactgcagtgtttgtgtatggctcatgagctaaggatggctattacatttctaaatggttgggggaaaaagtcaacagaataatatttcatggccaggcgtggtggctcacacctgtaatctcagcactttgggaggccaaggcgggcggatcacttgaggccaggagtttgagaccaacctggtcaacgtgatgaaaccctgtctctattgaaaatacaaaaattagctgggcgtggtgacgcacacctgtaatctcagctactcaggaggctgaggcaggagaatcgtttgaactccagaggtagaggaggtagtgagcctaaatcatgccactgcactccagcctgggaaacagagtgagactcggtctcaaaaaaaaaaaaaaaaagagtatctcatgacaaatgaaaatcataagaaattcaaacttcagtctccataaataaagctgtattcttttacagagggccacattctgactttcatgggtcctaggcacttttgtctttgtgcctccttcctccataaaagtaaataagtaaatacaaattatattttatgattgtgttggtatgaagacaaatataatccagactgaattcattcttacatattcattcctgttatgtccttttttcctgctcatcttgaaagaaattgaaatattttcatgggccctggagaatatcgtgggccctcggtgctctgttgaatggacgagctggccctgcttatccatgctgtgcttatctacggctgctctcacatcgcagtggcagagctcagtctttgcagtagggactatgtaggctgtaaaacgtcaaacatttactgtctggctctttacagaaagagtttgccaattcctggtctagtgttttacaagtgaggaaagtgaggcccagagagacaatgtgacttagctggcatcaygcaggcatttgtggagcatcaaggacttggactcagccacaccagcccttgcctgcacacccactgctttcttaggctcctccaaggccttccccggcagggtctcctgctgtaccctccagacacatgtaattccagggagggtctgagtaagtgtcctgaaagggctggctaagaggaaggctggaatgcttttcctgaaagttggccaggagtcaggaagaagtgccactgaaactcacagccaaggagccaaatgtttcaggaagaaacatttgccttggggatggtccaggcggataagagctcagcttgcttttgagagctctacacacgagggtgacccagaacgtgagtgagatgaatgcaggtgctgataatgaagatgaggacactgggtgcatttacaaaagcatcttatgtgatcatcacagtaagtcttaaaaaggatatattacattgacccataggaaactgctgaattttaactgatttggactaacaaaatcagaatttcataggatccaacctaacatgaatatctcattttacaaacgaacagactgggactcaaagacatgaagtcgcttgccctggacacagcaagtggggaggagatggaaggtctaattcagctctgtctgattccaaagccctgcatggaattttgcactgttgtcctattgaactccatcccctcctcttgacagttcgtctactgagagcataaggttcacatttctgagcatacaatatttttgtggcatactcttgcttctttctgcattataaccatgttgtcctttactctgttccatcctgacacctctctcttcctcactttgcaagtctaatctgtccccaaatgctgctgagttgacttcctaagtgccatatctgtctggacatttctctttattgccagctccatctcttgtccagatcctgcagtggcttcctaactgggttccctgtgtacgctcctgtcccttccacactgaagccacagtgatttctgtgaaatacaaatgtggccacgtcacccttctgttctaactcccatggcttttcctgttgctcgtagcatgaaaaccatcccctcgcagcggcgcctgggctctgcatgggccgcccctgctcctctgtggagcttctcttaccaggtctcccacctgctccctgagctcccccaacctttaagctctttgtgcmgggcttccttctaccaggccctgcacactagatgatccttctgcctggaatgtgtttctcccactcccttctttagcaagtaaatggttacacatcctacagttatcagctccagaggcactctctcagggaagccctccctgacctcccagacctcagtcagtttctctttctcatgtcttctccaagaatggaagtcctttccttcagagcagttgtttgtttacatgttaacctgcatgtgtgggataaatgtgcaattccccagcacatctgcaagatctctgagagcatggaccatgtgagcccagcctcttcctagccagcagagaccactttccctgtgtgttcttctatggtgatgaagcccatgaccccacgatgggggctgcaaccttacgacctcatctaaacctcagcaccccacaaagaccctgtcttctaatagcatcatattaaaggttagggcttccacatataagactgggaagagacaaacattctgtccattacagagggctcctatgtacccctcaaggcctttgctccattgtcacctcttagatggcacctggactgagctagtcaccttcacttttgggttctttttttcttttcttttcttttctcttctcttctcttcctttctttcttctttctttctctttcttttcctttctttctttttctttctttctctttctttctctttctctttctttcttcttcttttttcaccttggacctttttctgccattctacttagcatattgtgatgacagtttttttttttttttttttttgccctgtgttccttgagtgactatgacctccctgcaggcccctctggatcccctgtgcccagcacagcacttgggaccccagtgcatataagggggaggtgctggagtgaatgtgaagcctcatctttagggcacaagtctcgaattggcttttctggcaccttggtgtccctccttcatcccatgcacacagcaaatctctgtctataaaattcttaggtgtgtttctgcaaccactgggaatgttttccacatgatccctccagctaaagaaagtaagcatccagtgccctcctgaagccaccagggagccagtgactcttatatgcatagctgagcatttatttgctcaacctatctgacagtaagtaaacatgtccacagcacttattaaagcacagggcatgtattctgaggttattataaagcataaaggtgtttctaagaaatgtatgcacttctgaaagcttacttaaagagctatttgaatttctgagggtttacataatttaaaatatgcagtggcatgatcatagctcactgtggcctcaaactcctgggttcaagcgatcccctcacctcagcctcccaaaatgctgggactacgggcacatgccaccacgcctggctaatctgtgtatttttcatagggacagggtctcactattttgcgcaggttaatcttgaactcctggcctcaagtgatcctccttcctcagcctcccaaagtgccaagattacaggtgtgagccactgtgccaggcccataattaaagattttatttaaacttgttaatattccatgagtaactcttacagcctcacagactggcttatagaaaatatgccccacacagctgattaattgtaaaattatccaagcagcaagttaggttcagagccccagccttctctcactcctccctctccccagttcctgcccattggtctcaccccgccgcagccagccgttgctgcagaccagctctcctgccctcctgctgaattactgcagcaccccatccccctccatcctgctcttttcttccttctccatcctactagtcctgccagctgccttcctgcagcacagctctgaagaggtcacaattgggcctttaaccttcaaccgttccccactgcttgctagatacagtctgcactccctggcatggaatttagggcccatgccacatggccctggattaccaggattacctgctctaaaatgttttctcaaatccaccccccttgctccctcctcttgctccagttctttgtccgtgtcccctccctttctattttctgttgtacccacctatgtaataatacctgccttgcctttctatgagtgggacactcccttaagagtttacctttgaactctttctacctactttctttacctgcacccttccactcctttttttttttttttttttgatatggagtctcgatctgtcgcccaggctagagtgcagtggtgtgatctcagctccctgcaacctccgcctcccgagttcaagcgattctcctgcctcagcctcccgcgtagctgggatcacaggtgcatgccatcatgcccagctaatttttgtatttttagtagagacagggtttcaccaagttggccaggctggtcttgaactccagactgcaagtgatccgcccacctcagcctcccaaagggctgggattactggcgtgagccacggcacctggccctttccaagccttaatgcaaggcctctttgctacagctgttcacagttctctttacaccatatgttttcttttttcttttttttaccttttaaattttttgggtgagagtttctgccaggtgaggaaatggcctagaagagaaagaaatctattagtattaaacaaaactcctaaatcagaaaagctaactgactgatagaaaaatggagtatattgcctccaatggagcaaaaagtgattcttgaggtaggagagcaaatcttagctattacaatggcctgtggttctccaaacagatggacagcatatctgtggtattaaaagctcatcgtggggcaattactgaaaaagtatctaaaaaggctcgttggcagttggggcagggaacaatgatgagaaaaaaagttgagaaacacttctctacagtagaaaagagcaaagggactctgaagatgtgatgagatttaaatgaaattgatgtttgtacagtccctggaacagtgcttgatacagaagaaaacccagtacatgttccttatgcatataccatgttcagacactatacttagatttctccaaccacaatctcatttaatcttatacctgttttgtgagtaaggtacgattatcattacagacagggaaatggaggctcagagaggttggtgtagttgcccagtgtccaacctctgatcactgacagaggcaggatctaaccctgtttgatttcaaagcccaacccctggatgcaatgggggtgagccctttcctcacaatgagacaaagtcacctactagtgrgggtggagaaaggtgagagagatggaattaaccagtacatgaagtcttaaatggccctggactgatagaggktgtcctgtgtgcccagggccatgatgatgaccgcctgtgatctctcagccatcaccaaaccctgggaggtgcagagccaggtatgaactcctgctgacccmagaggaggggcatcccagtactgggggcatcaggtcatgaggcttggactctctcagcccagctccagaaccagctcacctgtgtcccatcctcctctaccaagacatgggaatcattttacgtctctccagtgatgacagcaaaagtgagggtggcagggcagggatgggtttatcctttttgttgatttggaattgcaagtggggtgggagcaggggtaggggattgggctggggctctgactctgcgtgtgtgagggtctgtctgttgcaggtagctctgctggtggctgctgaattctgggaacaaggtgacctggagcgcacggtgctgcaacagaatcccattgtgagtagacaggggatgtcagcctgatgttaggtgtgtgtgctccatcctgacctagatatgacctcgccatgatggagagatgtgtgactttaccataaagatgaccttttcctaatgcagtggttctaaaaatgtggtctccaggccactgtcaacctcattacttgagaacatgttaggtatgtatattcacaagcctcaccctaggtctacccaaccagaagctctgggggtgggcccctgcaatgaatgctctaactagtaagccctcctaaattttgggaaatgtgtccttagctcactcaaccctagaggttggcaagtggactccaacacttagattgccctttcaatttcaaaggtctagaagtccatccacctcccctgaccctaatctaacagcacagagtgagcaagttgtgcacctgtcaacattgaaagttaacttggctgagacagtcagccagcttcccatggagatgcgcagttggggagatcggaagagcagcccgaagtttccctgaagtccctgaaggcaaagctgggaagtaaagcagggtttggaaaggatgggtaaaagagagagacattgtggggacaaaccgttgacacctggataggctaaacctgtgagagtgtgctaaggatgcagaggtcaccacggcaggcttaggcaggagccgagagagagtagaaggctgggaggagcaggtcctgtcatgaagaaacacgtgaagggccccatgggctttgtcgttctcactctctctttgtaatattttcaaatatattgagaatagtcagtgaactctagtgcccatcagctacagccaacaattagcagcagtctgccattcttgttttatcaattccttccagtgcatttttttgcttttggttgcagtattttaaagtaaatctcagccactataatctcttccataaatactttagtacgtatctctatgagacaagagcttcatatggacaaaatcataaacacaaccataataccattaacacactcacaaaagtcatatacttcagtatcatctaatccccaatttctgttcatttttcttgattaagaaagagaattcagttgatttgttcaaatcaggatctaatcaaggagcatactgcctctggttttaatgtctcttaagtctcttttaatctgtagcaggccctgccatccctcccaccctctggcctttttctggtatgccatttatttgctgaagacagtgtgtctttttttttgtgcagtttcccacattctggatttggttggttacaccctcatggtgttctttaacatgtttctctattctcctatttcctgcaaaatgctcatcaggtctggaaacatgatgagtttacagtttgattttagtaagaatgcttcatagatagggtaggtttctcttactgtccagtgcaattaactctttctcccccatgacagcccatgatggacagaaacaaagcagatgaactccctaagcttcaagtcggcttcattgacttygtttgcaccttcgtctacaaggtaggcccttggcttcctcagccgcaacaagatgtctttgataaacctgggatttccagacaacagcaggartaataaaccctagcaggtgaccagtgggtgatactttacaaagcgcttctcatctctaatggcattcgattctcaggacagctctatgggtctcatgtgattgcagctccaggctccagcgtacggtacatcctagttgcttaatacataattgtggggcaaatgactaagcatggattcacagaggaaggggaaacatagtagacatatgtccttctaagttccctagctggtggaaacatcataggccaaaagtaattgtgaaaagataatctggactttctctttgagctcttattcaaagttggtctccctcttgagaaacccattgctcccaactttctgttaatctgtgccaccatccacctctgacttttaatttttattttggccatgttacacatgagaagacaaaagtcagagatgcaaagtgacagggccagtgtcactggacttagccataaggcaggatttagcccagttctctttatgctgtgtgagctgcagccctttgctaggaagaagtgcaaattttctagaaggcaacaagagcatctgagatacaactcagactaactggggtgctctgacccacgggacacagtggctgatgcttgccactatcatcagtaatatttcttttttttcattgaggacatgagttttttgctggttttttttttttctttgagacaggtctcattctgtcacccaggctggagtacagaggcaccatcatagcttacagcagccttgacctcccaggcccaaatgatcctcccacctcagccttctgagtagctgggaccacaggtgcacaccaccacatccagctaaattttttttttttttttttttgagacagaatctcactctgtcacccaggttggagtgcagtggtgcgatctcagctcactgcaacctctacctcccaggttcaagaaattctcctgcctcagtctcccaagcagctgggacttcaggcatgtgccaccacaccgggctaatttttgtatttttagtagagacggggttttgccttgttggccaggatggtctcaaactcctggcctcaaacgatccacccgcctcggcctcccaaagtgctgggattacaggcgtgagccatggtgcccagctgagggaatgagttttaatcatcaggaatattattaaataagggagactgggctaagtgctttatatatgttatcaaaaccacactgtggggtaggtattattactgtcctgatttaatggctgaaggtaagctctggtagtgacccgcccaagatcgcagtttgtggcagagcctggaccggaacccaggcatctctgaacacagtcggctctggcacttcacagcgggccgtggatttgctgttcttatattgggcaaatccactccatcaatctgcatctcaatttccttacctaaagatgtagaagtgatgaatcttattttcctacctcacaggaatttgaggaccagaggagataaattgctcataaagtataatgtgctatgctcaaagagctgtaagagcctttaagaatcatcttctaggtggctcatgcctgtaatcccagcactttgggaggccaaggcaggtggatcatttgaggtcaggagttcgagaccagcctgaccaaaatggtgaaaccccatctctactaaatccaaaaaaacaaattagctgggttggtggtgcatgcctgtaatcccagctacttgggaggctgaggcaggagaatcacttgaacctgggaggcggaggttgcagtgagccgagattgcaccactgcactctagcctggtcaacagagcaaaactcagtttcaaaaaaaaaaaaatcatcttctcaacatcccgatttcactcagaaaatatttactgagtatccttgtgtcccagaccttgtgctaggccagggccaccccagggaatgaggctgccaatgtccctgccctctccaggttctcagcctctcggggagacaagcaaagggagtcatgacaaggaagcaagatgtggtaagagagggctttgggagcttccaatgggggactccactagggggccagaagaggcttcttggaggaagtgacatataagtggaggcctcaaggaagaaaacgggaggttagagtgttccagcaaagtgaacagcttgggttgagcatggtggctcatgcctgtaatcccagcactttgagaagccaaggcagaagaatcacttgaggccaggagcttgagaccagcctaggcaacatagggagaccctgtatctacaaaaataaaaaaaattacctgggtgtggtggcatgagcctgtagttccagctacttgggaggctgaggtgggaggatgggttgagcccaggagtttgaggctgcagtgagctatgtttgtgccactgcactccagcctggatgacagtgaggccctgtcttggaaagaaaaaaaaaagaaaagagcagcttgtgtgaggctcacagaatggaggacacactccaggaactaagagatttggattgcttggagaatgcaagatggtcaagggcaggaggacactgggtcatggagtttgaaagccatagtaaggggttttcacttcatgctgaaggacaggggcgccacaggaggcttctaagcaggtgaggcatgggctggtgtagaccggaggccctgcagtatcagcacggtggcrggaggcctgctactccgaagcagctcattccagtgttggacgtttccagctgtgccacccgcttgagcccagaccctgtggcctggcccttgcaccagaggcacatactctctcttctaggaattctcccgtttccacgaggagatcaccccaatgttggaygggatcaccaacaatcgcaaggartggaaggcgcttgctgatgagtacgatgccaagatgaaggtgcaggaggagaagaagcagaaacagcagtcggccaagtcaggtttgtggaagggggaagcagggactcccaccaccccactccctgagcactcagtgtctgcgtcctgcctcagagactcttacacggagtctcattcaggcctcctgatggccaatactgtccccattctgtgtgtgagagcaccaaggctggaagagaccaagtcacacagtaagagacagagcccggttcccaagattgaggctgaggaacgatccaggcctcccagcaagtgccccggcaaccaacatagcacagactctgattttagggctgtggacatatgtccctaccctgggacaaaggagaagatctataattattggttggaaggaattttatttttatttatttattttttgagccggagtctcactctgtctcccaggctggagagcagtggcacgatctccactcactgcaacctctacctcccaggttcaagcaattcttccgcctcagcttcctgagtagctgggattacaggcacccagtgccatgcctggctaatttttrtattttagtagagatggcgtttcaccatgttggccaggctggtctygaactcctgacctcaggtgatccacccgcctcggcctctcaaagtgttgggattacaggcataagccaccgcgtccggacttggaaggaatttgaggccctatttccagccttctgtctgatgtttgaatcctatctataccatcatgagcttatgcttgtataccaccagtgacagaggtctcactatcttatatgacatcctcattcagtaccactattagaaaggtcttcctagaactcaaattgttccttgttgaagcttccacttagtggtcatggttctgccttcagaatcaaatgggatttgtttgttctaactctttactactgacagcactgcccctcccccaagtcatttcttttactgattgtgtgatctgtttcctcacaggacatggcatcttgtccctscctcaccctgactgccctcctttgcacacccatccctcttcacccatggctcttacacatggaaaatgtcagggcctcagctctgctctgggcagcgtgggttgaytctaaatgggcagctgcaaatgtaggggccacttagagttttgtagtttatgctttgcacaactccggggagtgtcctgtacatcacagatgtgtatagctattttgattttccagaaaaatggcagtgaggtatcctgggaaataagtgcatttttctaatttgtacaaattgtcttttgggcaagtagtaaatcagtgcaaatttgtggccttcagataaaaaaatacagatttggcttacatttttttctccttcttttttttcttatagctagagaatcagtaccaacatttttttaaatgtgaatttttgggccacattttaaaattggaatatttaagatttaaaaaatccagatttacagcctctttttctttcttttttggagatagagtcttgctttgttgcccaggctggagcgcagtggcacgatcatagctcactgcagcctcaaattcccggcctcaagcgatcctcccacctcagcttccctagcagctgggacttcaggtgtatgcaaccatgcctggccaatttttgtatttttttgtagaaaccaggtcttgctatgttgcccaggttggcctccaactcttgggctcaagtgattttcctgcctcagcctcctgaagtgttgggattacaggcgtgagccctgtgcctggcccagcttttctttctaaaagagtaaaaaggtaagatctggccacaccagtctatcatttttgcatgacaacaattggctgaagccgagtggcaactgccccctttagatgagacagaggctgtctctagtttgtcatgttcacwgctcccctggtctcccagacrttggtgccgagtactggttctcacttatcatcatcctcgtgctgctatttttcttagagaaatgttctgtttccgtgattctcctcacacctggtttgccttctgcatgtgttgttatctgttgrmcactgaaagcctttgagtttgcaactcttggtccaaattaggtcaaaggggaagcccactgcagcctctwgtcacctggtgtgttctttttcctgtttcattgcagcagccgcaggaaatcagccggggggaaaccccagcccagggggtgcaactacatccaagtcctgctgcatccagtaacaccactggggatgtgctggctggacggcaccaccctttcctgggaagagatgactcaagccagtggaagaccacacaccttgagaagtagaagagtcataggatttgaaagctgttagagaatttagcttccaggactgttcaatcttttggcttccctgggccacattggaagaattgtcttgggtcacacataaaatacagtaacactaatgatagctgttgaacttaaaaaaaaaaaatcgccaaaaaaaaaaatttcataatgttttaagaaagtttatgaatttgtgttgggccgcattcaaagccgtcctgggctgcatgtggcccacgggccgtgggttgaacaagcttggcttataccttatccagtggcttttaaacattcttttagtcttgagaactgcctattgagctaaaaccaatattctagctttcatagacatcagttaaacatttaattacatttaattaatgccagattcactggcttgcttagaatcatttttgttcttatactttcagttaatgtattgtaaaaattttcaatcattttcaaaagtagagaattgtacgttgaatccccacatacccatcacccagatyccaatatcaagattttgctacatgcatttcgtctgtcctttttacattttcttttcaattttttttcttacctgaagtgtttaaaggcaaatcctggccaggcgtggtggctcacacctgtaatcccagcacttcaggaggctgaggygggcagactgcatgagcccaggagtctgagaccaacctgrgcaaaatggcaaaaccctgtctctacaaaaaatacaaaaattagcactcacctgtagtctcagctacctgggaggcagaggtgagaggatctcttgaacccaggaggcggaagttgcagtgagctgagatcatgctactgcactccagcttgggcgaccgagcgagactctgactcaaacaaaagcaaaagaaaaggcaaatcccaaacatatcatttcacacctctactatctcatctttaaagaaataagtatgttttctaacataaccacatcactggcccatgcaaccaatgcctgcctaatacccagctgtgatctatgctttgatgggctgcacagaccccaagcttcagcaaaggacttgggaccccaccagctttgagtgctgttgacagacccttagtatcaaccccatcaggtgttactgcagccttccccagggtggcctacacccaatgactgatccatgccaggtggagaggcctggccatcttggctgagcatgggataactgtgcagggctgttccagctccacgactcctcgtggggtccactaaggctgtcrctgggctcacatcccaactcgacttctccctctgcccactcctatttccttcccttccccaagcatcggtccccagggcactgcttaataagcatcctgcagactaagtccattttagagtctgctttctgggacacccaacttgtgatgccagcccttaatcaaccttccttcattctcatgaacgttttcaatggttggcttgcctgaatctgatccaaacaaattcacatattgaatttagttgtttctttttgttggtttttagaaaaaagaagatgtactttttattcttggatttttcattgatttcacagagtataaattaagtcagattattctcaattccagaacttctgtttcttaaattagcaggcattctgttggtttaaaaagatagatgttggccgggcgcggtggctcacgcctgtaattccagcactttgggaggccaaggtgggtggatcacctgaggtcaggagttcaagaccagcctggccaacatggtgaaaccccatctctactaaaaatacaaaaattagctgggtgtggtggtgtgcacctgtaatcccagctactcaggaggctgaggcaggagaatcgcttgaacctgggaggcgaaggttgcagtgagctgagatcatgccactgcactccagcctgggcaacaagagcaagactccgtctcaaaaaaaaaaaaaaaaaaaaaaaaaaagatgtggcagatagaatttctctctttctctatctttcatgacgaggtctcactctgtcgcccaggctggagtgcagtggtatgaccatagctcactggagccccagctgcccgggctcaagcaatcctccatctcagcttaccaagcagcggtgaccacaggcatgcaccaccatgcccagctaattttttaaaacctatctttgtagacatggggtctcattctgttgcccaggctggcctcaaactcctgacttcaagcaatcctcctgcctcagcctcccaaagtgttgggattacaggcgtgagccactgcacctggccaggacttatttcttttaaaccgaatctaagtatgttctggcaagtatgcaatacctagcggaatgcactggcctgatcagcattcataccatagtaactgatgttgaaaacagcacaaataaaccagaagttgaaaatggcaataacatgctaaaaatttgcaagtcaatttgttacacttgtccaaatcttgattttttttccttctctatcgttccccccccaccaccagctttatggaggtataattagcaaataaaaagtatacatatttaaggtatacactgtgatgttttgatatacattgtgaaatggttaccataattaagctaattaatatatccatcacctcacatagccatggttaagtttctgaagtctcttttaatctacaaagtactccttccttttttccattgtcatcaccttgcagaaacagagtcagttttcccacattctgtatttatctgtttgtttctttgtggccgcatgtaacacattcctctgtctcattctaataaatggacattagctctagaacttttcttccttccacactgaatgttatgcagaaactaatatattaaaacagttgctttgaggagagggagccacatggtttccccaaacggtaaaccactcatctactgtaatctctctttttagacacatgaggaaattgaaggccagtgagaagacggggctgggccaagttcctggcacagttccctggcttccctccaggagatgcccaggatcacagagaacatagtgtacagggcagccacatcctggtggcctccacagtagatcaatctgggctcctgacgcatgggccctgctcatgtttgcaggtggtgatgtcaatagagaactgggtctggaacttgcatctttaaactcccaaactagatgttctgccctgctgcaatgcacaccctgatagcagtggtctttaagcagaggcctgtcctaagaacatcacgtttggtggttacatggcagagtagcaaggagaaataagtgtcactcaggaacacacgggcattgatgttgctggtcctgactctgctgccatgtttctgagtcccttcggcaggttccttctgctccacttcccagccttcccaatctgtcaaaaaaaggtcaagatccttgcagtgcctctctcagaggactatggttagcaccaaatgagactgagctgaatgaggatcacagctgatgctgattaagtacttaccatgtcctaggtactgtgcacgatctaatttcatcctaacaacaatactccaagggagaaactgttactagctccatttatcacatggtgaggagcagacttagagaggttagaaaacctgcccgaggacacctagctgataagcggtagagccaagtttcaaagccaagcagcttaggccaggcgtggtggctcaatgcctgtaatcccagcactttgggaggccgaggtggatggatcaactaaggtcaggagtttgagaccagtctggcgaacatggtggaaaccctgtctctactaaaaatacaaaaattagctgggtgtggtggcgggtgcctgtaatcccagctacttgggaggctgaggcaggagaatcatttgaatccaggaggcagaggttccagtgagccgagattgcaccattgcactccagctgggcaacaagagcgagactccatcacaaaaaaaaaaaaaaaaagccaagcagcttgacaccagaaccccagaaccccagcttgtaagcattttccttgtaccatactgcttctgcaaatcaggttttattgttgtttttaaagaacataagaacataaaggacctttgagttcagctaagcaaattgtttcatatttgggaaaaccagggaccaaggaggtggtctgcccaattcacacaatacagaagtggcagagatgggtcccaaaggcaggtcttgaggctctgcatctgccatcctattccttgcactacgggtaggatctactcaggaattcctgactgatggggccagtgccctgcagtgaacggaaaggcaggcctgttctcctgaagcttacaacagatgggcaacaggtactgagccctcaatcacacacatattctcatcacaccagagaactctgcccctaagtggaaacgttcctattaattttaatgggaaaaaatcatgatgtgttcccttgcaatcaaagaaatccaaacaatctttacagatggggaaaataaatcacctgaacaaggagaatatatgtatgagtttgtatgagtttatgtaataaatagcaacctgaaaatagtttgcacataacataaaatgtaatcattcattgcacctgttcttattttatttatttattttgagatggagtcttgctctgttgcccaggctctgttgccacgaccttggctcactgcaacctccgcctcccgggttcaagcgattctcctgcctcagcctcccgagtagctgggattacaggcgcccctcaccacgccgggctaatttttgtattgttagtagagatggggtttcaccacgttggccaggctagtctcgaactcctaacctcaggtgatccgcccgcctcagcctcccaaagtgctgggattacagatgcgagccaccgcgcccagcctgttcttgtttatatataattctctttgccagtgtttcaaccctttggggcttatgggtgtctggcatttaaaaataaagttaaagcacaaaaaacagctttagggcaaaatacaggctaacccctttgagacgtgaggaaataacacacaggcacgcaactgagagtcttggaagatgccacttcctcaccctacttgctggaagtacacaaaggaaaatgttctgagctcattcaattaccgcacacaatgcaggcctgctctctatgagatcctctgaccagaaaccattttgtaattacaaattgatgagtgttttgcctggaaccacaatgccaaaatacctcctacagtgcatttattcaatgtgcttatgtgaaagttgatataccaaaacaaggaagtctttgttcagaaagtggtatagctttataaaagtcagggcaaaaagtcgttcatggaacagctgttatgtgagatgagtctgaatggttattttatttatttattatattttatttactttactttttcagagatgggggtctcactatgttgcccaggctggccttgaactcctgggctcaagtgatcccccacctcagcccctgtgcctggcacgaatggatattatgaactgtgaaaagtgctctgaaggagggagaagtgtggtgaggtgaggagcagacatcatccggggtcttatctgagaaggtgacgctgaaaactgaaatctcttccccatttagtggtcagagtgtccctcaatgagctcccaggaccaacaaggaaaaacacacatgggcaaagctgtgggtggtattttgtttttaatctccatagtgtatttgttaagtttatttataagcagatcacttcactatttacagtacatgagcatagagattctacagtttctgtgatgtaaacaataaccccacagtgggagtttgagaaaagaagccagttctgaagtatttacagacattaaaatagaactttatactcacagaataataatacatagagcaatttggttaaattatctaggaaactatagaatctgacaatgtacaaatacaagaaaacattttctcatttagaaggtaagacagagaaatcacaccagaaataaaatagggacgatgacaaccacaatawktaaaagcaaagaaggtttcctccttgcctcttacggataaagtatttatataaataaggacacaacccaacaaaatggaaaaaatatataaaaatcctctaccaattaaaaaaaatagcaaaactaaaaacttgattctcaatcattagcagtgtcctttaaaaaattaaaatttagctttctattataaataacaaagcagatgtgtccctctgtgtaggtgaaattcttgcacctttctcaataaatgcatcaatgtaattccacacacacacacacacacaaacacacacacacaggcacagacgtgtgtatgtgtgcacagatacacacacacacacccccaccacaaacacagccttacactcacgcactcaggccgtagttaccttgttaagcttcctaataaataatgccccctacagtagtacccccggggatgacaaaacctcacaggtttagccattccttggtttgaccctgtcgcagagtcagggaaagccctggctcctattgctcagaattctctaggctgtgtggtcacaccaagagaaaataatttgagtccaagatttggaaatgctggaaaggaccatagggaccaccttgcccagttgattaaggctggctacagacaccttctttagaaacctggggttggggagagggctcgtgttggyttcaacattagcagctgcctctggaagaagcagatgctccaagccaatgctaacaacatggcacaaggaggcgagggggtgggtgtgaattccagagcagactgcactaagctggacttctggatggtcatcttccccagaaaccatttggaaatccaagcagtctattcccctgctgcacataccaccttgtccacgctccccttgagatttcccacctgtttccattggaatcagaacatccctcaagaaacaaagttgggaatagtttatgactttttattcctaacacaaaaacatttgacaagattttaaaaatacaaaatacagaaacaaaaaattraacaaaaaaaactatttggctattcggggatcatatcaaagatcatggccaggccccccacaaaatccttacacccaacttcttatcttgccttgagggcagaattcggaccacccagcaaaggtttacttaacaaggtcagcagctgggctgccagtattgcagttacagtaaacccttcccgggcacctggacctctcctggtccactcctgtctcttctgcccacaggacagctagtgcatttctcagttctgcgtgagagtctactaagtggctgcttctggagtcttctgaccctagtgttgcactgatctctgaacacaaaggcagttcgttcaggccattatatttcattcccaaagttcacgatggacagcagggtggccgaaaggatttatttgccttccatctgggtagctggtggagacaacctttggccactagatggcgaccgcatgttgataaggcaaagtgctgaggtggaaactgaccaattcccttcacaagtaaccaatgagcaagggtggtcaagtgaaaaaggaagcttttgtaagccgccttggagactcctttgaccaaaaatacagcccaggggggttctagttatataaacccctctttgaggagttgttgcacagcccagggaccgaccacctataaaacctattttccaagccccaaattygggcagttggatttttgtactccttccggatgtgcaaagcatactgatgaaacagagtatctgaaaagctgtccccaggaatcacgaaggctcagtcactgctgctataccattaa

SEQ ID NO: 95794 - DNA, 69920 bp, Homo sapiens
tttcaatagattgttctgttcctgctccattccagtctgtcctatatactgccatcagattgatcaaagctgtggtttctttgtctattattttgattcatttttagatatggtatcattcatttttaaatttaacataccaatgaagattacaagacttaaacatcttatcagaagggggcatttattttttaaatcaagaaataactttccaaaagcattgctttgaatgccattctcttaaagtccttcagtggaacttttgagtgtgattagacatgttcattatcttgattgtagtgattttatgggtgatgatttcacaccaacttatcaaactgcatactttgaaatgtgtagtttattgtacatcagcactaccttaataaggttgtttttttttaaaaaaaaaaaaaaaccttcagctgctccctactgttcatcaaataacagtctgatattcaaattcccccagtatctggccctaactgccctatatagccttaatcaatcatgattctcctctacaatcccaatgctctagtataaccgagccagtcactaaagctgccctcctcctactgttccctatgtttcatattgctttttctgaggctctacctgtagacatcttcaagacccaacccaactgtcatgaagccttctccatgaaggctatccatataaccagaataagaagtggtctttgcctccttgaacttttgtttgtaccacttttatgtttcttatccaaaaaatggccttaagttgtaattatctgtatagtcatcttccccactaggataaaggattgctgaatgatacaatttgttgtatacttctgtaacacccctcctcttcattatctggcatrtacatcgatattaaaaatattcattaaatgaatgaatagctgattgactcagatgagacttcaagtttgattatatttgaaaaggatgctaagctttaagagtcctgatgctctttattttaaaaaaaaaatgcttcaggctgggctcggtggctcacgcctgtaatctcagcacttttgggaggccaaggcgggtggatcacctgaggtcaggagttcaagaccagcttggccaacatggtgaaaccccatctctactaataatacaaaaattagctgggcgtggtggcacatgcctgtcatcccagccactcaggaggctgacgcagaagaattgcttgaacccaggaggcggaggttgcagtgagccgagatagcaccattgcacaccagcctgggtgacaacagcaaaactctgtctccaaaaaaaaaaaaaaaacttcaattgcaagttattggttgacctttgcttcttgaggattttgaaaccaaaggcagagtatgcttccctgtgtagtgggaggttgactatgaagtctgcagcaggtgaactgaaggacttagtgaagtctcagaatgctgtagtgacaagcagtagattgaaagatgggtagggggacttttcctacccgggatgatgtgaaaacatgagaaaatcaaacaagcttcgttaaaggtattttataagcctcttctgtgttcatttataaaaggaaaaacaagcctactctagagataaaggaggtcatttatttctggccattgcagttcttcagagatggactctgaagctcagtattgacaccattcctttcataataatagccctgctgcttgggcagcagcattcaggaaagtaccctttgccaggttcctgtgcctccatgtaggaaggcccatctgctcctggcataatgaaagtgcctagctagagacaagaagcacagactgtgccagacaagagacttggagtaattgatataatgagtaaccaagtgagagtagatccctcaccaaagcgtaaccacattagctactttatcacaacagacttatttttaggtatactcaagaccatgttaagcactgtgggttatacaaacgcatagaatacactatcattgcctttgataaatctgaaaatacaggggacatcttttgaataaactcttaaataaacttataggagacaaggaaattgaataaatgaaaacttctatagctgaatatacagatttatattgaagagattcagactaagggaagatcatggcgaaacagaggtaggggcaagatttttgaagaaaaattgagctttatggttttattttcattgtggtgaaacttaggggtaaaggtgagaagtagaaaaaagtggtagtagaacgaacgaggtctgtaggtgatgtgcttggataggttgggtggggatagttgacagggaggggcttggtgacaagctaaggaatctggacttgttcccgtagatcatcaataactattctgattctttagcattaaagtgcagttttaagaactttcatccagccttggttaacaggagatactagaatggaaacatatagataggaagatactctaagtttattgctataggaatccgggtgtgaaagtgggaatggggctaagtgggaatggaaaagacaggttgaatctaaaagacattgaggagaaatttccaataggccttggtgatcaaaagaatgcttacaaaggactgaatgtttcacagacagtatatatatcccatatcaaatcaatgaccctggaatgtagggaaaggcaagagtagtgaaactaaagctaaggttgggtaagtatcttctccagggtaaaacatgtctccccctcatctaaaagacagaaggatgttctgagaatcctgaatgtttttcctattgaatagtttatcttacccttgtagtcttccctgaaattctcctcaattaatgtttattgtaatctaattcctgacctctgtgatactgatatttccccttaaactagcatactcccctcttcttggaacasgtgacatggtgaccagcactcttctctgttgtgttcttccttctgaccaagcactacagccacatgaggcagcagtgagatgtggccttgtcactcctcttcaggtgcttatccacaatttacttcccacaatttacttgatggttctggcaaaatgtttgtgagtctttttttattgcatggaattgtgttcacttaggttttatgccagactggtttaaatgattcatcataaattctgaaactcttttaggtatttgccaacctttactgcatgtcttgtttcccctccccagctctttatcttcccgcaagatacaaatgagtcaacacaatcttcatcaaaaagcattgtgctctgtagaaggaagtgtgataaattaagtagtagcttatttttttaaaaaaaaaataatagctccagctacttggaagtctgaagtggaaggatcacttgagcccaggagttccagactagtctgggtaacatagcaagaccctgtctcaaaacaaaacaaacaaacaaacaaaaaaacccaaaacaaaaaaaataattaaagttttttgttttcttcttcagtttgttttttgcttgcttgagtggtctgctcaggaaatggccttgtagctaagtgggttttgggggtttggttatttcacaatgtctctataccttttgggtttacagtagaatagattgctgcttgcttttttaaaaaagtgtgaagttctgccaagacactatttacagattcttagattttgaggaaagggactatggaggcatctaagcaaaattttttttgttatctcctatttatttctgtcttctccctcattaagaagaaacaagaaagttagtaagagattgtgctgaaatataggcttgagaaaaatagatttaaattttattaggcaggtttgcctcatcaattaataaaaattaataaagttctagttttgtgtaattgaggacattctaagggtacagagaaattataaaactatattatcttctttgtccaaacatagaaaatcattttccttttaggattatgctttgctactctgcaattaagcaagttagtttggaatgtttttatttttattttctttcccaaagttacctaaggagtgttttaatttttatcagtaatcatgtctgtatctttagttctgagttgctttattaactggctaaggatgtttttgttttgttttgttttgtttttaccatattctggctttctcagtgttgtatgccaatctcctaagacaatgtttagaatttagtgggtactcaataaatttgttgaacaacttaatggatttttaaatgtttatttctaattttaaaaacggtatgataattttagaaagcaaactttatcataattctaaaattatgataattttagaaagcaaacttacacaattgattcttttttgcttcttttagtctttaactatgtacacacttttacatggttttagttattacaaacttgaaattttgtatttttataaatcaaagatttcccatattttatgttttaaaatagccaaagtaaacatcacgttacttagagcagcaagaaattctctcttaattctagatggggataatttaagaaatatactattcctaacaaatattgctgaagaatgagggtttattttaatttatgtatactgggattgagtttcttaatttgaaatattgtctttaagttgtctataaccaagatatctcgatgatctttcttttttttttgcagtacttagtaaagagcatgcagtatctttaatgttcagattaagcagtgttcagaatcatgatatcctgaaggaagtttgaataatgttgcaaaacagaaaggattgctaatatcttaaatagaggaagtcctaacaacacatttcccagttttcttcaggatcaagactaattttgttaacatttgttgaacttctgccttcaataaagatgatatactgatttttggatgttctcacactgaattaggcacttgggtagacttgtacccattgagaggttatgcaagctsaaatgtggaaagtttttctagaagagcctgcctttcagggccaaaatgccacaggcacagcataacttcctgaaacaaatttatttcctaagacattggttgcagagtagaaatgtgttctttagaaacagttcttcaggctttctgccctaaaagttacaatgttgtcagcaaggtggttgattttactttctttttgttccatcacagtttaccagcattacatatgcagggtattgagctaactgtctggtcaggtgctccttgtgggggccacttgctctagatcctatatagaccaacactcttagtctttatatccagaacccaagtgaagcttcaaaggttactgggagggttgaagaggtgctgaaatcaacacttcccttaatggaggtcagcacttccccagtcctgggagagacacagactgtcagaagcatctgactttgcttcattcaaaagggagtttgaggtatatatagcagacttaaaagttatgaataaaaataccttctgtgatgaacagaagtttctcattgatcacactgacaagaaacctttcgatgaacagtccgggtagaagacatgtcactctaaacagtgtctgtcttctttcctgggcctaactgaactttgcagagttcatttgggacataaggaaacagaaggtgtcaacttggcccttgtgctcactgggaaaatggggagagacagaactcattcaggagacctgtaattctgttctttctctgggaggcaagaagaaaggtgagttttgcatatgggtgatggaatggaataatctcagttaagcagaccacactttacgttctagttagcctcttgtttgttaaaaatttgaattgtaaccaggttcctttgctgagaaggaaggcactagggccctggagtgagatgatggctgtgttatgtgaccacagaaggtggttacgtactaatttcctctagggcttgtgatgaagtcagtaaaccacagccttcagcatgctctgctcaggcggcagcagtggctttttggaggtgtctcggccatgacacacatttgacatgccctccctcaacctacttatagactatttttcttgctctgcagcatggaccaaagagaaattctgcagaagttcctggatgaggcccaaagcaagaaaattactaaagaggagtttgccaatgaatttctggtgagtcctgtatgtgaccctctcagggtagttacatacactatttaactractatgggggtccaattttccgagaccaaattgctcttgggataaagtaaatatgagaccttggcggggaagacagaaaaaaaaaagtttgacttctctgagtggtttgcatgtatttcaggtattctctcaaaattactggttttaatattttgtttgctagttctttggagtttggttaggaatcctacagaagacatatacaactccagatgtaaaaacactaatattaattgaacatccagatttccccaggtatctaagttgtggtttatgctttatattactaattttaattaatattaagaagaaagagaccaatgttaacttttcatgcaatattacatttttagcctcccctctgggattctatttggttgacaaaggtttttgaagagcaccaaaactacccactgccacagttttttttgttgttgttgtttgtttttttaagattcagaatcttactctgtcacccaggctggagtgcagcagtgcaaccacagctcactgtagccttgaactcctggcctcaagtgattctcttgcctcagcctcctgagtagctggggccacaggtgtgtatcgccatgcctggctaatttaaaaaaaaattgtttttttcttttttgtagatacgagccttgcttttttgcccaggcttgtctcgaactcctggcttcaagcaatcctcccatcttgcctcccaaagtgctgggattacaggcatgaaccactatgtctggccatcatttttcttttctttttcatatgaaaaatatattataacatgtgttttttcaataacagggcttccttaacttcttttgcttggagaagtggaatggctaggatggagagtagagacaagtgtaggtcaaggagagaaacatgagtacaaggtagcttcaggttgggtggattagattacccagaagaacagtgaatctcctttgagagaactgtgattattgatgcaatggcagctgggtaggcctcattcaccctacaagctgagatatcagataacatagggtgtctaatagtacctatcatgtattttagaatgcttacagctggcgtttcagagatataagaattttaaaccttagctcttcagttgtgaagaaatgggtggaaagaggggaactgaagtacaaacctgaaattaaatcatgattttttttcaccaaattatgaagtatttgacatgttcttaaatctctctgttttctaacttataaaatggggataataatacatgtcctacctatcctcacaggattgttgtgatgattaaatatcaataacaatcattaaatgtggtcatttattgagtaccatttattgagcacttagtatgtaccaagttcagttctaagcactaaaaatacagcggtgaacaaaaagaaccaaaacctttgcctcctggagctaacaytctggtaccggatagcagatgtgaaaacactctgaaagtcttgagtaattagatattattgagtgattagatattatgataggaactccgatgtcagctcaacatggataatcttgtggtactatgaaaaatgtgctctcactgccactggctgatcagtctgagcccctctggtagagttacctgaaaggagataagtaggaagttctagcacatgtgtatacatgtccctgcccctggactataattcctaagccaaggtaacccaaggcatagatgtaaaaagtgagctgaggggcagtgccggcctctgttttattttggttgtgttttttaaaataatgtagactggccgggggcagtggctcacacctgtaaacccagcactttgggaggccgaggcgggtggatcacctgaggtcaggagtttgagaccatcctggccaacataatgaaaccccatttctactaaaaatacaaaaattagctgggcgtggtggcaggcacctgtaatcctagctactcaagaggttgacacaggagaatcgcttaaactcgggaggcagaggttgcagtgaactgagatagagctgttgcactccagcctggacaacaagagcgaacttctgtctcaaaaaaaaaaaaatgtagactatatccctaatattttaccttttctcagctaaagtcattataatttctcaccaaaatatagcagctacctcctaactggcttctctgcctctagccttgccccaccttcagtcaattttcagttcaacacccaagtgatcttttaatcatacaaatctggtcttttttttgggggcgacaaagttttgctcttgtcacccaggctggaatgcaatgacaccatctcggctcactgcagcctccacctccctggttcaagcgattttcctgcctcagcctcccaagtagctgggattacaggcatgagccaccacgcctggctaattttgtatttttagtagagacaaggttccaccatgttggccaggctggtctgtccaaccaggtaatccactcgcctcagcctcccaaagtactaggattataggcatgagccaccacgcccagccaaatctggtcattttttccctgcttaaaaacttgttatagttttttttagctgcttaatattgtgcaatataatacacatttagaaaagtacataaaacatttaagtataattataaagcaaccattagcagtgcaaccactacccaagtcaagaaactgtcagacccccgaagacccatgccccatcaggtcccctacacccatctgcccctgtcctgtcctaccctggccaagggataatcactatcctgacttttatattaatcacttccttgcttttctagctcctgattttaaggaccttgtttttgggtagtgattaagtgtaacctcactgttcactgactcatgtcctccagtggaaaaatagagtcttcctctcagctccatctaaaggtttcagatgagacaccagatagagagctttgggggagtagaggagtagtgaatgaggctagactgcttgcttggacaaggtaaatactgccactaaatcagagggctttccatctggtcatgttctgtgtcccatcttaagcccttaatgtattctcccaggattttatgtttccgaggtttgaggactcattctgtgacacaaggccactgttcacttaactggtggtaactttaagggaattatcaaaaggcatctctatttccaggtagattccctgagcatcctaacccctttaccctctccccaggtccatggttcagatttcagtctccacttccttcttggccatacatctttgtacagagaacaatacagatggctgtctgtatccccaagttctacatccttggattcaaccaactatggatcaaaaatatttgaaaaaaataccaaaaataacacaacaacaaaaaataaaaaatataaagcataacaacaatttatctagcatttacattgtattaggtattataagtaatgtagagatgatttaaaatatacaagaggtcatgtatagtatgtgtaaatactatgccattttatatgagggacttgagcatccacagattttggtaattgaagggggtggtcctggaaccagtcccccacagatactgtgagaggactgtattcataattggatgtggcagtcctgttaatggcagctgaagccagtgccatgctgcttatgtcttttccctgtgccaggactaaattcagtaacttttctgtagttgaaactaccactgaccacccatctaaggtttttatacattcatataaacattcattgagtgcttattgtgtgcaaagtaatgccctagatgctaggaatgcaatgcaatgctccatgctttagtggagcttatgttataaggcaatagatatgtcttagagaggcagacattaaacaactaattgctatattaaatatttaatataattgtgatagtctgggtgaggtggtcaaggaaacatcaacattcattttcttatttactactccttaagaaaaccctgtgaaatagctacaaatgtcatttctgacttacaaatgaggaaactgaagctctgagaagttaaataattggcctaagctcactcagctgttcagccatagagatgaaatttaactcagatctgtcttattacagagctgtaacattaatccttatccaatagtgttctacttcatccaatgacactgagtctctcaaaggacctagttttagggtaagttttagggtaaggacatagttagtatagtttctacacagcagaaacagcaggatgcaactatactgttgaaatttctaaaggtattttcaaacgttccttattattgttataaaacaatattattgaaagttaaaagaaagtaaactcaccataataccaacattctaacaaatcaaaactttttttgtggatcttggccaggtgaggtggctcgcgcctgtaatcccagcactttgagaggctgagacgagcagatggcttgagtccaggagttcaagacaagcctgggcaacatgatgaaaccccgtctccactaaaaataaaaaattagccagaagtggtggcacatgcctgtaatcccagctacctgggaggctgaagtgggaggatcacttgaccccagggggtggagggtgtagtgagctgagattgcaccactgcacaccagccagggagacagagtgggaccctgtcatacacacacatgaaaaccaacaatagctttttttgtggatcttctagttcttgtccatttatgtaaatttttaatattattgtaattatagcatagatacaattttgtgttctcatattttcacttaccattataccaaaattatcaggctgattaaaatgtatatgatttttaatagttgatgatgcagcatcatcacatggacatatatttgtctatgtgggttttgttgttgttgttgttgttgttgttgttttgagatggagtctcactctgtcaccaggctggaatgcagtggcatgatctcggctcactgcaaccaccacctcccgggttcaagctattctcctggctcagcctccccagtagctgggactacaggagtgtgccaccacacccagctaatttttgtatttttagtagagatggggtttcatcatgttggccaggatggtctcgatcccttgacctcatgatctgcctgccttggcctcccaaagtactgggattacaggtgtgagccaccgcgcccagcctgtccatctggttttataatgaaagaataataatcataatagagaatgcttctatacctcttacagacactgttctaaacactcatatataaactcatttgctccattgaggaaggtactgttttcatttccattttataggtgaggaaacaaacagagaggtcaattaacttgctcagggtcacatagctagtaagtggtggaactgaatttcaatttcaggtagtcttgctttgtcatctgaagtcataaaaactttggagtcatataaatcttggtttgaatttaagttatgcccatgattagctatgtgaccttggattaagtcagtaaaatgtgggaataatattcactttgaagaactgctgtgaagataataagtatataaacttcctgagacatagtaatacccaaataatttatttctccattgttaaacagttatttctagtttttcatgattattgataacactaatatgaatatatttttccatgtggtttttcccttcttttggattaatccttaggctagatccccaaaaatgttattactgggtcaaagactattagcatctaattggttaagtattaccaaatgtatttccaaaggagtttttctaatttgcaatatatgaatttatcatcttctctaccaccttgctagacttaataaatataaaagagaataaaagatgaaaacattttgcctacttactatgtactaggcaatctgctaagtgctttgccgtacgtgatctcgtttaatcgttacaactaccccaagaggaaaatattatgttcattttacccatgaaatggaaaagcccggatttgaaaccagtctgttttttttcaaagcctcttaacctctgtacttaaactgtatcaggtaaaaatcatgactttttttctgatataactagcataaaatagtactttattatgttaatttcattcattggatttctgagccttaaaatgttccatgattattttaaatctgcatttccttatatacgttttctgttcatctactttccacagtaacaacagctaatccatagaactgtgttccagactctgtgctaaaagtgcttcacaaatagaacttcatttacctcccaaagaaccttttaaaatggctatcaatgtcctacatggtgtctctccagcttcttatagcatgctcattttcttgtccttgccatgcttcctctgccatagggccttgcacacatgttgttacctccgccttgaacattcctcacactcctctttacctagataacatttggtaattttktttttttttttttgagacggagtctcgctctgtcacccaggctggagtgcagtggcacgatctctgctcactgcaacctctgcctcctgggttcaagttattctcctgcctcagcctcctgaatagctgggactacaggtgtgtgtcaccatgcccggctaattttttgtgtttttagtagagacaaggtttcactgtgttagccaggatggtctctcgatctccygacctcgtgatctgcccaccttggcctcccaaagtgattataggcgtgagccaccatgcctggcctttttttttttttttttttgagacagggcctcacttggtcatctaggctggagtgcagtagtgtgatcatggcttactgcagcctcaacctctagggttcccatctcagcctcccaaagtgttgagattacaggtgtgagccaccatgcccgactaataattctttagatctcaatttggtggtcaattcttcaaagaaagctttcttttcttttcttcttttytttttttttttttctggagacagggtcttgctctgtcacccaggctggagtgccgtggcttgatcatagctcactgcagacttgacttcctggactcaagtgatcctccagcctcagcctcccaaagtgctgagattacaaccatgagccaccacacctggccagagaaagctttctggacctctttgaatagatcaaatcttctattgtaagttcttattagcaccatttgttatttttcatagcacttaccacaatttcagttttttgtttgtttgtttgtttgtctgttttgagatggagttttgctctttttgcccagaccagagtgcaatggtgcgatcttggctcaccgcaagtgactctcctatctcagcctcccgagtagctgggattgcaggcaaagttgcagtgagccgagatcgcgccactgcactctagcctggatgacagagtgagatcccatgtcaaaaaaaaatatatatatatatatatatatttattaaatataaaggattcattgaatcctaacagaaagaagatacctagttctgaaggccaggtttaggtgctaacrgtttaawctatactagaaatcagactggtactattgcaacttctggagattcattagaagaccagagacatatcaaagatctggctacatcttggttctataaaggagacatagatacatcctggttctgtgtatattatagtaatgatactaaccaaacagttatcaacaaggtacttcctacagagcaagtgcacaaacatctatgaattgacactactcattcctgtgaatcagcctatcacttgaacatatttatcagcatttcttgacctttgtgcacattaaggtgcaatttttaaaaatgccaccaccagaataaatgtatcacatcacctctgaagctgatttctctaacaccatctccagcctctcactagggaccatctagtcctacattttcatttactcacaggacacttaaaacacatttcttggctgagcgcagyggctcacgcctgtaatccccacactttgggaggctgaggcaggcggatcacttgaggtcaagagttcaagaccagcctggccaacgtggtaaaaccctgtctctaataaaaatacaaaagttagctgggcatggtggcaggtgcctgtaatcccagctactcaggaggctgaggtgggaggatcacttgaacctgggaggcagaggttgcagtgagccaagattgcgccactgaactctctgctgggtgacaaggcaagattctgtctcaaaaaccaaccaaccaaccaacaacacacacatttcttgccattttctcacattttatgtatctaaagttgaacctcttggtttactcaccccaatttagctattgcctacccacctacccatttgccccactattgcactggaaactaacctcgataagtttgtcagtcttgttgaagatgattgcattgcacgctcgtacaattcagtcttgtcctccattcctactggtagttctcctgattactggatttagaagcctgagctcctaatgccattccttaccacttgtacttcttctgtcctgatggaggcttggtataatactgacctatatttgcaaggcactgaggaactaccttgcagagttctcgagacagccaaactttgtgttctcccacctagcacaggagggccaagtttaattttcctctccctaaaatgtatctaaaatgctacgtcttctatccagtaatgtagtccttcaaggcaaagatatcgtggtcttgtgctttcttttactttctgttcttttttgggagtgactttattttatttactagtctgtgagaataacatgcaaatgactcaatccgaatttctagaatctaatactccttgttatactggccaggatccccattctcctctcctttcttgaaacgaaaggggtagtatcatctacaaaccaaatgaacttactattagcttatcaagcacacacagaatctggtttctcacacattccaccctatttcagggcccacgagggatgttgagctctctcttcactttattctcttttttatttttatttttattttttttgagrcggagtctcacactgtcacccaggctggagtgcagtggtgtgatctcagcttactgcaatctctgccttccaggttcaagcgattctccttgccttagcctcctgaatagctgggattacaggggtctgccaccatgcccagctaattttttttgtatttttggtagagacggggtttcactatgctggccaggctggtctcgaactcctgacctagtgatctgcctgcctcggcatcccaaagtgctgggattacaggtgtgagccaccgcacccagtctcttcactttatcctcttggcaactattcccctgacttctcttgatggtacttcctctagggaactcacacccctaccttgtagttggcaaagaaataccttcaccctttagatctcatatcttttcttcacaaacttaaacccatccccatgaccctgcttcctcttttatacccttttgctttctactttcagggttcctccttttctggtgtagtttattactttttctgccctaattttgccctaatttgttctttcttgggatattggagcccgggagtctggcaggaagagaggtggaagagaaaaatgaagcctgccgggcgcggtggctcatgcctataatcccagcactttgggaggccgaggtggggggatcacttgaggtcaggagttcaagaccagcctggccaacatggcgaaaccctgtctctactaaaaatacaaaaaaaaattggccgggcgcggtggctcacgactgtaatcccaccacttcgggaggccaaggcgggcagatcacgaggtcaggagttccagaccatcctggccaacatggtgaaaccccgtctctaccaaaaatacaaaaaattggccaggcatggtggcgggcgcctgtaaccccagctactttggaagctgaggcatgagaattgcttgaacctgggtggcagaggttgcagtgaaccgagatcatgccactgcactccagcctgggcgatagagcaagactttgtctcaaaaacaaaaacaaaaacaaacaaacaaaaaaacagaaagaaaaaggaagacttcacagtggtatgaccttaagataagatgtttgagggaaaaaaatcaaatctttcatacattacaaatgaataattctgtaggcatttcctgtgtgatgttttgctaagagtgtctgcttttgtcatccagctagattactcgagggggaggaaaggagtaggaaaaatgaaagccattctgccttattgttgaaggtagcagtgaaggcagctaaacaaatataggacacacatacacacacacacccatcacctttatctgtaacattttgccaaattaattgaaggatatcttacgcaaagggctttgtgtatagcattctccctagaaagcgttccacaagcaaaataaaacaaaaataaataaaaacagtataacaaggagtatgcactgagcttagttctggagactcctagaagaaactgttctgggacttgagatcttttcagcagccctgggatcaacagcaacctgaaaatgatcattctgaagttgcttaagagcagggagatttgaaaaattggtgtaacttcagctgaaattcagcctagtctttcatgtgtccttaaattcccaaattagtccacttgtatccatatccatcttgaagtaaaaatatgctataaagatagttcagtagcttcttggggttcaaagttaaacaaacaaacaaacaaaaagatatcagttcagtatctctcctctcaaatccagttctgaaaatccagaggaattcaaactacagtaggctctctttatatacggaggatgtgtttgaagacctatagtagatgcctgaaactgcagatagtaccaaatcttacgtacactatgttgtttttacctatacatacatatctataattaaggtcaatttataaattaggcacaataagagattagcaataatagctagtaatacaatagaacaattatgataatctacagtaataaaagttatgtgaggccaaggaaggtgsattgcttgagcccaggagtttgagaccagcctgggcaacatggtgaaatcccttctytactgaaaatatgagaactatccaggtgtgatgcttgygcctgtggtcccagctttcaggaggtaaggctgaggtgggaggtgaggctgaggtggaagaatcacctgagcccagaaagttgaggctgcattgagctgtggtcaagccactgcactccagcctgggtgacagagtgaaactttatctcaaaaaaaaaaaaaaaaaaagtgactgcttttggaactgaaatctttgaaattttgctagatatagagaaattttattcagcttaagctccacttccacttagaaaaaaaagcgatctgaagtaaaaagactaatagaacttaattattttccagttgaccatttaactaaaaagcagttataaagaaagtaaattaagcttttaatatctgcccattgggtggagcatatagcttgcttccagaagatatttggttcttaaaatattcacaagtttcacttttaagttcacgctatctatggctcagctgcagtaagtgtgatcttttcacttccccaaatgtcactgaactcaggtctccttatgctctgcagctctgtcctgaacggagtcagaaccagaagataataaaagggttgaggtagaatgttttgccagtggaaaaggaaarctctttagagatagcttcttmcctcatttctctaggaagattaatttttcttggaatcttattacagaagctgaaaaggcaatctaccaagtacaaggcagacaaaacctatcctacaactgtggcygagaagcccaagaatatcaagaaaaacagatataaggatattttgccctgtaagttccatttctctctataaactcatactttctcccaaattcaatcattactatctctttgtacccmttgcttactgatcctgatcttggaacatggcattgacaacttagtttgtactatttatgactgcaaaagaatattcattcattcattcattcattcactcacttgttcactcatgagcatacactattcacagtgttaggccctgatttaaatctgctgactaagccctcttaattgtactatgtctgtcttttgtattatagatgattatagccgggtagaactatccctgataacctctgatgaggattccagctacatcaatgccaacttcattaaggtacagtgaaagaaaataaaagcattccatatttctctagatacccaaaaaaaggggagggctggctggactcagtggctcatgcctgtaatcccagcactttgggaggctgaggcggaaagatcacttgaacgcaagaatttcagaccagcctgggcaacatatgagaccccatctcaacaaaaagttaaaaaattagccaggtgtggtggcatgcgcttgtagtcccagctactggagaggctgaggaaaggggattgcctgaagccaggaggtcaaggctgcagtgagctgtgattatgccactgcactccagcctgggtaacacagtgagaccatctcaaaaaaaaaaaaaaaaggaagcggaggactaggtgagaacagggtattatytgtagtcaccccgtgtaatttctgttcccctttagggagtttatggacccaaggcttatattgccacccagggtcctttatctacaaccctcctggacttctggaggatgatttgggaatatagtgtccttgtaagtayggtgttgcttttgttactttattctctactttattaaaaacagtgcttttaaaaaattggtcagtggaacttcagggttcaggcatcttttagtcagaatcacaatgccattcttgtccaaggaaatgaaagttctcagccaggtgtactctgggaggccaagaggggtggatagcttgagcctaggsgttctagaccagcctgggcaacattgcaaaaccctgtctctacaaaaaatacaaaaattagctgggagtggtggtgtgtgcctgtagtcccagctactgrggaagctgatatgggagaatcgcttgagcccatgaggttgagactgcagtaagctgagattgtgccacagcactccagcctgggtgacagaatgagaccctgtctcaaaaataaataagttttaaaaaataataaaaataaatttaaaaatgagaaagttcttaccttgacaggctcatttggtaacaagattactggtctgaacagagaaaggggaagtattgtcagaatgaaggaagagtagcagcaatattttataagtcaccaggatttattttttggttaaaaaaaaacgacaaaacagaaaaaagaacggttaatactttctgagtctgggatccatgtattaactgctctttctaactatatatgaatgtttaagtttctatctatttcatcccccagatcattgttatggcatgcatggagtatgaaatgggaaaggtaagttactttctagtacctgctgaccttaaaacaaaggaaagaagaaaaaggagagggaaattggcagcagaacttacctgagtgtacctagataaaacttatgtcatcttcatagttttcagtttgggaatgccacgtgattctcagaggatttttttttttctcctaagaatcctatttgtttgttttctcagtagaccctatgttttacagttaaaaacaaggtatgcttttaagattaacaaatcacttgcccatttctattaattagatatctttaactgccagccagagcttttaatcctgtgccgtccaatattgcatccaccagccacatacagctattgagcatttaaaatatggctaatgtgactggggaactcaattattttaattgatttaaacttaaaaactgacatgcaattcagttatcagaaagctgtttgagtatgtgaaaatttttcaaatgtaagttttattaaatctaaatggaaataaaatatttccaaaatttggcatcctaattgagattagctataaatataaaatatacactggattttgaagacttagtaaaaaatgccaaatatctgataattattttatattggttacatgtcagaatgttttgatatattgggctaagatatgttattaaaattaatttcacctcttttcattttttaatatgtctgtttgaaaatttaaaattacatttgtggttcacattatatttttactggatatcactgttctactgttgccattctgagttgacaattctaatcaaaagcaagggaactaggtatttcacttagcttgtgcagctgttttagtagacatatgatttctgttagttcttgtgaaatactaaaaataggtcaaagatttctatttctactttttcagactcccaggaagtctrtaatttatatatcctttaatgtttgttttcccatctttggagattccaataatgtaggggttgaagcccaaaggggttagacgcacctaacctaaggtgaaggacatagagctgaatttgcttccaaatgagagagtggaaaagactagaatatatggagggaaatcactgtattctgctttgtgcaacagaaaaagtgtgagcgctactgggctgagccaggagagatgcagctggaatttggccctttctctgtatcctgtgtaagtgtaatgtctgttctcatgtctgagtaaagcctccagggtctaccttatagagagcttgtctttgcaatcactaatacttgagtcttctttttctttttaggaagctgaaaaaaggaaatctgattatataatcaggactctaaaagttaagttcaatagtgtaagtataaaataagaatgataaactcaaaagcctatagagatcaggcaagtwaatatagatgtgtgtagctcaggctgggcataagacaatgggaagtggtagggtctttgatgtcatgaatgagtcttcatattcaagagaactttgagcctggccgacatggcaaaaacctgtctctactaaaaacacacaaaaaattagctgggcgtggtggtgcatgcctgtggttccagctagtcaagaggcttaggcaggagaaatcatttaagccctggaggtggaggttgcagtgaaccgagatggtgccactgtactgcagcctgggtgacagagcaagactgtgtctcaaagaagaagaaaaaaagaagagaccattgttataatatgtcttcaatctattctataccatggcacacatataaaatgataatatttgtagggtgaacagaagctgaacagtgcatagagactggggaccagtttgagagcttaggctgccctaggccctgcccagcttctctaaggcaaaaagatttaatatatcagcatgattgtgacacattggaggcataccagttgggaaacactggtttgaactattttcatatctagctatttcctcttgtgaatggggcagatggggacaaaccaatagtaagtgacctgaaatcacttttaatggttttcagaaagcatctggtcacctgagatctatagagaagaaaccggaataaatttcaaaaaggatatagatacaacttagtatgccggactgttgtcttggtataatgaggtggagttctaaccacaagttgtcttattatcctggctatttttaaaataatttcaactttttttttttttttttttttttgagacagagtctcgctctgtcacccagtctggagtgtggagtgtgcagtggtgcaatcttggcttactgcaacctgagcctcctgggtccaagcaactcttgtgcygtggcctccccagtagctgggactacaggtgctcaccaccttgcctggctaacttttgtatttttagtagagacagggtttccccatgttggccaggttggtcttgaactcctgacctcaagtaatctgcctgcttcggcctcccaaagtgctaggattacaggcgtaagccaccacacccagcctcaactttaatcttatgaatataagacacaagggcrtaaatgtgcargtttgttgcatgcatgccactgaataatcccatcacccaggtagtgagcataatacccaataggtggtttttcagcccttgcccctcttcccctcccatctggctactttttataggaaactcgaactatctaccagtttcattacaagaattggccagaccatgatgtaccttcatctatagaccctattcktgagctcatctgggatgtacgttgttaccaagaggatgacagtgttcccatatgcattcactgcaggtatgacactatatataaaccttctacccaaaatgaaccaaatgtcagagtctggccaggactgtgtaattgaaaggggaaaaggttaatagcaaaaacaaacgataataaattcaacctaagcattaaattcatgtttttctgataagttacttgtgagtagtacagttctagagactcttgctctgagatgttgcctaggacctcttgcatgacaaatgggctctgggaaatggtggggtttggaaagtttaattgtccccaggtatcttcttcctcaaatctgctggtgaaattttccagctactgtcaatggtccattctctctaggtatacatgcatacatgctactgtgatctttcatttcagtgctggctgtggaaggactggtgttatttgtgctattgattatacatggatgttgctaaaagatggggtgagtttctctcagcaggcacttcccatttgcttagtctactgctttcatacttagtaatkgtttggtttttcaaaacatctatcttcatgattcatcttttctagaaaatgtacttgtagacccactctgtcagaygattaaattagttcccaggtaggtgggtcttaaagggtggtccccagacaagaagcatcagcatcacctgagaacttgttagaaatgcaatatatattgggctaagatatgttattaaaattaatttcacctcttttcrgttttgaatgtgtctatttgaaaatttaggccgggcacagtggctcacgcctgtaatcccagcactttgggaggccgaggsaggtggatcacgaggtcaggagatcgagaccatcttggctaacatggtgaaaccctgtctctactaaaaatacaaaaaaattagccgggcatggtggtggacgcctgtagtccccactactcaggaggctgaggcgggagaatggcttgaactgaggaggtggagcttgcagtgagccaagatcgcgccactgcactccagcttaggtgacagagcgagactctgtctcaaaaaaaaaaaaaaaaaaaaaaaagcaaaaaaaaattagccaggcatggtggcatgtgcctgtaatcccagctactcaggaggctgaggcaggagaattgcttgaacccgggaggcggaggttgcagtgagctgagwttgagccactgtactccagcctgggtgacagagagagactccgtctcaaaaaaataaaaataaaaataaaatacataaaggaaaagaargaaatttttggccgggcatggtggctcacacggtaatcccagcactttgggaggccgaggcaggctgatcacctaaagttgggagttcgagaccagcctgaccaacatggtgaaaccctgtctctactaaaaatacaaaattagccaggtgtggtggcgcatgcctgtaataccagctactcgggaggctgagacaggagaatcacttgaacctgggaggtggaggttgcagtgagccaagatcatgccattgtactccagcttgggcaacaaaagtgaaagtcctcaaaaaaaaaaaaaaaaaagaaagaaaaagaaaatttaaaatcacatatgtggctcacattatattttactggatatcactgttctactgttgccattctgagttgacaattctaatcaaaaccaagcaaacttggctggttgcagtggctcatgcctgtaatctcagcactttgggaggctgaggtgggcagatcacctgaggtcgggagttcaagaccagcctgaccaacatggagaaaccctgtctcaactaaaaatacaaaattagccgggcctggtggcacatgcctgttatcccagctactcaggaggctgaggcaggagaatcgcttgaacccgggagacagaggctgcagtgagccgagatcgcgctgttgcactccagcctgggcagcaagagtgaaagtccgtttcaaaaacaaaacaaaacaaaaagcaaaaatcaaaacccaaggaaactagatatttcacttagcttgtgcagctgttttagtagacatatgatttctgttagttcttgtgaaatactgaaaataggtcaaatatttctatttctactttgtcagactcccaggaagtctgtaatttatatgtcctttaatgtttgttttccaatctttggagattccaatagtgtaggggttgaaccccaagggggttaggtgcacctaacctaaggtgaaggcaaattactgggccccaccccattgaattgaatcatgtctctagagatgggggcccagcaagctgtccaggtgattgtgatgcatgatgaagtttgaggaccactgtcctaaattatatagttacccttcctttatccaaagatgctttaatagatggactcaacttactgcaatcatactttgcgttccaatctataaatcattttttaatgtctaataggaaatgggaagtttaaaatatggcctttagacctacctaccaacctcttttattttatgcaactctcatacttgtgcatctactgaatcctgtccctcgttatatctatagttttagacatttggttataccgtgtgaaatcattctgaagagtttctttagtcttttctagggaaaataccaggctctaaatcatgttgcaagtgataagaaacctcatttgttttaaaaatgcatcatttttctgatattaccccatgttagaagagcagatgccatggaagtacaagactatgaaaaagtagcaataatttattaacaaaatattgaaaggaatattttcccctttaatttgatagataattcctgagaacttcagtgttttcagtttgatccrggaaatgcggacacagaggccttcattagttcaaacgcaggtakgaactatagtgaatggatcagaacatgtgtctgagtcttgctccatctgtttaatggtgaggcatccaaaaacagctgactgctcagatataacaccaatttaccattacgtgctctagagtccattgccattttctctaactctgaatatcccaatatttttcctgtatcccttgtcctgrgtcaaattcctttcattccttattttactgtctgttcagaaaatattaagataccaatgtaatattacttacttccttacaaaggatgttgtaaaagtattcaacaaactgacttgtggacttgaaatagctaggtcatgttaatttgaaattttgtagtgataaaattcatctctgaaagcatagaaaatcagggatttgtaatttctacccaggatgtggtaacagaatatggagaattcagtctatgtgctcgttttaggaaacactgaaaaataaaaataaaaaccatattcctattacctacagatagccactattactatttttctatagtttctcctgattcttattgcatgcatacttaaaaaagaaaaaacataattgggccgggcgcggtggctgacacctgtaatcccagcactttgggaggccaaggtgggtggatcacctgaggtcaggagtttgagaccagcctgaccaatatgctgaaaccctgtctctactaaaaataaaaaaattagctggatatggtggcaggcacctgctaatcccagctacttgggaggctgaggcgggagaattgcttgagcctgcgaggtggaggttgcagagggccgagatcacacgactgcactccagcctgggtaacagagtgagactctgtctcaaaaaaaaaaaaaattacaatcacactctatttatgtatcacaaycttttaacctaccccagaatacccatacttgttcactccattaggaatgctcttcccttctcctagcccaaatctctcactgcctacaatattaatttcacccatatttctacacgaatagttttacccaatagttttagttttctaagtggtctccatttttaatatagaatttagaattgacccattcattcatgaaacgtgtattgatgtttattaacaggcacttttgtgtaatttgttagaactacttttaactacttaaatagcaagaccttaaagtgtttaaaacacttacaaatgaagatgcaaatagttttagagataaaacaactgacaatggcaattcagatatttagtctagaagttgtgaattaaagggataaaataaagagctattataatataaaactgtttggcctgcacagattttccactaatagctggtggaaaaaaataactttcatgtgtgctgagtgtaggtgttttctatattcaacctgtgagggagaaagcttatgtgaaatgaaagcattagctggtttaatgctgtcagacttgaaagaaggctgatccatgtaaatgcataaagatkccagaagtatggaacctagttatataaatagcaatactaatttaataaaactataccccatttcaaaaacgaatttcatttcaggcctacttttaagagttggaagacgctgaaaaagccttcacattttggcattatcaaacaactaactgaacttgacagttgtagctgttttttctgacactactgtaaccaggaaatggcactgtaaccagatgagagcttcctgtctgatttttctttttcttcctttctttccttccttccttccttccttccttccttccttccttccttccttccttccttccttccttccttccttccttcttttgagatggagtttcacactgtcactcaggctggagtgcaatggtgcgatcttggctcactgcaacttctgcctgccgggttcaagcaagtcttctgcctcagcctcccgagtaggtgggactccaggcacgcatcaccatgcccagctaattttttttgtatttttagtggagatggggtttcaccaygctggccaggctggtcttgaactcctgatttcgtgatctgcctgcctcggcctcccaaagtgctgggattacrggcgtgagccaccatgcccagccctgatttttctttcttaaagaaattagccagatgtggtggctcacccctataatctccgcactttgggaggctgaggcaggtggatcacttgagctcaggagttcaaaaccagcctgggcaacatagtgagaccctgtctctacaaaaaatacaaaaattatcagggtgtagtggcaggtgcctgcagtcccgacttacttgggagactgaggtgggagcatcacttgagcctgggaggtcgaggctgcagtaagccgagattgcatcactgcactccagcctgggcaacacggtgagaccgtgtctcaaaaaaaaaataaataaataaataaataaagagcatactaatggctgtgttgaatgatatagactctgcattgtttcctgctaaaattatctttgaaaaaaaattgttctttatttgtacagaaatgtgtaaagtgtcagggaaaaccctgaataggccctttcaggtaaaaccctgattaggccctttcagataaaaagtaggttcaaaattaagtgcttgagaaagtacaggcaaaaacagagtagtaataactcataaaccttgtaataatagaggtctcatttctctatggtgaaatccttttgtaaccacaaatttcaaaaccttatttagtggtttacttttttttggtatctttattaggacaaaattttagcaactttatctaaatgcactgaactaagagtgtggaaattaagtttctaagccaagccctggaaattccttctgaatgacctgggataaactgtttgtaaataggtataaatagcttatctactttatagagcaattgtgaggaccaaattaaagcatagacattgaagttatctatctatataccaaccactatctctttttccagaaaagatgaaggttgcttacaaaaaatccatctagaatgaaatatttttttttttaatgtgagcaagggaaacagaattagagaaatgatggtggagagaaagataagaaactaggtttagaacataaaagaaacaagtcataagattcctgtacattagttagaggtgtatcaaatatttagctattttcagcagcataaaagtgctttgaaatctgaagtgaactacgtaagcataaggcattgttagtaagtttaataacatgccgatcgtccttttgggtctgctatattaggatttgattggtgttcatattcctaaaatctggtcctgtcgttcaccaatttttttgtttttgttttcatttgttctgggttgtgatgctcttcaggaacaatatgaactggtctacaatgctgtattagaactatttaagagacagatggatgttatcagagataaacattctggaacagaggtaaaatttaaactagatattatgtcaaaaaaattttcatacttgcttttggtcaagggatgtcagatttgttgcaggatttatctattgtcacaactaaattgagagcgtcaggtgtgcatagggctgcactgaaaatttcctgtggaaaatgacaaattaatttgatgtaatttaacttaaaaaattaatctcactaagtccggtggctcacacctgtaatcccagcattttgggagctcgaggcaggcagatcacctgaggtcaggagttcaagaccagcctggccaacatggtgaaccccatctccaaaaaaaaaaaaatttagccaggagtggtggggcatacctgtagtcccagctactccagaggctgaggcaggaggattgcttgaacctgggaggtggaggtcgcagtgagctgaaatggcaccacagcactccagcctgggcaacaaagtgagaccctgtctcaaagagaaataaaaatttaaaaataatctcttggctgggcaaggtggttcatgcctgtaatcccagcactttggaaggccaaggtggaaggattgttcaagcctaggagtttgagagcagcctcagcaacatagcaattgtctctacaaaaaaatttttccaaatggccgggtgcagtggttcactcctgtaatcccagcactttgggaggccaaggtggggttttgccatattgaccaggctggtcttgacctgggatcaggagttcaagaccagcctggccaacatggtgaaaccccatctctactaaaaatacaaaaattaactgggcatggtgatgcgcacctgtaatcccagctactcaggaggctgaggcatgagaatcatttgaacccaggaggcggaggttgcagtgatctgagattgcaccactgcactccagcctaggtgacagagcaacactctgttaaaaaaaaaaaaaagccccagcaaaaagagaaggcttaactaagattcagagtctcataacaatgtgaaaatacccagatttcagttgaaaatcacttattataccaagaaccaggaagatctcaaactgaatttaaataaggacaataggtgacaacaccgagatgatacagatgtcagaattatctgacaaggattttaaagcagccaagataaaaatgcttcaatgagcaattaaaaacatagttaaaacaacaacaacaaaacaataaaaagaatgaaaatataaaaaaataaaaaaggtaaaaacatgcttaaatcaaattaaaaaatacaaagcctcatcaaaaaaaaaaaaaaaagagtctcagcaaagaaacaagatataaagagaaccaaatggaaattttagaacttaaaaatacagtaactgaagcaaaatagatgggttcaacagcagaatagagggtacrgaaaaaagaattaatgaattgaaaagtagaacaatagaaattgcccagtctgagcaacagtgataaaatagactgaaaaaaaataaacagagctgcagggaactaagggacmaaaaaaaaaaaaaaaaaaatctagcattgggtcatcaaaactccagaaagaaaatagaaagggcagggctgaaaaagtactggaagatacatcataattaaatttctgaaaacaaaaaacgacaaaaaagttttagaaatcagccagaaaaagatgacaccttaactgtaggaggaaaacaattagaatgacagcagattttgcattaggaatcatagaggtcagaaggaagtggcacaatattttccaagtgctgaaagaaaataactgtcaatccagagttttacacccagtgaaaacatccttcagggctgaaggggaaatcaagacattctcagatgaagaaaaactaagataatctgttaccagtagacctaccctaaaaaaatggcaaaggaaactttctaaaccgaaagggaatgatgaaagaaggaagaaagaacataataaacaaaagtgggtaaatataataaactttccttctcctcttgagttttataaattatgttttacaattgaagcaaaaatataacactgactgatgttgttctaaatgtattaaaggaaatattttaaatgattataacaggaggatggtaagaaacataaaggaaggtaaggcttccacacttgaactggtaaaatgataacaccagtagagtgtgataccatatatctgtatctatatctagagccatgactaaaaaaaggctatacaaagagatataataaaacacactataggtaaatcaaaatggaattctaaaaaatgcaggaaagagaaagcatcaggaaaaagaaaagagcaatgagaaacagaaagaataaagrgaaaacaaaaaataaaatagcagaatgaaacttgaccatattaataattacattaaacatataagcctaaatacaccaatatttactggtggtagagtgaattgccagactggcatagagaattaaaaaacaattcaactatatgttgtctatgagaaactcacttcaaatatataagagggctaaaaacaaaggaatggaaaaaagttatatcagtaaacatgaatcaaaggaaagcaggagtggctatgttaatatcagataaagtagacttcagagcaaagacaattatcagagatagggagataatgataaaagggtcaatctgccagtaagacataatagtcctaaatgtatatagaccaaacaatgaaattgcaaaatatgtgaagaaaaactcatagaacttaaaggagagaaacagatgattcacagtcatagccagagacttcaatattcttctttcaacaattttgatagaactagacagaaaaccagcaaggatataggtgaactcaacaccactaactgacaaaatctagttgacacttacagaacactctacctaataagaatacacattcttttaaagtgcttatggaaaatatatatcaagatagagtatatcctgagccataaaaatctgaaaaatttgaaaaatttttttaaattgaaattagcctgggagcagtggctcacacctgtaatcccagcactttgggaggccaagacagacggatcacatgaggtcaggaatttgagaccagcctggtcagcctggccaaaccccatctctactaaatatacaaaaattagccaggtgtggtggtgggcacctgtaatcccagttacgtgggaggctgaggaaggagaatcacttgaacccgaacctggtaggyggaggttgcagtgagctgagatagcatcactgcactccagcctggccaacaaagcgagactctgtctcaaaaaaaaaaaaaacaaaaacaaaaacaaaacaaccaaaattatacagaatatattttctaaccacaatagaatcaaattagaaatcagtaacagagaccgggcatggtggctcttgcctgtaatcctagcactttgagaggccaaggtgggaggattccttgaggccaggagttcaaaatgatcctgggtaacacagggggacccccgtctctacaaaaattaaaaactcagccaggtgtgatggcatgtgcctgtagtcccagctactcagggggctgaggtgggaggattgcttgagcctgggaggtcaaggctgcagtcaactgtgattgtgccactgcactccaacctgggtgacagagcaagaccctgtctcaaaaattaattaactaattaaaaaaagaaaaaaatcagtaacagaaaggtaacggaaaagtatccaaatccttggaaatcaaaccacacttttctaaataatctattgggtcaaagagaaagtctcaaaggaaataaagaaacacactgaattaaacaaaaatgaaaatacaacataccaaaatttatgagacagaagcaatagcagtactgagagggaactttatagcactaagtgcatccattagaaaacagtataggtctcaataatctaagctgtcactccaagaatatagaaaaagaaataaagagcagaaatcaatgaaattggaaacaataatagagaaaaatcagaattggttttttgtttgtttttgtttttttgagacagagtttcactctatcacccaggctggagtgcagtggcatgatcttggctcactgcaacttccacctcccaggttcaagcgattctcctgccttagcctcccaaatagctgggactacaggtatgtgccaccatggccagctaatttttctatttttgtagagatggggttttgccatgttggccaggctggtcttgaactcctgactatctgcttgcctcggcctcccaaagtgctgggattacaggcgtgagccaaggcatccagcctggtttttttaaaagataaaaaaaaatcgttctttaacaagatcaatgaaattgacaaacctttttaaaaactgacacagataaaaagggagaaaatgaaaattaccaatatcaggaatgaaataggagctatgttgtccaggctggtcttgaactcctgggctcaagggattttcctgccttggccccccaaagtgctaggattacaggcgtgagtcaccacacccggcccagaatggattattttctcaaacacaatctaccacaatttactcagcatgacatagataatttgagtagccccttagtgattagaaaaattgaatttgtaattttaaaactcccaaaaaagaaatctcaggcccacatagtttcactagagaattctatcaaatggttaaggaagaattaacaccaattttatacagtctatactaggaaatagaaaaggaagagatactttccaattaatatttttattgtggtataatatatcattttaatttactattttagccatttttaagtgtacaatgtagtgtcattaagtatattcacaatgttgagtgactatcactatttctggaactttcattattctaaacagaccctctgtatccattaaacaataactccctattctcccctcccactggcccctggcaaccatccttctactttctgtctctatgaatttgactactgtaggtacctgataygggtggaatcatatagtatttgtccttttgtgtctggcttatttcacttagcgtaatgtcctcaaggttcatccatgttgtaacgtgtcacaattttcttactcattaaggctgaataatattccattgtatatgtttatacacacacacaccacacacacacacacacacacacacattttgtttatccattcatccatcaatggatacttgagttccttccactttttggctgctgtaatgctgtgatgaccatgggtatacaaatatatatttgtatccctgcttttaattactttgggtataacccagaagtggaattacatgtggtaattctatgtttagttttctttttttttttttttgagacggagtctcgctctgtcgcccaggctggagtgcagtggcgggatctcggctcactgcaagctccgcctcccgggttcacgccattctcctgcctcagcctcccaagtagctaggactacaggcgcccgccactacgcccggctattttttgtagttttagtagagacggggtttcaccgttttagccgggatggtctcgatctcctgacctcgtgatccgcccgcctcggcctcccaaagtgctgggattacaggcgtgagccaccgcgcccggccgtttagttttcttttagaacagccatactcttttccatagcagctgtgccattttacattcccaccaacagtacacaaggattccaatttctctacatcctggccaacactttttattttctgttttttgtttatttgtttgtcttttgagcacagtctcgctctgttgccaggctggagtgcagtggcgcaatcttggctcaatgcaacctctgcctcccgggttcaagcgattctcctgcctcagcctcccaagtagctgggattacaggcacatgccaccacgcccagataatttttgtatttttagtagagatggggtttcaccatgttagccaggatggtctcaatctcttgacttcgtgatccgccggcctcggcctcccaaagtgctgggattacaggcgtgagccaccacgcctggcctattttgtttttttgatggcagccatcctaattaggtgtgaagtggtatctcattgtgattttgatttatattttcctaatgattagacacctttctgtggtcttattggccatttgtatatcctctttggaaaaatgtctcttcaagtcctttgccttctcccacccacccctactttttttttagtcagggtcttgctctgtcattcaggctggagtccagtggcaccatcatggctcactgaagcctcaaactcttgggccttaagtgatcctcccacctcagctcctgagtagctgaaactataggtatgcactaccacaccaagctaatttttttttaattttttttttagagacagggtctcattatgttgcccaggctagtcttgaactcctggcctcaaggagtcctcccatctcaaactccccagtagctgagactaaaagcatgagccatggtgcccagattttgctcattttttaattgaggctgtatgcggtggctcacgcctgtaatcccagcactttgggaggccgargcgggcagatyacttgaggtcaggagtttgagatcagcctggccaacatggtgaaatcccgtctctcctacaaagacaaaaattagccgggtgtggtggcgtgtgcctgtaatcccaggtacttgggaggctaatgcaggagaattgctggaccccaggaggcagaggctgcagtgagccgagatcgcaccactgcactctagcctgggtgacagagtaagactctgtccccctccaccaaaaaaaaaaaaaaaagagttgtttacatgttgttgagttttaggagttctctatgtattctggatattgatcccttatcagatatgtgatttgcaaataccgtcttccattcagtcaatgggttgcctttttgcctttgtgtcctttggtgtgtaaaagtcttaatctcaatgaagtccaattttcctattattcttttgttgtttgtgcctttggtgtcctatccaagaaatcgttgccaaatccaatgtcatgaagcttgcccattttcttataagagttttacattttacttcttatgtttaggtatttgatcaatttttgagttaatttctgtatcataagataagggtccaacttcattctctctctttttttttttcctttgagatggagtttcgttcttgctgcccagggtggagtgcaatggcgtgatcttggctcactggaacctccacctccctggttcaagtgattctccggcctcagcctcttgagtagctgggattacaggcatgcgccaccatgcctggctaattttgtatttttagtagagacggggtttctccatgttggtcaggctggtctcaaactccygacctcaggtgatccacccgcctcagcctcccaaagtgctgggattacaggcatgagccaccgcacccagcctcaacttcattcttttgcatgtgtatattcagtttttcccagaatcatttattgaaaacactctcctttctccattgaattttcttggcacttttgtcaaaaatcaattgcccaccatatgtaaatgtttttttcaaagctcttctattccattggtctttagtctatactatgtcagtaccacactgttttaattactgtagctctgttgcaatttttgaaatcaggtagtgtgtcattcaactttgctcttctttttcaagattgttttgactgttcagtgccccttgaaattccatgaattttagtctgttttttaaacaaattatgtaaaaatgccattgggtttttgataagaattgcattgcacttgtagatcactttgaatgtctatttatttatatcttatttaatttctttcagcaaagctttgtagttttcagtatacaagtcttttgcctccttggktaaatctattcctaagtattttattctttttgatgccattataaatataactgtttccttaatgttcttttcagattgttcattgctaatgtatagaaatgcaactcgttttatgtgttcattttacatcctgcaactttgaatttgtttattagctctagcagattttttgtggaatcccatatataaaatcatgtcatctgagactagagataattttacttcctttttttccaatttttttttttttttttgagatggaattaagttagggtcttattctgtcgcccaggctggaatgcagtggtacgatctcggctcacttcaacctccgcctcctgggctcaagcaagtctcctgcttcagcctcccgaataggtgggattacaggtgtgcaccacatgcccggctaatttttatatttttaatagagacgggctttcaccatgttggccaggctggtttcaaactcctgacctcaagggatccactcaccttggcctcccaaagtgctgggattacaggcgtgagccactgtgcgcagcctttttttccaatttgaatgcttttttttttcttgcctaagaacaaaattaattaaaaaaattactttggctagaactttagtactatgttgaatagaagtggtaaaagttggcattcttgtcttgtttttgatcttaggggaaagtttaagtctttcatgtatgaatatgatgttagttatgggttttcatatatggcctctatcatgttgagaacatttccttatattcctattttgttaagtgattttaacatgaattttgtcaaacgctttttctgcatcaactgagatgttcaaaatggattttaacatctctgaaatgaagatatattttataatcaattatattttaagattctatgaaccacaataacatatttcataatatgataattgctataaaaaataaggattgggaagctgaggtgagaggaggacttgaacccaggaggtcaacaccgcagtgagccatgtttgtgccactgcactccagcctgggtaacagaataagaccctaacttaattmaaaaaaaaaaaaaaagattgaggccaggcactgtggtacacacctgtagtgtcccagctacttgggaggctgaggtaggaggactgcttgagcccagaagtttgaggccagactgggcaatacagcgaggccctgtctcttaaaaaagaagaagattgagcatggctggacaggggaagaaatgtgattttaggttgggtggtcagggaaggtttccttatgcagatgacagttaagcagagatctaattacttagaaggagccagccatgcaaaatttggagcaaaaatatattaatcagggggaatagtaagtgtaaaagccttgacttggaaataagtttggcatgctaaagtaatggcaagaaaaccagtatacctagagcatagtgrggaggaaaagagtagaacaagatgaaataggtccagagacctaataagtacctgtaaagggctgagatgctgaaatttctaaaggcagagtgtttttgagactaaagttacccaccaaagaacatttttaaaactcccacatttgaaaagatgatgatatacacaaatcctttctrgtttctataatactattaatcctttattctggccatctcagtatatgaacgagttcttgctgagttcaatattttggaagctaatctaactctttcatgaattattttaaatctttttatttcctgaaaaattacttttcagccttctaaatattaaaatatcttattgacattgcttcactgaaaaccagcctctgacttatttcttttaaagagtcaagcaaagcattgtattcctgagaaaaatcacactctccaagcagactcttattctcctaatttaccaaaaaggtgagtacaattttatwtatctaaatgttgactaattgtgtctgggagatgaatctcatgcttatacatcattgtgatgctaggaagcggcctgtttggggtatggtgtcatcattacgctttctttttgttttagtaccacaaaagcagcaaaaatgatgaaccaacaaaggacaaaaatggaaatcaaagaatcttcttcctttgactttaggacttctgaaataagtgcaaaagaagagctagttttgcaccctgctaaatcaagcacttcttttgactttctggagctaaattacagttttgacaaaaatgctgacacaaccatgaaatggcagacaaaggcatttccaatagttggggagcctcttcagaagcatcaaagtttggatttgggctctcttttgtttgagggatgttctaattctaaacctgtaaatgcagcaggaagatattttaattcaaaggtgccaataacacggaccaaatcaactccttttgaattgatacagcagagagaaaccaaggaggtggacagcaaggaaaacttttcttatttggaatctcaaccacatgattcttgttttgtagagatgcaggctcaaaaagtaatgcatgtttcttcagcagaactgaattattcactgccatatgactctaaacaccaaatacgtaatgcctctaatgtaaagcaccatgactctagtgctcttggtgtatattcttacatacctttagtggaaaatccttatttttcatcatggcctccaagtggtaccagttctaagatgtctcttgatttacctgagaagcaagatggaactgtttttccttcttctctgttgccaacatcctctacatccctcttctcttattacaattcacatgattctttatcactgaattctccaaccaatatttcctcactattgaaccaggagtcagctgtactaggtaagttattttttaaagtttgcatagaattttagatttcattttgtttctatagaatagttggtttcttctcctcttccctcttctcctctgcttcttctctttctttcttttttctcttttttttcttttttttttttgagatggagtctcgctctgtcacccaggctggagtgcagtggtgcaatcttggctcaatgcaacttccgcctccagagttcaagcaattctcctgcctcagcctcctgagtagctgggattacaggcgcgcgccaccacgcccggctaatttttgtatttttagcagagatggagtttcaccatgttggccaggatggtcttgatctcttgacttcgtgatctgcctgcctcggcctcccaaagtgctgagattacaggcatgagccaccacgcctagcctgcttccttctctttcttcttcctgctactcctcaaataaatacattccaggagtgttttaatgctgtaataagttgaaaatagcaacatcaaacataatattccatgaaacaggcaacaatggaggcaatcaagatctggtacaggatctgtaccagcaggagtgcttctaaagaaggcacgcctcatttctagaaatgtatatcaaaggctcacaatatactgttttttaaaaatattttttgaaacagaatctcactatgttgcccatgctggagtgcagtggtgtggacattgctcattgcagccttgatgtcctgggctcaaccaatcctcccacctcagcctcccaagtagctgggaccacagggacacgccaccatgcctggctaattttttttttttttagaaatggggtcttgctatgttgcccagcctggtcttgaaaatctggcctcaagcaatcctcccaccttggcctcccaaagtgctgggattacaggtgcaagccaccacacctagcttcagaatttactcttaacatatagaagcagcttccaaaggaagagcagaaaaaaatttgatcaatagcacccagattttttgttgcacaattatgtggctaaaatgagttgaacatattgctaaaaattgaattatcttcctgcaggatttggaaggggagaacctgatttcttgctcttttgtagtaatctcgtagatgacaatacatgtttagtattttgtgtaaaaattttatcatatgtatacctttactttcatgttttgtctcttttataattctgtatttttgcatataatgcatattgttctgttttactgattagtttgaaagtagaaatgagcaccctgttagagatgatgacaataatttgatgtggaagatgatgagggaaagcaatgaacaagtttaactcccttaggtatatcatcaaataatttgtaaagcacattctacatagataggaggtggagaaaacttttgctctataacattatttattgtagagtttcttaataaatagttgtgtagatcatttgtagctttgttgcaaaaatatcttatctggatctaagatgttccttctgtgattagattattttatacatttttaaacatttaaatgtattttcttttcttataccttaaacttctctgagcatctgcatcattaaaaaacagagcgagactccgtctcaaaaaaaaaattaattaataaaaacatacccttattttcagggattgtaacaatatcgtcatgtgccatctggtggcagtttcttgtaataccatttaaaatgtttaataaaaactgaatgtttgtatagaaatacagaagactatcctatactgttgttttgtaaaatggaaaaatacccatattcttgaattttgtatagaatgaagagatactgaaatctttatgattttacctaatgtataactgaaccttttacacgtcaaagcactttataatgttttattatatagtctatgtaaaacaaaaggagttatgtaaaagttaattcaaagcttccaaaattaatataatattttatgttaactgatacaccgtgactcaatcaaaatgtttttgagcttttatttatttattattattattattttttgagacggagtgtcctgctgccacccaggctggaatgcagtggtgcaatctcggctcactgcaagctctgccttccgggttcacgccattctcccacctcagcctcccgagtagctgggactacaggggcccgccaccacgcccggctaatgttttgtgtttttagtagagacacggtttcaccacgttagccaggatggtttcgatctcctgaccttgtgatctgcccgcctcggcctccgaaagtgctgggattacaggcgtgagccaccgcgcccagccctacttttgagcttttaaaacaataaatgttaaagaataagcaaaaacctcctgggtttgtaccttaagagaatttattttgctttttccttgaatgaacaagtgtcaactttactgataatgttgcttcaacggaatttaaatataaattatggtaaatttatatttaatattagaatataagaatttcctttggattgttctaattaacaattgttacaatatttttgacattttggatagcaactgctccaaggatagatgatgaaatcccccctccacttcctgtayggacacctgaatcatttattgtggttgaggaagctggtgagtacagttcagtaagtataaaataaagtgtgggatgggcatggtggctcatgcctttaattccagcactttgggaagctgatgtgtgagccttgagtttgaggagttcattgaggccaggagttcaagactagcctgcgcaacatagtgagacctcatctctaattttttttttttaatttagcagagcaatagcagcatgcatgtgtagtcccaactatttggatggtggaggtgagaggatcacttgagcccaggagttgggggctgcagtaagccatgattgtgccactgcactccaktctgggtgacagagcaagaccctgtctcaaaaaataaaatgaagtgtgaattaactagattacttctcaggtcctttcratgttttatgtattatttgctgagcaacatttgatgtctaaaagaatactattcytaagaaccgaactatattcactttcttccaggagaattctcaccaaatgttcccaaatccttatcctcagctgtgaaggtaaaaattggaacatcactggaatggggtggaacatctgaaccaaagaaatttgatgactctgtgatacttagaccaagcaaggtcaataattttttaatgactctactcatttagattcaatagactacagttctactccttgtatttttaacacccatcattcaataaatcctaagcacatactaaatatagaacaatgtgctagaggatgttgggataaaaaggatgtataagacacaattcttgcctgtaagaagcttcttgtctagtagtagagatataggatgtgtacaaatctttatttttgcctatatttattataacaaagcaaatgtgatcaatgtcatatgaaagataaagaatttcaagtgtaggagatgcctccaggttggaagtgatcaaggaagatttagtgaaagaggaaacatttgagctgattcttgaaggatagttaaggcaaaaataaatgtttcatacttaagtwggaagcttgttcactgtagtcatttggtaggctatatcatgtttgctgtgataatatgttatagagaatgacaggtgtgcatattacttaagataaaccttttggaatagtgtggttgatggtaaagtcagagatgggggtgggaggggtttgtggattaaatagaaaataattattgaaagtaggtgtgtcctgcttctggaggaaaaatagaagtgtatctaaaaatgttatgcatttctgtatagtctgtgaaccaattctcttaaaatttgagagatcagaaaaataattaaacattttaaagtacctacaattgcaatgctgataggcaaatattctctgccttttaaattataattctaatgtactagtaattattattgtcattaataataggcacatatatttactttaacaactcccagaggaaagaacagtcactcttccaatgttatgaagtaacttcaatttccgcaacttacctctaattaaattttcagggaaatgtttcaggtgggacagaaataagtcagaaggggatcaatttaggactaattgccatgggatataaaaatcagtgtaagagtgaaagatgccatttcataattcagcacacttacaaattaggaaaaatagggtctacatttcataattatctctacagctatattacatataagttcaaaaatgccattttttgctttgagtttgtataatttgtatacatattcttctttcacttttcctttctttttttcttttagagtgtaaaactccgaagtcctaaatcaggtaaaaatttctcttggctttagatgacatttagccctaagattggaagaatggttcgttaagtttagagtaattcacttcaggaagttacttggttcccataatagcttccagtattcattgatttatttctggctttcccagactagaaattttgtaaagagcaaggtgaagacaggattttagaattctgctccttaatatataacctctctgaaataatatataaaaactatttcagagagaatcttttaaaactttgcagcttttccactatagagattttcccactgttaacagtgtgattcaaaaaattatttctggccacttaattctttaatttgctgttgcctctccagtacttgtctgagctttgcctgtttcatgcattgaagaacaaaaactaacatttattgggcacttccaggtactttgtttacattatcacaagtggtagttgcccttaacatatttattcatactgtcatattattcaaatacatatacagataatataaaggttaaaaaacatgggctttgccaggaatttgaggctgcagtgagctataatggcaccactgcacccagcctgtatgacagagcaagatgctgtctctaaaaaacatgacaacaggccaggcgcagtggctcacacctgtaatcccagcactttgggaggccaaagctggcggatcacgaggtcaagagatcgagaccatcctggccaacatggtgaaaccctgtctctactaaaaattagctgggcstggtggcgggtgcctgtagtcccagctactggggaggctgaggcaggagaatcgcttgaacctgggaggtggaggttgcagtgagctgagattgcgccactgcacaccagcctgggtgacagagcgagactccatctcaaaaacaaaacaaaacatgacaacaaaaacaagggctttagagtcagataggctttaagtcaaatccctggtctatgaagaattatcaacatgcataaacttggttaaattacatactttctccttctatttttctcatttataaaagaagaatagaatcccttagataatttttatgaggattaaatacaataatgtcgtaaagcttttagcgtagtacttgtcaaataagtcctcattaaatattatcgattataatttttattaatcattaaataagcattttactaagcaacttctgtgcaccttacacagggttagaataggcaggatgtatgagaaagagtactacttaatgcttatattcaaatagagtagataaaattaatactcacrtggaaccactaagtgataatctgtgtggcactgactgtaatcaccaggagtctgggaaaacaggatggcattactggagtggttaggaaaggtttcgctgagtggaagaaagaactttaaataatttgtatagacagagagaaaaaaggagggaattccagcagcagggatcagcctaccaatgactcaaaggtagaaatgagcatgatgtgtatggagaaatggtgagtaggctattttttttttgcaatagatattctagtttgtgaaatacagaaaataaatttgggtaaataagatgtggggcaagattctgaaggacttaaaaaagctagtcacatgaaatatccagaatagacagatccataaagatagaagcagattagtgattgccaggggctgggggaaagaggaaaataaggagtgatgacttaatgggtgcagagtttccttctagggtgataaaaagtattctggaactaaattgtggtgatggttgtacaatactgtgaatgtgctaaatgtcactaatggcaaatcttatgtgtattttactacccaaagttaggcagaggaatttacacccaaagttaggcagaggaatttagatttaatgtagtaagtaacaggcattatgggttctttgttaggggagtattaagatgaaatggaattttagggaaataattactagaatactgttaacgaacaactttagttttcagaatattccctaacagcaaactggaagatgatgaactacttcagagtagttattaagtatttattaaatgcctactgtatgccagttattttattaggtgctagaaataagtactacacttgtgtgtattacctagcatgtaagaaataagacaatttattgataagacaaattctaaggactaaacaaacccaatgaccaatgacaygtgaacctcttgtactttactgcattttcattttcaaaaggaattaatataatagtaatactcagcaccatataattaaatgcttatgtcagtagaataccatctgtatcttcagaaatttacatcatgggaaaatatgtccattactgaaaatcttcatcatggaaaatttcaaacacacatttaaaacctaccttatcacaccaataaaattaataataattccttaatagtaactaatatccagactgttcagttttcaattgtctcaaaaatgtctttttacagttggtttattcaaatctggattcaaacaaaatctaagcatttcatttgatttgtatgtttgtcttcttaaatctgtcttttgaaatctgtaacagttctcccttctttttttaatattttctttttaaatatataaccgttctcctttctatacttttcacatcatttatttgttgaagagagtgggtcatttgtcttaaaagactgcttagtcttctagatttggctaattgtatcacaatggttttatttaacatcctctatgcccaatatttcatgcaaaatgggtgttagatctagaagcttgattatattcggtttcagtgtctttgggagaatacttctgaagtgagctatacatttttgatgaatcataggctcataggctaacgaggtagaaaaacaaagttcttgaggctccagtcatttttcagataatattttatttggtgattgtcggctaagattgattgattaaaaaattatacaaagagaaaagggtgttgacttatgacttttaattgatggatttctctggtttattgtatactttcttatcacagaactacatcaagatcgttcttctcccccacctcctctcccagaaagaactctagagtccttctttcttgccgatgaagattgtaagtggtagcactttctctcaaaaaaatcataaaaatgaamatgytaaaagattaacaataaagtaggacctaaatggaaaggtacaaaaatgattacacaaaagaatacattttaaaagcccctaatatatagtcaaaataatgcctaaaaaagccaagctaacaatttattatatgtaacatgaaggcttaagaaggtatgcaatggaacatgtttttctcctttttttttttaaggtatgcaggcccaatctatagaaacatattctactagctatcctgacaccatggaaaattcaacatcttcaaaacagacactgaagactcctggaaaaagtttcacaaggagtaaggtaaagaagataagagttttgggaaacatgccggaaactttcccttactgaaagtttccccctccccagcattaagatggaaaattagattaaatatctttattaaaactaattgttgatattataacagtcaaaattaatagaaggaaacgaaaaagaagaaaaaatacaacttaaagaggcatttgtcagagggagaggaccagaaaaaatacctattgggtactatgcttattacctgggtgacaaaattatctgtacagcaaacccttgtgacacacagtttacctacataacaaactggcacacatacccctgaacctaaaataaaaattaaaaaataaaaataaaaataaatgaagaaaaaaaaaatccacttctccctaaggttgatttataaatgtaaaagatgcccaaggaaactaccaacttgtttatttctggaactagataaactgaattcaaagttcacatgggagtagggggaagcaggactagtcagaaacctgcaaataaataataaataaaaatagtttagataaatgtctttctaaaataatttttaaaaataaaaataaataaaaagaaaagcaatgaaagagagtcaccttagcagatattcgaatatggcaaagcctcaattaaaatggcatgataggcccagcatggtggctcatgcctgtaatcccagcctttgggaggccaaggcgggcagatcacttgagctcaggattcgagaccagcctgggcaacatggcaaaaccccgtctctaccaaaaatacaaaaaattagccgggcatggtgctgtgtgcctgcagtcccagctactcaggaggctgaggtgggaggattggtcgagcctggaaggtggagactgcagagattatgccactgtactccagcctgggtgacagagtgagacgtcatctcaaaaatttaaatataaatataaaatggcatattagtgtataaaaagaaacatatacgagcagagtaaaagggaaagttctgaaatagatccaaatatatgtagaaatttagtatacaatgaaggtggtatctcaaaatcaggggataaagatggatggtttaataactgttgttggatcaaataaccacctgaaaaaaagcagggtctattccttacatctatactaggataaattctaagtggctaaatgattaaaatgttaaaaaaacaaaaacaaaaacctcaatccatagaagacctaaagaaacttggaaagagtcttttacaacctgggagtgtgaatgacctttataacttactcaaaatccggaggccataagaaaagagatagataaattcagctaaataaaagagaaaatgtatgcatggtaaaacaatcaccttaaaaatcaaaagacaaagaacaaattggaggaaaaaaaatctgcaactggcaccacagccaaaggggttattactctaatagataaagaactgttagaaattcatagaaaataataacccccaaataaaaatgggcaaaaataggtgatcagatggtttgaagaaaataaatgagcatggtatgccctttatatatttgatatgttcaatttcattcataatgaaaaaattacaaattaaaaccacagtgacatattgcttttcatccatcagaatggtaaattccaaaagtttgattacactctctgttagggaggctatggggaaataagcacactcaatgttgttggtgagaatgtcaagtggtacaacttctttttacaattttttttttaaattagagatggggtcttgctatgttgtctaggatggggtctccctatgttgccaacttctagactcaagcgatcctcctgccttggcctccccaaagtgctgggattacaggtgtgagccactagaagtgaaatttatcctacaaatatgcttgcatacacatgaaatgacatgtataccaagtattcattgcagcattatctgtaagagcagattactggaaacaacataattaatagtgttaattgttaggggaactgattaaataaatcataaatcatgttatatccatacaaatggaatactgtgcagctaaaaaagaattaggactttctcaatatatttatatataatttattaacttttacttaaaaaaaggaatatgatacatatgtgtatttacttatatattcataagtaacactggaaggatactaacaacagaggataaaaaactaacagtggttatctacaggaggagcattagaaactgagtagtagattgaagacaaggatgggagcatttttactaggatttcctgacttgtaaataaatcatctattttttaaaaaataactaaaaatgttacaaataaataatgtattaaatatctattccatggaagagcacatttctgttaggtgttaggaaaacagaaatgtcataaaggataactatttgcccttgaaaatagtatagttaatctgytggaacagaacacctttgagaaacatgaaaattatcaagaagaataaaatgcctgaagcagattaaaaacatacatgctgaagaaatgtggagtaaagaagaaatttgggtaggttccttgaagagataaattagagactccaggccgggcgcggtggctcacgcctgtaatcccagcactttgggaggccgaggcgggcggatcacgaggtcaggagatcgaggccatcccggctaaaacggtgaaaccccgtctctactaaaactacaaaaaattagccgggcgtagtggcgggcgcctgtagtcccagctacttgggaggctgaggcaggagaatggcgtgaacccgggaggcggagcttgcagtgagccgagatcccgccactgcactccagcctgggcgacagagcgagactccgtctcaaaaaaaaaaaaaaaaaaaaaaaaaaaattagagactccaccataaaagtrgaggaaggaagtatggctaacagtttggaaggtggccttagtaaattgaatacagaatatgactggcaaaaattcttggctagaatggaaatggctgtgtatcatggatatattcagaagccattgtggattctgaaatggtcctaataaaggagggaagtgggaatttcatcccctctacccctctgagtcccttcccttcccttcccttcccttcccttcccttcccttcccttccccttctcccttcacttcccttcctctgtctctctctttctctttctttcttttttagacagggtcttgctctgttgcccatgctagagtgcagtggcataaatatggctgactgcagccttgacctcctggactcaagtgatcctcctgcatcagcctttcgagtggctgggaacacaggtctgcaccaccatgcctggctttttaaaatttttggtagggatggggtctcaccatgttgcccagtctggtcttgaactccctggcctcaagggaacctcccacttgagcctcccaaagtgctggaattacaggcatgagccaccttgccagcactccactgctccccgtcaatattctgatagcataattaaaaaaaaatttattggctggccacggtggctcacgcctgtaatcccagcactttggaaggccaaggcaggtaggtcacaaggtcaggagtttgagaccagcctggccaatatggtgaaaccctgtctctactaaaaatacaaaaaattagccaggcatggtagcaggtgcctgtagtcccagctactcaggaggctgaggcagaaggatcgcttgaacccgggaggcagaggttgcagtgagctgagatcacgccactgcactctagcctgggcgacacagcgagactccatctcaacaacaacaacaacaacaacaacaacatttattaatcttttttaaaagacatgttctcactctgtcgcccaggctggaatgcagtggtgggatcagagctcactgtagccttgaactcctgggatcaagcagacctcccgcctcagcctccctagtagctgctaccacattcagctaatattttttttactttttgtagggacaggggtcttgctatgttgcctaagatggtcctgaactcctgagctcaaacaatcctcctgccttggcctctcaaagtgccgggattacaggtgtgagccactgtgctcagcctctgatactattatttcaaaatatgtagtgtgatacttgcatgggtgatataaatagcaagataaaatcaagtagaggttttgcactgaattaaaaatggcaagatggaaaaacaactttgtacattttcatggctatttttaaggaaattaaattcttttcacttaagtctatatttctatttgattaaagtatttcaagtttcacaggaaaaaaaactaacatttttcctttcttttgtagagtttgaaaattttgcgaaacatgaaaaagagtaagttggtacttatgtttaaaaatatcgttttctcaattttgtaatttttatttatataaccaaccaatattgtgaaaagattaacaatattattcctaaacagagcctccatagggtcctatgaatcagaacaatcacccataggcctccttttttttttttttttttttttgctaggcttcacaatactaatattgggcagggagtaggcgatgagaagtcttctgtttaatacacaagaataataattagtacaatggcattaaaaaaattttaaatttatttttaaaatttattttaatagcagagatggggtttcaccatattgcccaggttggtctcgaactcctgggctcaagtgatcctcctgccttggcctcccaaagtgctgggattacaggcataagccactgcaccyggccaatgtttggtactttctacccatcctaagatgctgtcatacaattggattatttaaaatttccagcagtctaacctcagatgtattttctttgaaaatagtcacagcaaagcatattgtgaacaaatgtgttgacttcatgaaataagcaaagcattgacacatttccatttttactaagtattattagcaataaaagtctgttgcttactatttttgctacattgtaatgaaaataaaatccattgagtcctgaaactgtggaaaattatcttagaaatcttatttacaaataaaaaatataaaaaccatggtgatggccgggtgtggtggctcatgcctataatcccagcactttgggaggccgaggcaggtggatcacaaggtcagcagtttgagaccagcctggctaacatagtgtaaccccgtctctactaaaaatacaaaaattagccgggtgtggtggcatgcacctgtagtcccagctactcggaaggctggggcaggaggattgcttgaactcgggatgcggaggttgcggtgagccaagattgcgccactgcactccagtctgggcaacagagcgagactccgtctcaaaaaaaaaaaaaagaaccatggtgacaatcttaaaaaaatttttgatacatttggttaatcagtgaaagagcagttatttgacattaaactggtactatagggagagacaaaaagcactgagaaaatctgatgtaggtatagtctaagaaagaaggtttccttttgggttttcattctatctccctacccaaaagctccaggttcttgagctagtttgctatcactgccattatagctgatctctgacaccaactcatgatggctgaagtatagttggaaaacataccttttctcctaaaaagagtcraaagagaatttaaacatttcaaatggaaattatggtaggaaacaggggaaataaaacagccaagtgcaaagaaatgagtgacttaaatggttaaccaaagattggtttgatccacctaactcagaaaacagttttctttctctagctctaactctgcctagaatatcaaataaagaaacagaaacttcaggtagatttaggttggcacagctttgaaggtatagtggaactttcagagattgagtcttatttctaagtaagagctcccagttcattctctggatctgggctgtgctgtatttttcagttaccttgatcctctggtcttttgccgttaaatgaagaacatctggctcccaaaattgatcctgaagctttagactgtacttcatatgtgtcctcagccccttccagatggttcatgattctggaattccatgtgttctccctgtagcctggatctcccactggtctgtaaagctggtcctacttttaatgaaattaggattcttcttctgttattttaagctagtatctaagcctagtgtcattcattcattcattcaatgaatatttgttgagtgtctactatgttccaggcattctgtaaggcacttggtatatgatggtgaacagaacagatatgggctctgcctttgtggaatgtaagtttggtgagggrttccaacattaaacaaacaacattaaacaaaatttggttgaccatattcacaaatatatacttaataacacatgataaatgctatgaaggaaaacaaaagggtaactatgagaggataacaaaggggatccactttagaatgagtagtccaagaaagcccccgctttttttgagacggagtctagctctgtcgcccaggctggagtgaaatgatgcgatctcggctcactgcaacctccccctcccaggttcaagtgattctcctgcctcagcctcccaagtgctgggatgacaggcgcacaccactatgcccagctaatttttgtatttttagtagagacaaggtttcaccgtgttggccaggatggtcttgatctcctgaccttatgatccacccacctcggcctcccaaagtgctgggattacagctgtgagccactgtgcccggcccaagaaaccctttttaaggaagtgacaactgaacccaaaacatgaaggagcagccagccagccaaagggtccagagaagagtatttcagatagagggaacaaaatctctgaggtaggagattttggtgtattgtagaaactcaaagggaagccatcttagatgcagggtagtaagtaaagaggagacaggagtaaggcgaagctggaaagatcagggaggagcagttagatttttatgggtcatgcatggtaagtagtttagtttattctaagtgtaatgggaatccataaaagggttttaggcagagatgttacatgctctgtttcctatttatttttaaacatgcttcacagaaaagtataaaacgatcacactggctgctacatacagaatgaattatagagtgacaagagtggaagctgtcaactgttggtgggaaactttaattgctcagaaatcctttagttacaagtgacagaaaacctaacttaagctgacttcagcagaaaaggggaatttactggcttgtaacaatggtccaaatgatgtaatcagaacctaaattctcatttcatgtctctcaggttagtctcactctgtgttaactcattcataggcaggtttttatcatgtgagttcaggcttatgatggaaaaaaaataactctttattggttttcaagccacactgtgatgactagtgccaactgggtctgattgtcttgacttggttcatttgcccatccctgaaccaattatagtcaatgttctgattaggcaggatagtgtcatgccctaatatttaacacttattacatgtggacaytgtccaatcaggaatgaggtcagacctatacatctggtgtgaccatgccaatataccaactgaaaatcagccctagttataggtcatttccttaatctaaaggtacaatcagctctaatggaagcacgggaactgaaaactggggaggggtagtttcctaaaggaaaattcaagttctattatcagaagagggaatgaagtttaggcaggcagcataaatatatccatgataggccaggtgcagtggctcatgcctgtattcccagcgctttgggaggccaaggcaggcagatcacgaggtcaggagtttgagaccagcctggccaacatggtgaaaccccatctctactaaaaatacaaaaaatttacccrggcgtgttggcatgcacctgtagtcccaggtcctcgggaggctgaggcaggagaatcgcttgaacctgggaggcggtggttgtggtgagccgagattgtgccattgcactccagcctgggcgacagagtgagactgtctcaaaaaaaaccccaaaacaaacaaacaaaacaaaacaaaacaaaaaaatccatgatgagccaaaataacaaaatagcagtttcctctgatatatatgtgtggaatctgtgcctcctttgtaaaaaaaacaatattctcctttgagacaattttgttttctttctgaaggatgtatataactttcagctcctatgcagtatacagattactgatatctcctgaacttcctcacctttactactttctattaatgtctctatcttcagtgcctacagcaatgcttagcacatagtaagtatttaaatatgaatagtattttatacttatactttatattaagtattttaatatattaagtataataattatacttactatagtaatatagtaagtacaaaataaatatgtatcttaattagatctgattgaaattcagtatgtagtctagtgattcatactcaggtacctcctcgaaaaggaaggtgtttctagaatcctagtattaygtatgcatgtgcaaatatgcatacctaatatgcatatgcagttcacacagtgcattctgaaaatgttgaaaacaacacaaaaacacttaatatcttcccatttatatgcaatttgttagaaagtttatacaaacctgaaattatctttttccattgccaagacagagaatgtgcaaaatgtggacaaagtttttaagggactgttttcaaaactgcagaaactgatacatgaatatatcaatgtacatatatgacctatgagtaacttataagttaacttatacctataagtaactaaaatagcaaaacaaagcagcataacaatgcttttgggagattattggcctaaataataataattattatgtttttttgagacagggtcttgctctgtcacccagtctggatggagtgcagtggcgcaatctgggctcacctcatccctctgcctcccaggttggatcaatttttgtgcctcagcctcccaagtagctgggattagagatttgcaacaccatgcctcgctaatttttttttgtatttttagtagagacggggtttcaccatgttggacaggctggtctcgtactcctggcctcaagttatctgcctgcctcagcctcccaaagtactgggattacaggcgtgagtcaccgtgcccggttatgggcctaaattagaatcacttataattagaaaaaaatcaggctggaaagtggaataaaaaaagagattccagggtagaggattatataatacaaataaaagacttgtcatggatgaattattgtggagaagaaatgatgtaaaaatgtactaagagtggccagaggaaaaagtaatatgaagtccaaagccaaaatgtgaatttcaaaaaaaaaaacaaaaaaatgctgattcatgatatattggatcttatttccttagcaattttctttagtgttgggctttactatacaatctgtttgcaaagaaaagaaaccttttaagaaaaaaaccaaaaatacaaatgagaatattatagtgtcaacccatttgtaagcacctacattttgttaacatttgacagtgatatgtttatttgggattattaattactcttaacaattatatgtgatctgatcaacagtcatctgagtctgtctttagtctttcccttatatttttttcttttgattctaggtatctgtaattcttgcccaccaaacaagcctgcagaatctgttcagtcaaataactccagctcatttctgaattttggtatgtgtgttattttactgaagagttaaaaaaattacctaaattactcatttacagtataactgattcaactttaaatawgattttaggttgcatgtataggtccttatgtttatattcttttccatgcaatttatctttttatttttaaccttaactacctcttaacatctcacacagaactaaattatctagtatatgtggaaaataaagctaggtaaccaaattattgtgttggcatgtagtaaataaatatgactatccaaatggagaaattgagatgctgtgatattctggttcatatctaaagcaaatttataaaaaacatagaagtatgataaaaagaacagcagttgccactatttaatcttatataactaattcaatagtaggaaatgaagcacaattctgacggttttaaggtttgcttacccaattgctcctaagtataagctataaacttaaaacaataattttatattcttctaagcattctattgtcctatgtgatacatatttatgtactatttaaagtagtatcaggtataattttttgtaagaatagcaattagtggtaggctattactactaaaaattattattaaccaatccccttgaaagagtgtgaggcctccaggagtccctgaatcacactttgagaactgccacttaatggtattgtccttacttacacaatcaaaattaggttgccgccacatgcagactgtaggtggcaagaaaagaggaaaaagtggaggtgtggcctcctcttcttactcttctggtcttcaaaggcactggcctggaaatggccagatcatatcagctcatattcccttgaagagaacttagacatgtgctataactaaattgcaaaagagactgggaaatgtaatattgctgggcagacagacaaaattgcctacacacaattctatttgaggaagaagcaaagaagatattggtggatggggagcaatctctgccacgcctaagttaagagtccctgtgtcatcttcacaaaatgtttaactaaaatttctggatctgtcttttttgccataaaattttgtttggatttcattaactctgaggtttaaaaagttataatttaggctgggaggggtggctcacatctgtaatcccagcacttttggaggctgaggcgggcggatcatgaggtcaagagatcgagaccatcttggccaacatggtgaaaccctgtctctactaaaaatacaaaaattagctgggcatggtggtacatgcctctaatcccagctactcaggaggcagaggcaggagaatcgcttgaaccagggagtcggaggttgcagtgagctgagattgcgccactgcactccatcccggcaacagagcgagactccatctcaaaaaaaaaagttataatttaaaaaataagttatgatttatatgaaatcatttagctaaaacattcacacagaatattgtaaaaactatgaaaaaagcaagccaggtggttcatgcctataatcccagcactttgggaggttgaggtgggagggtcccttgagcccaggagttgaagaccagtctgggcaacatagcaagaccatctcatttaaaaaaaaaaaaggaaaaaagaaaaagaaaaaagctcccaactttacctggaacataaatgttctctgcttccttctttactctaaatcagtgatacaacttgagtactctaggcctacctagcttaacaacagtctacataatctaatatgaggataaaatattagagagctgcctccatgttgcttcctctcaaatatgcctagatttgaacatttttcctacttaaaaagcagcattttcatgcctgtaattccagcactttgggaggctgaggagggaggattacttggggccagaagtttgagaccagcctaagcaacacagtgagactctgtctctacaaaaaaatgttttttttttagaactagccaggcatggtggcatgtgcctgtagtcccagctactcaggaggctgaggtgggaggatcacttgagcccaggaggttgaggctgcagtgagccgtgatcatgccactgcactctagcctgggcgacagtacaagactctgtcttggaaaaaaaaccccaaaaatcagcacttacttttttaaggcaatatcaatttaagtgcatgttactcaaaaaagtacttaaatctgaatgaaaaaatttatgattcaggtttattttccctgaattggcccacatgcaaaaaaaggtagctcgaaactgttttaagctactgagaattgaccagtgaaagagatcaaatatatgcattcctaaaattttaggtactcaatactaacatatgtccttatctctattcctagtccacttgggttacaatcaagtgatctgtactgacaggatgattctgactattgtgtgtgaaactatttaaccaaaagtattccttccatcttctttcttgccactcggaagagtaaaatgtacatcaactaggctgtgtgtcccctccaccaatttttttttatcatcaccattaacaaatttgaatgtgcttttttttcttgaatcttctttccccttccctactctccttctcttccagttctggcatagttttctaggttggtaattttttcttttttaaattgagatggagtcttgctctgtcacccaggctggagtgcagtggcacgatctcagctcactgtaacctcagcctcctgggttcaagcgattctcctgcctcagcctcccctgtagctggcattacaggcacccgccaccatgcccagctaatttttgtatttttagtagagacagggtttcatcatgttggccaggctggtcttgaactcctgacctcaggtgatccactcacctcagcctcccaaagtactgggattacaggtgtgagccaccacgcctggcttctgggttgaaatttaagcaacatttgagtagttaccataggcttgaattcctggccccaagctatcctccatactcacctccaaaagtgctcggattataggtttgagccaccatgactggcctgaggaacatttgagtacttactatgtgccaggcattgtgctggatgctgtttttttttttcaattctttttttttttcccctctgcagccttgacctccctgggctcaaatgatttgcccacctcagcctcctgagtatctgggaccagaggtgcaagccaccatgcccggctaatttttttgtgtttttttgtagagacaaggtttcactatgttgcccaggctggtcttgaactcctcggctcaagcgatccacctgccttggcctcccaaagtgtgggattattcaaaggcatgagccactgcaccctgccccattcgctttttacacaaatatctcatttgatccttacatcagttttttaaggtagataatacaatttgtatgatgatgaaattaaaggtttaggtatatctttgagtttttcattttattattcccctatacttcaaacatttcatttcttactttaagtccctaaagttgctaagtgtaagataacttaaaaatacactgccattaggcctggctcagtggctcacacctgtaatccccagactttggaaggccaaggtgggtggatcacttgaggtcaggagtttgagaccagcctggccaacagggtgaaaccccatctctactaaaaatacaaaaattacccaggcatgttggctggcgcctgtaatcccagctactcaggaggctgaggcaggagaatcgcttgaacccgggaggcggaggttgcagtgggccgagatcgcgccactgcactccagcctgggcgacagagcaagactctgtctcagacaaaaaacaaacaaacaaaaagacactaccatcaaaaagaaaagtcataaagtcacatgttgctgaaatgataaagaaccaacatcatcaacatgcacatcttttgaaagcatccagaaatagccttcattagttgtgaaaaattttctcatcctccttctttggggtggggtagggggaacaagtttgaagaagaaagataaataataatgtttacttacctacttagtttttcaggattgtttattttttctaagattttcaaacataatctcttggtaaattgaaggatttctggaccgacatagaggtataactagatgtaatacaataatgttataagtaacggtgctatatttttgtgaaattaaaatttcctgacttcatttaatgggatggagtggatgacaaaaagtcatagacaaatgatattatatactaaattatcaaagcctatatataaccagggtcctacattctattattaccattattaaatttgtaagtgctcttcaaatttaaagtgttattagtattctgttatcatttaagctttagattactayaatccctttataatctattactaaactggtcaagatgctgcctaacatttaaaaaaagaccatgtatttgcatatattataatatactctaaaatccaagtattcatttctatacttaaaacatctttcttttcattcaactttatttttgttcccaggttttgcaaaccgtttttcaaaacccaaaggaccaaggaatccaccaccaacttggaatatttaataaaactccagatttataataatatgggctgcaagtacacctgcaaataaaactactagaatactgctagttaaaataagtgctctatatgcataatatcaaatatgaagatatgctaatgtgttaatagcttttaaaagaaaagcaaaatgccaataagtgccagttttgcattttcatatcatttgcattgagttgaaaactgcaaataaaagtttgtcacttgagcttatgtacagaatgctatatgagaaacacttttagaatggatttatttttcatttttgccagttatttttattttcttttacttttytacataaacataaacttcaaaaggtttgtaagatttggatctcaactaatttctacattgccagaatatactataaaaagttaaaaaaaaaacttactttgtgggttgcaatacaaactgctcttgacaatgactattccctgacagttatttttgcctaaatggagtataccttgtaaatcttcccaaatgttgtggaaaactggaatattaagaaaatgagaaattatatttattagaataaaatgtgcaaataatgacaattatttgaatgtaacaaggaattcaactgaaatcctgataagttttaaccaaagtcattaaattaccaattctagaaaagtaatcaatgaaatataatagctatcttttggtagcaaaagatataaattgtatatgtttatacaggatctttcagatcatgtgcaatttttatctaaccaatcagaaatactagtttaaaatgaatttctatatgaatatggatctgccataagaaaatmtagttcaactctaattttatgtagtaaataaattggcaggtaatygtttttacaaagaatccacctgacttcccctaatgcattaaaaatatttttatttaaataactttatttataacttttaraaacatgtagtattgtttaaacatcatttgttcttcagtatttttcatttggaagtccaatagggcaaattgaatgaagtattattatctgtctcttgtagtacaatgtatccaacagacactcaataaactttttggttgttaaactgacttcattgcagtagtgtttaggtaatacttctccagaaactagtgaaatcaaaccacagtaattttatctgctgagtatatatcattgtaatcaattacttccaaatgtctttatcaataaacaaatatactaaaagaattctaggtaaccatgagttacttagggcaccatgagtgcatctgtagacccagctactcattccttgagcccaggagttggaggccagcctggtcaacagagcgagaccttgtctcttttttttaagagtcagggtctagatctgtcacccaggccagagtgcagtggygcgaccactcctcccaccttagcctcacgagtacctgggactacaggcgcgtgtcacgacacccagataatttaaaaaatacttttgtagggacagaggctcactatgttaccaacgctgatctggaactcctggcctcatgcaatcctcccgcctcggcctcccaaagctctgggattaccggcctgagacaccgagccccgccccgcccgtctctaaataaatacttaaaagaaccccaggtaaaagctaaagcgaggatgaaattctaaatgaatttctgagcaacaactatccgtagtgagcagtgatgatttttggtgtgttctccggtaggcacacttttcaaatttatgcaatcttatccttaagatttgaaaaaaaaaaacttataaaaaatcttaaacgtggttttccatctacaatttttcgcaactgtagggatatattcaaaataaatgctggacatttccaggcattagaggggatgtggccggatggcgaggaggggccgtcctcaccaggactccaagcagttctcgcacctgacttcgtaggcctgtagttgtaaccatagcaatgccccagatgcttgaaaacatttctgaattgcggccctatcatatttttacagcaaaaccacccttattttacatattactaaatcctcttttcaccttcatttcatccctcgtcaaagttaaaaggatgaagattcttttatctcacaaaggttatgagagaaatattaaatttaaaatcactgtggagaccacctcctccgtgtaaaatgaggaagggtcacaggaagatgataatgggaacgcgccgccagactctgaaagccattaacattgtttcggccgttagggcggttggcggcaactyaccgcccagcggcggttgcgtcgcagccagaagcgtgacttcgcgcacgctccctttccactcctccactcagagccggggacgcggcgggggcgcggcggaactacagctcccatgacgctttgcgcggcatagggtgctttacaatagaagctcggttggagaggcctgcggagaaaagctgggaacggccgcttccggcatgttcatctctggacgaagaacggccgacaagtggagggcggaggagagactccaatgcccagcgggcagtgcgcgggcggcgcttgcgcgmtgcgcggacgggggggcggtcgggccatttaaatgtgtgtttgtgggtgaaatggctgcgcaggtcggagcggtgcgcgtagtacgggcggtggcggcgcaggaggagccggacaaagaggggaaggagaaacctcatgctggggtctccccgcggggagttaaacggcagcgccgatctagcagtggggggtctcaggagaagcgggggcggccgagccaggagccccctctcgctccccctcaccggcggcgtcgcagccgccaacatcctgggccgctgccgccracgaatgcagccccaactgtcccaggccctgttgagcctcttctcctgccgcctccgccgccaccttcgctggcacccgccgggcccgctgtcgctgcccctctcccggccccaagcacctcggccctcttcaccttctcgcctctgacggtgagcgcggccgggcccaagcataagggccacaaggagcggcacaagcaccatcaccaccgcggccccgatggtgatcccagctcctgcggaaccgatctcaagcacaaggacaagcaggaaaacggcgagaggactggaggggtgcctctgatcaaagcccccaagagaggtgagagcaggcaaactgcccggcttgggttctaggtctctctcagttccgatatcccgcatctttaggactgaaagacgccaaacccctgcttaccttctgctgctgtacttctctaagctcactggggtggaccctggatttcagatcgttgacacggtttgatctaactacttgaggcttctcgctccgaggccgagctgtcagttgctaatccctttaccggtcccccggagcctctcagcatttgttttcaaattctgcaaggtttccgcgccgcgttagattagtaggtggggtactaaaaaatgcctttccaaagaaaaggcatgttcctaaaatcccttctccttgttttgcttgctggagagctttagttatctgctctcccttgctccagaatagtcaggggtatggttccagtctttcaggagggaattcatataaaggttacacgactcactggttgacttagcttctgcaaggtaaaatatcagacgcagtttatcttggttctttttaatctagaggtaaaaatcattttaaagttttcatattagctatttaaattcttagaataggcatgtggaaggttttctctaccctttgatactaggaaataggaccaacagtgcctctgaaaagtgggaatttgtgcagtagatagtagaggccggaatttcagttgcatttgattctgtctagcacactttgtggatctgttaattccaatagccctcaagaatattttactagaaaatgtcagagtatccaattaaatgtggattctagaaaaattagattggccagaactgatgtcttcctgttcccaagtacctgtagcatttatttatattctttgtggaagaaatgtgatgcttttgattatgccgtatgtttgtactttatatattattttatataatttactagttgtttttcctcaggaatatttgaaatacttgtttcttagtactggaccagttaggttattacatgttaatgagacaatctttcaacctaaagttttgtgagtcttgcattctttccacgtattgagtcttaaggctaatcattttttttggtggtgctatttccgaatactgtagttcgttgcaaataattgctcaataagtatttattgaatagcattaaatttttattcatttggtggcatccaaatcttgggagtagaacttgtggcaagatgacaggactgccagttttcaccaccaatatgcaatgatcttgctctctttttatttttacttttattccctactttctcatttcttgtgtgtgtgtgtgtgtgtgtgtgtgtgtgttttaactgtacagaactagagggaattagtgatcctctggcttaaatttgtattgtagaaaaggaaactgaggcccaaagtagtaaagaggcctgttcaatcaaatcacagttaattcgcatgaagtgcaaaaaaattaaatattttttaaaaaggtgaatattggcataacaggcagtagaacccaggctcctgaatcctgcttcaagcttcatctccaggcttcatgatgttgctttctcttcctgctattcattttttccactcctttgtttaccttttccctgtgctttgacattacagtggctttatatcatcgaggatctctgacctggccccgttttatgggggatagtggcaataacatgtgtaataatttacaatctttctctgaagattgcacaggccccatgttctttaaaaaacacacttctgacctaatgctgactgatagaactttctcagatgatggaaattttctgtatttgtgctgaccaatatggtagccgtatgtggttcctgaacagacttgaaatgtggcatgattgaggaactgaaattttgattttatttaattctaattaatttataattagtcacatatggctagtggctaccacactggacaacaccactctaaatatctgtagtttgccaacatgtgaagaagagaagtgggttaagataagcccatttaaacattttaacttttggctgagagattgttggattatatacccaaactatattttgggtgaaaaagaattttttggtcaaatacatttgagaaaaactgtgtactgtagccttctacatatgtaacatgaattggcaaactggcattttaaaagttttgaaaaccctacagaaaataaactggtttaactttgtttaatccaggcttttgcacatagtttgactgatatcttttttgtcctctgaacatctttattgttacagtggtatgcaggaggcatgcctctggtattaatctgagtttaaatcatggctctaacacttactgtgtgagcctgaacaaattgctttaccctctctcaactgcacttttcctgtctataaaatggggttgtggtatttcatttataaggaacttgtgtggattaaatagggcattgtgtgaaagtacttacagcagtgcctggctcattgtaggcacttacttaaaaccggcctttattattttattatgcatggtccctaaaacaactctaagattaataaggagagtgggcagattcttgttacttacaaagctatgtccttccttcgcttatcctcatatttttggaaactattttaactgttttttttttttagataattaatgattcacaggaaattgcaaacatagtcaagtccttaccttttaccagtttccctcagtggctacatcttacataactattgtataatatcaacaccaggaaattgacattggtacaatgtatatgtagttatatgctattttatcatatgtagattagtgtaaccaccactacaatcaagatacagaactgttccaccaccacaaaccctttacagccttaggcactccctctgtctctctactgtccctgtcctctggcagccactaacctgttttgtcattttgagactattatataagttgaatcatacagtatgtgatctttggagattgccctttttcactcagtgtgatgtccctgagatccatccctctttttcattgccgaatagtgttccatggtatggatgtaccatggttcacctattgaatcattcccgtataagaaaggacattttgattatttctagtttttggctattatagatagagcttctatgaaaattggtgttcaggtttttgtgtgcatgtaacttttcatttctttggtcgtatggtaaatacaattagccctctgtatccatgggttccacatcaatggattcagccaacctgggattgaaaatattttcaaaaaaacattgtctgtactggacttgtgcagactttttttttcttgtcactgttccctaaacaatacagtataacaattatttatatagcatgtacattgtattaggtataaataatctggagatgatttaaaatataggggaggatgtgcataggttataagcaattattatgccattttatatgaaggacttgatcatcttggattttgttgccctgggaggctctggaaccaatcctccatggataccaaggatgactatatatatttattttgtttgtttgttttttaagatactgccaaagtattttctggagtgtcggtaccattttacattcctgtcagcggtgtaagagaaatccattttctccacattcttgccagtatctggtattgtcactatttttattttagcaattttaatagacgtgtggtgatacatcatcatgatcttaatttgcatttcccaaatggctagtgataatacacatcttttcatatcatcatttgctgtctatatatcctggtcagtaaaatgtctctttataccttttgcctattttctaattgaattttgtgtgtgt

SEQ ID NO: 95795 - DNA, 19927 bp, Homo sapiens
tatcatttgctgaatttggcacaaaatttcaggatacaaaattaatgtatgcaaatcagtagctctgctatatattaacagctaccaaactgagaaccaaatcaagaactcaaccccttttacaatagctgcaaaataataataataataataaaatacttaggaatatacctaaccaagtaggcgaaagacctctacaaggaaaacaacaaaacactgctgaaagaaatcatagatgactcaaacaaatggaaacacatcccatgctcatgaatgggtagaatcagcatcgtgaaaaaattgtagactgcaaaaagcgatctacaaattaaatgcaattctcatcaaaataccaccattattgttcacagaactagagaaaacaatcctaaaattcatatgaaatcaaacaagagcctgcatagccaaagtaatactaagcaaaaagaacaaatcaaaggtatgaataccaggaggcagagatcaatggtgccaccttagaggctgcctatcataccattattgtcagcctctggagcacctggttgaatggcatctatgtaacctctcccaccaagataattggcagacagcatagtaagtagaaaatggaaatgagattttactaaacccttctccttcctcacttcgaaggccttctgggaaagacagcaaagttgagctcatataaaccaaaagctctggccccagctctacctgcatggtggggggaatggcccattcttccttacttctgacaactggctcttcaaatacacttcaaatacctgggaacctattcatatccatcctctgaatgggaagaaaattgcttctccttggcaaacagctttggcctgggcaatggtcccaatctgtcattagtatgagaaactttccagtattttcatttttgtggtcactgttctcttctatttccttttatgtattagttcataagcactatgtttcaaaaggactaagacattctagagtccttgattgttcactcatctttccattcattttttaaataaacatttattaagttcctttatatgtcagatgttatgaaaattctcatggtaataaaaagatgtacgagacatagacattttatttagtcaaacactcaacaatgtttcaacatctactctgtacacggtgctaaggatcaataaaggagtagtccagttttaagacaacacaacaaaaacaaactctcaactccactggctgtaacacctttctactgagatcttcatggcacaaattattgatgaacaggtatttttttttagtggtcactctcttcactttttccttctactcctcaacgcacagatgaattgtgggttgtactttccagttgaactttcaacccaaatattcgaggaaattgctcttaccaaattacttaggatgttgccaaaaccaatggtcaattctcttcctattgtatttgatgcaccagcagcatccatcatagtggaccacgctcctcttgaaacactttctccagttgacttttacaatgccatcccctcctaattttcctcctgccaccaacttctactcagtatctttagctggcccctcctcctcttttcaacctctaaatgttgatatatctattccaggattcagtctggaaacttttccttttatccatgaatattattaccctagcttatttcatctagtcctgtgcctttaaaaattattatatgcttctcacatacaaattgacctctctaggactagcacagggggtgtaattatcctaaagtaacccagaattttaataagctggccaagaagagggattttcctttttccagcatgagggactgtgcctaatatagctccctgtagaatgggtgtcttctcccctaagaaaagggaaactctttgcatgagtcccaaggactctaggtgctgggtagttgattttcgcagacaatcttgtgaatagctggcacctaaatccagactgtttcacgccaacagcctgtattcctcccttgaggatcctgtgtccttgtgcttacatcataaaaagttataataagggatgtaagcctgtgtccttgtgcttacatcataaaaagttataataagggagattagtgttcctacactggaatgaatactcacattgttagcccagcaatttcctaacaatttatgcatcagcataagataggaggatggggaaatcatgctgcctattcttttgctgatcagtaatctttgtgagttttcctaatacagcatattatttaacccgtgatcatcatattgagaaattctttacaaactctgatgccaataggtggtaactcagatgagtatcactttacacagcatgctgaccttctctgagcatgtggaggacaatttcattgtctcaggattgcatgtatgaaagactatcattttttccattgaacttgcttttgtcaaaatcaattggtcgtacgaatttaggccattaactcacacataagcaaaaattctctcaacatggattataggcctaaatgtaagggctaaactatacacttcttgaagaaatcagagattaatacatacatgacactggattaggcaaaagcccaaattttcctggtagaaggaaaaaagtcgaaaaatgagacatgatcaaaactaaaaatgtttacatgttaaaagacatcaataagaaaatgaaaagataagccacagactggaggaaaaaaatttaaatcatatatttgataaaggactcatatccagaatgtaaaatgcactcacaactaaacaacaaaaagaaaaataacccaattttaaaatgagcaagatatttgaataatcatttcaccaaaaaggtgtaggaatggccaataaagtacagaaaagatggtgagcatcatcagtcagcagggaaatacaaatcaaaactacaatgtgacaccacttcttacccactagaatgctatactaaaaataaaacaataacaattggaggaagtgaaagcacaatgatgtgggaaaattgaaatactcatgcattgttgatgggacaggcagccatgttcaaaaacattttggctgttccttaaaacattaaagatgcacttaccatatgacctagcagttttactcctgtcaaccctaaagaaataaaaatgtatgtctacacaatacatgaatgtgaatattcatagcagctttatccataatgcactttgggaggccaaggtgggcagatcatgaggtcaagagatcgagaccatcctggccaacatggtgagaccttgtctctcctaaaaatacaaaaattagctgggcatggtggcgtgcacctgtagtcccagctactcgggaggctgaggcaggagaatcgcttgaacccaggaggcggaggttgcagtgagccgggattatgctactgcactccagcctggtgacagagtgacactccatctcaaaaaaaaaaaaaaaaaaaagggggaaacacataaatatctatcaactgataaatgaataaactaatggcagccatccatacaatttaatagaatttgccacctaaaaggaatgaaatattgatacatgctacaacatagatgaaacacataagtatattaagctatgtgaaagaaggcagatgcaaaagaccacatattacatgattctagttatatggtgtccagaaaatcaaatctgtggagtcaggaagtcatgagggctgcctagagctgggggctgggaataagaggtggcaaatgataagcatgagggatttcttaggaaaaatagaaatgttccaaaacaggattgtgatgatggttacacaagtctaaaattttactaaaaataattgaactgtacacttaaaatgggaatgttataatatgtcaattatacttcagtaaagctgtttaaaaacagaaagttggtagtgtggcccccagcagccttgctctttgtcctactgctcactttcctaaagaaagcaaaatatttattggtttaaagaaagcttacagttattgcttccactcagactccaagagacactgcctgaactctaagagcctccagaactctcaacagctgaaggaacatttggtcccaccctgaaggtcatgggggtctgtaaggtgcactccagcatctgatatggcaggcaaaggtgtgtgatgcacctgggtggtttcagatagtgctccacaagtcccagggcccgtgtctagttctgagagcttcagaagacaagctgctacaccttgcatcacaggaccaacctttcctaggcaagtgggtttgaagcattggcagccaggttccaagtagaaggtgaatgtctacaacacaggagaaaggcaagacccagaatggggagtcaagctaaatcatttgtagagtatgacttccaacaacttcagaaagcattcttttgaagtgcttatggcatttccaccaacatagaccataggctggaccataaaacaaatctcaatatatatcaaagaatcaaaatcatacagagtatatgctctggccacaataatatttaattagaaatacataacaataagaaaatccccagttttagaaaacatgcaacatgcttctcaataacacttgggtcaaagaagacatcacaagaaaaaattcaaaacgtcagtaactgaataatgataacccaatgcatcaaaatgttggatacagctaacatagtgtttagagagaaatttacaactttaaatgcctatggtggaaatgagcaaagaagtaaagtcaattatctacgcttttatcataagaaccctgaaaaagaagagtaaaataaacccaaagttaataaacatttaagccaataataaaaataatgaaaatcatgaaatagaaaaatgaacaaacaatagagacaatcagtggtcaatttttctgtactccatgaacaaaacttcagttcagaatgattttatatttaaatatatatccagaatcacaaagatcttagaagaaaaaattaggaaaatataggaataaagtgggaactctgtgggaataaaaatcagaaagtaattgcctaccaggtaaactcgggggagggcaggcaattgactaagaacaggcagataaaactttctggagtgaaggaaatggtggtcttcttttcgttggtacttacatggacatatataactgtcaaggttcattgacaatgaacacttaagtgtacactgaacgcttaagatctgggccttgtaatgcccagattacatctacttaaaaaaactacatctctatttttttaagtagagaaaagtgtcttggggagtttatggcagtgatgtttgggcagactggggcataggtttcagaagcattcatagcatcttcagttcaacaatttgctaagaatggttttgcagccaaaaatgtaagatgagtgcaaatatctatgattagagtcattgggcatacaactacaaatccccacacttgtattacaggccatatgattaattcgttatcactagatacctttccttcaatgaggttcttccattaggaacccagagctctccagggaaaaattgcaattgaggttttggatatattgggtggaaaagaaagtcacctcacataaaacttagtgattggagctrtcaccattgaaaatttctaaactttgcaagacagcagtgacgtttcaaatgacactctcagagagttgataatgggctaaaatagatctccctccaggtggatttactgtacaaggacaacatttacattgcacttggagacttctcccagtttggtttaagttcacagattgcagatcccagacagctggtatcaactgaccagtgttctgttaaggctaaagccaagactctttatcacactgtggccttaagattggatttctcttcctgttcctgggaagaattagagatataacctaaaggtcactattattytgagaaaagggattctggaggaggagggagcaatgagtatgtggcaggagttcaaggtaataagggctgagacacaagccacagagcataaagctccagtccttcctccagggatgaggcagtaaggacttggactcctctgtccagcttttaacaatctaagttacggttagagctttctccttttctttcaactactcctggcagttgtggggtcatggaattbttgtaaaaaatggggtggaggaaaataaggcatctgctgagtgtataaccattttacctcttgtttttagccctcttctgggtcacgctagaatcagatctgctctccagcatcttctgtttcctggyaagtgtttcctgctactttggattggccacgatgggctggagctgcyttgtgacaggaghaggagggcttctggrtcagaggatcgtccgcctgttggtggaagagaaggaactgaaggagatcagggccttggacaaggccttcagaccagaattgagagaggaattttctagtaagtaaacttgagtcatgggtctgtggctccatcttaaactctgcatgggtgtggggaggttgaccttgtctagcaagttaaggaaagttgtagccaaatgaaagccagtcacacatctaaagtcatcagaaaggaaatagaataaaatggtatagtgtgaaagatactggatggggtgtccagagactggattctggccctgacgcagaacttgagaggcagccatgtcagcctcaaggccccttttcttctcttctagagagtcacacatgagttctccttcttgtctacaactcttatgttctgaagctttttgtcttggcgattgctgtgcgacattcacaaaggacatcatttacctggagacctcaccagtgggtcctgcctgtctagactgccccaggcttcatttcattttatagcttccttagtatctttagtgagggcaaaataaaaggaagtgaaggtacggatgtgtgtgtaattgtgtgtgtgtgtcagacagagaaagaaaatgagggggaaagaaggtcagagacagagaatgagaaagacagagaatgaatgagaaagatagtgtgagggagagcatcagcaagagagagagagtgaaagtgagagagatcatcagtgagagagagagaaagagagaaagagagcatgcacaagtrcacrgcacagagcagagacagagtaaaaggcagtatgaggccaacatgcctcatttatatttctcatatatagcctttttwaaaaaaaaccatttgtatctgttgttcaatactccaaataaattgactgcagaatttgctgtagtaactctttgtgcaaataaccctgtgaggaaggtagaaaaggggtcacctccaactggacaatgaacccatcaagttccagaaacataaagttacttgccaagaacagctgattaatgtgtagcagagctcagaccagagcttcattccagaagcttcatcacttgacccccgggctaatccttggtgggtcttcagtctctccctttgcctctctgtgtgccccaaaccaattccatgttttcctcccaacccaggggactgggggaactatgtatcttcttcatgcaggttctggctgcctagaaggtcctgccctgttcacacagaagctccccttgacactctcctcttctttcactcttctctgacctctttaaatgtccaatttcctccactctctgttctaatagtgaacagatattaacacatgactgatattaaatgtttgtaatccttatgtctcagcaatatttacaatctaacatctgataccaggaaaaagcaatgctcagtctagaggaagagttctgctatggtgaaaatgcagggagcataatggatgggcagggcctgtatgaagataaaaacagagaatcctttcagtgttctttctgtgccaggcactgtgctaaaggttttgcatgtgctgactcatttacttcccataacaaccctatgagatgggtaatactattatcctccttttttatagatgaggagacagacacagagaggttaatcaacttgtcgaaggtcccaagttagattacggcaaagctggatttgaatccaggcagtctagtgcagcttctgtgctcttaagtagtagtttgtctagcagcttctctgagcctccctccagcccaacacacaacacaaaagcaactgaatttagtctacatgaaacacttgccaagtccacagtgccttggagaaggagggagctaagactccatcaaaaattgcgcttttctggtctctctagatccatggaaactcaccrgggaagagtcattttctatcggctttggacttctgctatgaaatggcaattcctttgagccagtctgtctaaagtcggcagcaaaggagaagcagatgaagggagtagaaaaggtagaggtggaaatacaaccagagaaaattccactctcgggctgacacccacctcctccccagcagcctcttccctgcctccaccattccagggccttcttggagttgcctgacagtgggaaggggctgggagtagacaaaacaaggcagaggcatcagragagcaaatggtccyrcctgtawcccaggaaggaatttctccagccttgaatttttcattctgaatttcgctctcactgttctttggcctttgtkggcattttcagttaaactggcttattcttactctttctcagaaaagttgattctaaacagctattcctgcacctggggtacagggtacaaaaatggcaggtggaatgggcaggtttgagccttcactagaaaattgactttagatctgtcccttaacctctctgagcctcagtttcctcaccaataaagtgggactcagaatacctacctcacgagatagctgtaaaaggaaataagcaagctgtgagccgtatgcagattataaagcacaaatgagtgtagagtatttatctgagctccatgtagcatggtgttcattttgtgggctaattccaggtgacaactttaccggcagcgtcactacctgtggatttcagaggagcctgaagatatggatgttacatccgctgcccttggctagacattagacagctgagatgttagttcattggtggctaactcattttcagcattgctatctgctttttatgatatctgataaaagtttctcaatgaaattaatcatttaagcccatctgcaattcctgagtaatggctccactctcctcccagttgcccaagcaggaaactgtaagggtgattttgtctccttttcctctcatcccagctccagtaggtaccaggaccttcaaggtgaggtctgaaattcaaacctggagtgcatctctcccctcctctgcttccastgctggaccctggttccagtcctcatctaaactttggcacagacattctgattaatctcttgatcacctggctttctcatttcccctataccagtctgttttatatcctcaagccaaggtaaacttcctacgccacaactctgcgtctgtttatcttttattattattactattattattattattattattattattattttgagacagggtctttctctgccactgaggctagcatgcagtggcatgatctcaattcactgcaacctccacctcccagactccatccwtcctcctgcttcaggtttgtgattagctgggactataggcacataccatcacgcccagctaatttttgtaattttagtaaagacagggttttgccatgttttccagccagacctccacctccagaaatcaagtgattcaccacctcagagtcccaaagagctggaattacaggaatgagccactgcacccggcctgtttctctacttattccaacataaataagggtttttctttgacatggtgctggagacccaaaatcataattctatacatgattcctcatcgcctacagaattaaattcaaactttccctcttatacccaactctccacaatcactctattctccataaaaaatttggtgagtctcccatgactctagcaatgcttatatttcacggatgtgtgacaattcactgctcacattacttttctggaataagatggggtagaaacagatgtttgctctttcccaataaactgctacacatgctgatttctgtgcttttgtttacttgttccttttatggaatgtagtacaccctccactctaatacccacactctaatctctttgagcacctatgtaacatcgcctttatcagaaaacttcccagccagatccagaaatctttccaatgacctgacctgtgttcacacagagctccagaacaggaccaagctgactgtacttgaaggagacattctggatgagccattcctgaaaagagcctgccaggacgtctcggtcgtcatccacaccrcctgtatcattgatgtctttggtgtcactcacagasagtccatcatgaatgtcartgtgaaaggtacagtagcctggggaggagataaaacaagttggttaaatgaggatcagaaagaaggacaagaaagggaagagaagtcactccattgaacacctgctgagctcttggccaagtgcctttgctgatcactactgactggggagttcaaggctggtaacctcagttttttagatgagaaaactagggctgagagacagcaagtaacttgtccaaggccccaaaagtaagtaagtaagtaggagagttagactttaaactcactcctgtgtgactccaaaggctgtggaagctctttctactgtggccccaatcaaaagtcaactaaactccaacttcaaattcacgatatccagctactccttggctccccgggccagaatcagaccttccaggtgccaccatagtcatcattttgaaccttgtgtgtaggctgatgagaacattcagagtcttcctgcccacctcaaagaagtcctctcaagagaactagcaaagctggttcacagaggtctgtcaggacagaattatccagcacatgccttcccataatattttcttaacaaaaagagtttcccagtgtccagaatacaatctcttcagctcaccacagggtctactattacagagccatttcctgccaggtgcccaaagtgcaccctcatttgatccacattttttaaaggaatcttgccatgcagtctcaccctctgattcccagagcccagtctcttcaaaacacagctccccactgctggcctgaccctccacattcagactacccaaactccttttataaagcaactaattgcttttgagtctccagcactgtctaaaaaaacaaacaaaaaaaaaacctttccagtttctacatagccatacccctaagtaccgctatagttcaaggagtgtgctaagagtgaatagttttttgttttaattttgactttccacagctcccaaaaacaagggataagaaatgacaaggggagtgttagaggcgtctgtttcttaaaaccattatcactcccgggcttagaaaatacttcacaatgatggccatttcatgaggctgtctctccagaaactcaaattgcacagagactttaaaagtggctaagaatacaaaataagtaaataaaaatgatcctttgcctaggaaattccttccttcttcragggaagacactccagatacctccatgagctttgcttccacacagctcaggtgatgctgacaggtcttcccagygcaggtgttatcagcagagggcacactccctccccagtcctccaccaggctccacaggaaatgccagggcaggatttaaaggaaggtttatcacccccactttatataactgggtaacagagtcatagccagaattggaagcagcttttccagggaacacacaatcaggaaaggagtgtgggtttccagcatctccccacaacccactgtttgctcgatgactccagggatggtctttgtgacaaagttttattaatccattgcaaaatgagaaaaataccagcaattctatgtatatctaagagtgtatattgcctatattcaactgtgaatttgtgygtgtaacacaaattcttccactgccctttcttgcctaaggactgattgggactgttcatattctcagagtatagcctcctgattttttagattttaaatgatctgtctttaattgtattgatgacaaatcatactttttcaatatccttacttggcaaaaaataaagtgattaccctaggtccttttccaaaattaaagtgtgtgtgtatatatatatatgtatatatatatgtatatatatatatgtatatatatatgtatatatatatattttataatatatatatatatacacacacgtatacatacacacacacacacacacaccacacacaaacataggtccatgaaacccaaaagtctagaaattcttgctttctagaacccaaatgtcagtttctttttatttttgtgtttttcctacggctgtatcatgacccaatctcagtcagagccacagaagaatgcaccctgagtctgttataaccactgcacttgggagtggggagtggggcacatggatctgtgcatgtggttgcagctcctttgggatatttcctgacactgtcatcatgctcttcgtgggcaggtacccagctactgtkggaggcctgtgtccaagccagtgtgccagtcttcatctacaccagtagcatagaggtagccrggcccaactcctacaagkaaatcatccagaacggccacraagaagagcctctggaaaacacatggcccactccataccygtacagcaaaaagcttgctgagaaggctgtgctggcrgctaatgggtrgaatckaaaaaatggtgataccttgtacacttgtgcrttaagacycacatatatctatggggaaggaggcccattcctttctgccagtataaatgaggcccygaacaacaatgggatcctgtcaagtgttggaaagttctctacagtcaacmmagtctatgttggcaacgtggcctgggcccacattctggcctygagggctctgcgggaccccaagaagsccccaagtgtcygaggtcaattcwatkacatctcagatgacabrcctcaccaaagctatgataaccttaattacatcctgagcaaagagtttggcctccgccttgattccagatggagccttcctttaaccctgatgtactggattgkcttcctgctggaagtagtgagcttcctactcagcccaatttastcctatcaaccccccttcaaccgccacacagtcacattatcaaatagtgtgttcaccttctcttacaagaaggctcagcgagatctggcgtataagccactctacagctgggaggaagccaagcagaaaaccgtggagtgggttggttcccttgtggaccggcacaaggagaccctgaagtccaagactcagtgatttaaggatgacagagatgtgcatgtgggtattgttaggaaatgtcatcaaactccacccacctggcttcatacagaaggcaacaggggcacaagsccaggtcctgctgcctctctttcacacaatgcccaacttactgtcttcttcatgtcatcaaaatctgcacagtcactggcccaaccagaactttctgtcctaatcatacaccagaagacaaacaatatgatttgctgttaccaaatctcagtrgctgattctgaacaattgtggtctctyttaacttgaggttctcttttgactaatagagctccatttcccctsttaaatgagaaagcatttcttttctctttaatctcctattccttcacacagttcaacataaagagcaataaatgttttaatgcttaacatggagagaagcatggtttctgttaatacatactttcatccttttcctttcatttccaactatcaccatctccaacttagaagagtagcatgaaaccagggttggggggtgggcagagtagtaggaggtacagaaagggcagatgaatactgaataagctctactatgttttaggcatgtatgaaatgaactacatatgacatatattatctcatttaatactcatcagaaacctgtcaattgaggaaaatgacaagacacgtctcaatcattttaggagattcacttgaagatgtgcccaggagacaggcctatgcctttctccaaagatgattttgagggctccaattcaaaggagggaaagagagggatattgagaagcacacagtttttatgtaacgggatggtaggaaaaaaatagtcattcatgcctttgtctggctcagtgaatctgcattttttacataagatgacataaacagtaggggcagagggaaatgcagattccctgcattttacataaaataacagacaaaatggggtaggggaaaaatcagataggcatttgtgtctggggtaactgcaccggtagtgataagctatcaatttgcattgccgtggtgaagttttaacagctcactaggaaattccttgtgggcaaaatatgggggaggcatgtagcttttcatcttgtagccatcttgtttaggcaccaaaaggggggaggcaggtttgcctgacccagttcccagcttgatttttccctttggctaaatgagattggggccccataatttaatttttttcacgttttccccctttttttctctaaactcttttgaagtactgcattttgaaagaaatatgcattcctggcctctggttgctttttctttttttttttttttgctggtttctcatggctaggatggtttattcctagaagttcaggtcccacatcactaggaaggctcattcctgggaggttatgtctcaccttgctaggaaggcttattcctaggaaatcttgtcccatgaagaaaaaaaaaaaatggaggggtggggtggaagaagggaaaatgagaggaaaccagaaagagagagagagagagagaaaagaaaatatatagggacctaggccagatttatagcaacaaaaggaaagcaaacctggaagctgggtgagggtatattactgcctcctcaattagagcaattctttgggccttttagttgcacgttgacttacatgcaagcacataccataacaacattgtaagcaaaaacaggatggaacacaaattattactattattcctattataaacaatagtttctaccaccatgttccccaggatccaagccaaccactcaaccaatcgattagtgagggttttggatctgacaggttggttatctgggttttcatagcagtcatatgttgcattatgttctttgattcatctggaacatacacacaacatttagttttatgatggcacaggtcccctcttgtgctgtcatgagtatctaaagccatatgattttgcagcacagctttcctcataagcataacctcattgtttagcaaggggatactcatgcggctatcattcagggccttttgggtgtaattcgttaaggcctctatatgccatataacatcttcaatacctatctgtggtacaaagattgaagctaaatgatcatgccattggaatactgaacacatccaataagagtgtaaatgaaaaaggtttgctggttttggcagggtctgaattacttgtccttgtgcccaagcataacctagggaacatcatcctaaccaccttggaggtaaccatggccataaggtagtgccacatagccaatatgtcccatttggagctagccaataaatatctggttgctgcacccaattgttggcatgccagtcagtgtcttataatatgataatgtggtctcaatgttctccaggtatccaccccacatctctcatactgttttgctaagttggccaaagaatgggtgagccagataaatccatcccaaatttgtattattccattctgaaaatgggtcattgtttgaggcatggttaccaccttctcttttacttggggagatgctaaagtgagagcaaatgagctggtcttttccattgaaaaacttttgctatgtcccttgttcttaagagtgtttttaatgggccaactatatatattgtcttttgttatgccagcactaagaataccagaccgtttctgtgatgtaatacatttttggtattctatccagtcctgaccttggaagaaggatactcaccatggcaggccacagccactggagataggcatgagcccacatatccagcaggtgtccttttgtaatctgtctgcataatcctgagcctattgcagaaacagatttgtttcatgggcatcagtggcaagaagatgtagggatatataattaataatagcaaggttgtgaaattcattttagttactaacagatgttaaattagacaaagcaagtgccctgttctgtataagacagcagttgccagtatatctaggacaatcattgtaatggttattgtacaatgaacatagacatttctttgtatacaggcctggtcctgtatcttgggtttaagcagtccacaatagcatagctgtcatctgcttctaatcctgggttaaaagtcgatgtttagtgaacttgaggtgaaggtctttggtggaagttacagccagctcaggagattgtgactttttaagatgagtgatgtgaatccaagagtctataccctctaattctgtggcacatggattagtcaatagtgcccggtatgggcccttccatcggggttgaagggaattctttattagatgtcttttccaatagacaaaatttctgggctgcagattgtgaccaggtgccttatcttcagggagcacactatgaaaggaatttcttaccaaatcttgacttttttaaggtgataaaaaaagtcgctcacaatattgcaatatatctcccttgagaaaagttggatttgttatgtttgttcccatatacatgggccttcccactataatttcataaggggacaattgatgttttccaaaaggggttgatcagagtgtaagcagcactagggtgagtgcttcgaatgaggggagggaaaatgcctctgtgaacttagccaattgtgttttaattattccattggttctctccaccaggcctgaggattggggatggtaggcacaatggaaatgctgagatatgggccaaatttttcaaatattttgaataacctggccagtaaagtgagttcccctgtcattgtgaagttcacaggggactccccacagtgggatacttttttctagtaggatttttccaaccgccatagctgttgcttgcctacagggaaaaggttcaacccaatgggaaaacatgtagactattactaaaacatacctgtaaacttgagatgatggcagctggataaaatcaaggtgccatacttcaagaggtccaatcagaaaggaaaaatgaccctgggccccatggaggggctttcgtgggttatatttgggacaaataacataacaagagtaaactttttgtgccactgtgaaggatggtttccagtaatactgttaacaccaggatattactttatctggattccaatggcttagattatgaacatattccacaaggggcacctgacatccaattagaataacaggtttattattaggtccacttcatatttcagttttgggagccaagtatttccctgcctgtttccaagtagatttcccttttgtaggagctctgggtttctttcaacatgtttctaagtgtttttgggttttatggccatttcttgtactggggctggtggcttggatgctgctcttttagctgtagtgtcagccagytggttacctgactttctatggtgtctaattttgagtgacctgggatttttataattgccaaacgttttggtttcaaaatagcttctaacagctctcataattggtgtccattttttatggattttcctgaggaggttaaatatcctgtctctttccatagcatcccaaagtcatgagcaacccaaaagcatagtggctctcagtgtaaatggcaaaagccttgtcttttgacaattgacaagcttggatcaggaaaatcaattcggccacttgagctgatctggcttggggaagaagactggctttagttacctctggtacagaaaccacagcatatcctgctctaaaatttccttcctctcctcttaaataacacccatctgtgtatgattctatctcagtattatccagtggcgtctcttataggtctgtcctgggggtgagaagttggtcagtcatcagaacatagtcatgaggggtttccttggtagggcctgtcaagggagtggctgcattaagattattacagcgggaaatagtaatattgggaaatgataaaagcaaaatttcataagaggctaacaagttgacagatgctgagtatgatgagagtttagaagggtcttaagagaatgtggcacaaaaatggtaaggggggaacccataattatttcttcaacagacttgtacagaagggccatggctactattgctctcacacaggaggcagcccttaacccacagggtccaggtgttggctatagtaggctataggtctccgatgatcaccatgtttctggatcagtatcctgcatgcagtacctccagtttcatgcacaaaaagggagaaagccaatagtttgagtgtcctaatgctgaggcattagttagaatttcctttatttgttgtacagctgcttgtccctctgaagtccacatgatgggatcaggttgttcattttttaggtatgaatacagaggttgagccataagggagaaaattggtatccagtttctacaacagcctggcaggcccaaaaatcctctatgttgtttcatagtgatgggcattgggaaagctgaaattcctctcactctgtcagggtgaatactcagtcctctgactgagataatatgccccaaacacttaacttgtggtaagcatacctgaaatttgtctttggacacgatgtgtcctttggtggctgtttgagtaaatacagactatcttcctgggaggaagatagtgtgcctgaacaaaggagaaagtcttccatgtactggatgaatgttgagccctggggaaaaattaaatcctctaaatcagcttttaatatttgggaaaagtaagtgagactttctgtatacgcttcgggcattacagtccacatatattgccattctttccaagtaaaggcaaacaaatactggctgtctggatctacgggaatactaaaaaagggcaccgcagaaatccacaactgagaaatactggctggtagtggctatggctgatagaagggtaagtggtgtggggactacttagtgcctgggtattacaatattgttaattgctctcaagtcatgcacaaatcttcatcctctcccgcttggattttttacaggaaatatagggctgttgcaggggcttatgcagggaataatgagcctttttttttttcagataatcttgtataataggggcaattctgtctatggcttcctgtcatagaggttattgtttaaagttgggtaagggtttctttgggtttctaaataaggtgagatttaccagagaaatagtcgtgcctgtgtcaaggcagttttaacctcatagtttattattatattaatctctcccaatttgtttgtcagggtagaatacttaaagaggtgaaacccctatatttcctcagagaatccctagtcttcccgagttgcattctctggccttttcttttgcttcggcctaaggcaatccctcttgaggtgtcccagtcttttacagtagtaacagactgggaggaaagagttctc

SEQ ID NO: 95796 - DNA, 19832 bp, Homo sapiens
  misc_feature (1)...(19832): n = A,T,C or G
taccattccttctgaaactattccaatcaatagaaaaagagggaatcctccctaactcattttatgaggtcagcatcatcctgataccaaagctgggaagagacacaaccaaaaaagagaattttagaccaatatccttgatgaacattaatgcaaaaatcctcaataaaatactggcaaaccgaatccagcagcacataaaaaagcttacccaccatgatcaagtgggcttcatccctgagatgcaaggctggttcaacatacgctaaatcaataaatgtaatccaacgtataaaaagaaccaaagacaaaaaccaaatgattatctcaatagatgcagaaaaggcctttgacaaaattcaacaactcttcatgctaaaaactctcaataaattaggtattgatgggacgtatctcaaaataataagagttatctatgacaaacccacagccaatatcatactgaatgggcaaaaactggaagcattccctttgaaaactggcacaggacagggatgccctctctcaccactcctattcaacatagtgttggaagtgctggccagggcaattaagcaggagaaggaaataaagggtattcaaatagaaaaagaggaggtctaattgtccctttttgcaggtgacatgattgtatatctagaaaaccccatcgtctcagcccaaaatctccttaagctgataagcaacttcagcaaagtctcaggatacaaaatcaatgtgcaaaaatcacaagcattcctaaacaccaataacagacaaacagagagccaaatcatgagtgaactcccattcacaatttcttcaaagagaataaaatacctaggaatccaacttacaagggatgtgaaggacctcctcaaggagaactacaaaccactgctcaatgaaataaaagaggatacaaacaaatggaataacattccatgctcatgggtaggaagaatcaatgtcttgaaaatggccatactgcccaaggtaatttatagattcaatgccatccccatcaagctaccaatgacttttttcacagaattggaaaaaactactttaaagttcatatggaaacaaaaaagagcctgcatcgccaagtcaatcctaagccaaaagaacacagccagaggcaacacgctacctgacttcaaactatactaaaaggctacagtaaccaaaacagcatggtactggtaccaaaacagagatatagatcaatggaacagaacagagacctcagaaataatgccacatatctacaactatctgatctttgacaaacctgacaaaaacaagaaatggggaaaggattccctatttaataaatggtgctgggaaaactggctagccatgtgtagaaagctgaaactggattccttccttacaccttatatgaaaattaattcaagatgggttaaagacttacatgttagacctaaaaccataaaaaccctagaagaaaacttaggcaataccattcaggacataggcatgggcaaggacttcatgtctaaaacaccaaaagcaatggcaacaaaagccagaattgacaaatgggatctactgaaactaaagagcttctgcacagcaggagaaactaccatcagagtgaacaggcaacctacaaaatgggagaaaattttcacaacctcctcatctgacaaagggctaatatccagaatctacaatgaacccagacaaatttacaagaaaaaaacaaacaaccccataaaaaagtgggcaaaggatatgaacagacacttctcaaaagaagacatttatgcagccaaaaaacacatgaaaaaatgctcatcatcactggccatcagagaaatgcaaatcaaaagcacaatgagacaccatctcacaccagttagaatggcaatcattaaaaagtcaggaaacaacaagtgctggagaggatgtggagaaataggaacaattttacaatgttggtgggactgtaaactagttcaaccattgtggaagtcagtgtggtgatttctcagggatctagaactggaaataccatttgacccagccatcccattactgggtatatacccaaaggattataaatcatgctgctataaagacacatgcacacgtatgtttattgtggcactattcacaatagcaaagacttggaaccaacccaaatgtccaacaatgatagactggattaagaaaatgtggcacatatacgccatggaatactatgcagccataaaaaatgatgagttcatgtcctttgtagggacgtggatgaagctggaaaccatcattctcagcaaactattgcaaggacaaaaaaccaaacaccgcatgttctcactcataggtgggaattgaacaatgagaacacatggacacaggaaggggaacatcacactccggggacagttgtggggtggggggaggggggagggatagcatttggagatatacctaatgctaaatgccgaattaatgggtgtagcacatcaacatggcacatgtacctgcacattgtgtacatgtaccctaaaacttaaagtataataataataaaataaataaataaataaataaataaacaattgaaagaagtgaaaaacaatgatgtgaaaaattgaactactcatgcagtgttgatgggacatgcagccacattggaaaacagattgccagttccttaaaatgttaaatatacatttaccttatgatctagcactttcactcctagctgtctaccccaaagaaacagaaacctatgtccacacaacacatgaatgtgaatattcatagcagctttatccataatagtccataaagtggaaacacatcaaatatcgatcaattgatgaatgaataaacaaatgggagccatccatacaatttaatagggtttggcacctaaaaggagtaaaatattgatacgtgctacaacatagatgaaccacaaaagaacattaagctggccaggtgtggtgactcacacctgtaatcccagcactttgggaggccaaggtgggtggatcatttggggtcaaaagtttagatcagcctggccaacatgatgaaatcccgcctctactaaaaatacaaaaattacccaggcatggtggcaggtgcctggaggctgaggcaggagaatcacttgaacccggaagtggaggttgaagtgagccaacatcgcaccactgcactccagcctgggcaacagagcaagactctgtctcaaaaaaaaaaaaaagtatattaagctaagtgaaagaatagaaatacaaagaccaaatattctatgattccatttatataatgtctagaaaaggcaaatctgtaaagtcagtgagtcaattaaaggttgccttgagctgtgagtaagagtaaggaatggtgactgatgagcacgagggatttcttaggaatgatagaaatgttggaaaacaggattacagtgatggtccacacaagtataaaattttactaaaaataattgaactgtacacttaaaacaagcaaatgtgatgtcaattatacctcagtaaacctatttaaaaataaaagaaagttggtagtatggttcccaatcactctggacctttgttttatttctccctttctttagggcttatatttattgcttccactcagagactccaagacacatgagctgaaatctacgagcctccagaacgttcaacagctgaaagaaagtccagccccacactgaaggcgatgggggatctttaaggtgctctccagcactgctacagcaggcaaaggcatgcgatgcacctgggtagtttcagatagtactccacaagtctcagcaagacccagggcctgtaaatagttctgatagtttcagagaacaagctgctacatcttgtagcacaaggccaacctttcctaggcaagtggttttgaagcattggtagtgaggtccaaagtagaagatgaatgtctacaacatggaggagggcaagacccagagtggggtgtcaaactaaatcatttgtagagtattactttcaacaactgcagaaagcattcttttcaagtgcttatggcatgttcaccaatgtagaccatatgctggaccataaaacaaatctcactaaatattcaagaatcaaaatcatacagtgcatatgctctggccacagtagtatttaattagaaatccataacaatgagatatctagaaaatcctcacttttagaaaacaagcaacacacttctgaataacacttgggtcagagaagaaaccacaagacaaaactttaaatattattaactgaatgatgataacccaatacatcaaaatgttgggtacagctcacacagtgcttaaagagaaatttacaacttttaatgcctatagtggaaataggaaaggagtaaagaaaaacaattttctatgcttttattatcaggatcctgaaaaacggggctgggtgcagtggctcacgcctgtaatcccagcactttgggaggctgaggcgtgcagatcacaaagtcaggagtttgataccagctggtcaacatgatgaaaccccacctctactgaaaatacaaaaattagcccggtgcagtggcgggcacctgtaatcccagctacttcggaggctgaggtgggagaattgcttgaacccgggaggcagaggttgcagtgagctgagatggtgcccctgcacttcagcctgggtgacagagcaagactccatctcaaaaaaaaaaaaaaaaaatgtgaaaaacgagtgaaaaaaaaaaacaaaattaataaatgtaagccaataataaaaataatgaaaatcatgaaatagaaaaataaacaacagagacaatcaacggtcaatttttctgtactccctgcacaaaacttcatttcaaaataattttatatttaaatatatatccagaaccacagagatcttagaagaaaaaattagagaaatatagaaataaaatgagaactgtgggaataaaaatcaggaagtagttgcctatgaggtagattgggggaaggtcagggaattaacagggaacaggcagaaaacaactttctggagtgacggaaatggtctatatcttttttggggtgctacttacatgggcatatataactgtcaagttccactgaactgaacactgaagacctgggcattttaatgcatgtaaattatatttcaatttttttgagtaaagtgtcttgggaagcttatggcggtgatatttgggcagttctggggcataggcttcagaagcattcacagtatgtccagttcaagaatttgctgagaatcgttttgcagccaaaaatatggataagttcgaacacctatgataagagtcattggggcatacaaccacaaatccccactcttgtgatacaggccatatcattaagtggttatcaccagatagctttccttcaatgatgttgttcatctaggaacccagggctctccaggggcaaatgaccattgaggtttcagatatattgggtaggaaagaaagtcacctcacataaaactaagtgattggagctgtcaccattgcaaatttctaaattttgtaagacagcagcaacatttcaaatgatagtctgagagaggagataatgggcttacatggatttccctccagatggatttactgaacaagggcacaattcaaattgcacttgcagatttctcctggtctagtttaagttcacagattgtggatcccagacagctggtatcaactgactagtgtcctgttaaggctaaacccaagactctttgccacactgcagcattaggatgggacttctcttcctgttcctgggaagaattagagatgtaacccaaaggtcactatttttctgagataaggatcccataggaggagagagcaatgagtacatggccagagatcaaagtgataagggttgggccagaagccacagtgcataaagcttcagacttgccacaggaaatgaggtgagaagtacgtccactcttctgtccagcttttaacaatctaactaatggttagagatttttcattttctttcagctactcctgcagtggtggggacacagaatgtttgcaaaaaaaatggggtggaggaaaatgaggcatctgtgtgagtatataaccatttgacatctctttttagccctctccagggtcaccctagaatcagatcygctccccagcatcttctgtttcctggtgagtgattcctgctactttggatggccatgacgggctggagctgccttgtgacaggagcaggagggtttctgggacagaggatcatccgcctcttggtgaaggagaaggagctgaaggagatcagggtcttggacaaggccttcggaccagaattgagagaggaattttctagtaagtaaacttgggtcatgggtgtgtggttccatcttaaacactgcatgtatgtggggggagatggaccttgtctagcaagttattgaaatttgtagccaaatctaagccaatctcacatccaaagtcatcaagaaataaatattaaatagtataaaatggcatagtatgaaagatactgggtgggatttccagagactagattctggccctgacccrgaacttgagaagcagccacctcagcctccaggcctcttttcttctcatctagaaaatcccacatcagttctttgtcttgtctgcaactcttttatgttctgaagcttttgtcttggcaattgctgtacaacattcataaaggacactattaccctggagacctcaccaatgggtcattgtctctctagaacgtgccaggctgtgttttgttttgcagcttccttagtatcctttgtgagggcaaaataaaaggaagttaaggtaaagatgagtgtataagtgggtgtgtgtgacagagagagaggaaaacaataaggggragagagagtcggggagagagagtcggggagagagactcagagagagagacaatgagaaagacagagaaataatgaaaaatatatagtgagagagagagcatcagtgagagaatgtgtgtgcacagtgcacagcacagagcagagacagagtaagaggcagtataaggccagacatgcctcatttagattttgcatatatggcttttttttaaaaaaaaaaaaacaaaacatttacctctgttgctcatcatcaaaaagaaattgactgcagaattttctgtggcaactccttgtacaaatggccccaagaggcaggtagaaaaggcatcacatccaacaggacaatgaacgcatcaaggtccggaatcacaaagcaacatgctaaggccatctgattgatgcgtagcagagctcagaccagagctttatccataggctatttcacctggccccagagctgatgcttggcaaagtggatcttcagtctctccctttgctccttggtgtgccccaaaacaattccctgtcctcctccccaacccaggggatttgggggactgtgtgtctacatgtgggctctggctgcccagagggtcctgccctgcccacagagaatcccccacttgacagcactcagggaccacacccaacactctacttttrctcttctctgacctcttgaaatgttcgatttcttccaccctctgttttaatgttgtctttgataaacaaatatgaaatgcttataatccttgcctgtgtctcagcaatatttgcaatttaacatctgaagccagaaaaaagcaatgctcagcctagaggtattgttcccctatggtaaaaatgcagatcatataatagacaggcagggatctgtatgaagataaaaacagagaaagcattcagtgttctttttgtgccaggcacttggccaaaggtttgccaactcatttgctcctcataacaaccctatgagatcggtaatattatcctccttttttaaagatgaggagatagaaacagagaggttagttaactttttgaaggtcccacagttagcatatggcaaagctagatttgaacccagacagactagtgcagcatctgtgctcttaagcagtagtttgtcttacagctcctttaggccttcctctagcccaacttacaccataaaagcaactccatttagtctacataaaacacttgccaagtctacagtgccttggagaagaagggagccatgacttcatcaacaaagtaccttttcctagtccctctagatccctgggaactcactggggaagagtccttttctctcagctttggacttcttccactttgacactcctttgagccagtctgtctgaagtggcagcaaagaagaagcagaggaaggcagcaggaagggcagaggtggaactagaaccagagaacatcccactctcaggctgttacccacatcaccaccagcagcctcttccctgactcccccactccaggaccttcttggagttgcctgacaaygggaagaggttgggagtagacaaaacatggcagaggcatcaggagagcaagtggtcctgcttgtaccccaggaaggaatttctccagcttcgaatttttcactctgaattttgctctcactggtctttggtctttgttgccaatttcagttaaactggcttattctttggaaaagaatgatattaaacaacagaaaagttgatattaaacagccagtcctgcacctggtgtacagggtacaagcttggaggcagggtgggcgtgtttaagccttcactagaaacgtgaccttagatctgtcccttaacctctctgagactcagtttcctcactgataaagtgggactcagaatacctacctcatgagatagctgtaaaaagaaataaatatcctgtaagttgcatacagatgataaagcacaaacaagtgtagagtatttatccaagctccatgtagcatggtgttcattttgtgggctaattccaggtgacaaccttactggcagcgtcacttcctgtggatttcagaggaacctgaagacattgatgttgtaaccactgcctccagctagacagctgcgatgttagttcattggtggttaactcattttcagcattgctacctgcttttgatgatatctgataatagttttccagggaaattcatcattgaagcccacccacaattcctgagtaatgactccactctcctcccagttgcccaagcaggaaactgtaggggtgattttatcttctccttttcctatcagctcagatccaataggtaccaggaccttcaaggtaaggtctgaaattcaaacctggtatatctctcccctcctctgcttccactgctggaccctgcttccagtcctcatcgaaactttggcacagacattctgattaatcacttgatcatcagtctttctcaaatcccctataccagtccattttatatcctcaagccaagattaacttcctacaccacaaccctgcttttgttcctttttttgttgttgcttgtgtggttttcttttttttttttttttttttttttttttttttttttttgagacaaggtggtcttgctctaccacccaggctagagtgcagaggtgtgatcttggctcactgccaggaaccagagaccccagcctccatttatcctcccacctcagtctgcagagtagctgggactgcaggcaggcacatgccaccatgcccagctatttcatgtattttaatagaaatgggatttccccatgttgtccaagctggtctcaacctcctgcgctccagtgatccatccatcacagcctcccaaagtgctggaataacaggcatgagccacggggcttggcctttttgtcattttattccaaatataaataaggggttttctttaacatgatgctggagtcccaaaattatgattctatacatgatttctcattacttacagaattaacttcaaacttttccctcatactctctacaatcacactactctccttagaaaatttgatgggcttcccatgactctagcaatgcttatattccaggcatacctgacagctcactgctcagattacttttctaaaatgagatgggagagaaacagatgtttgctctttccaagaaattgatacacatgctgatttctgtgccttttttacttgttctttccgtngaatgtacaccctccactctaacaccctwctctaaccatccttgaacacctatgtaacatcacctttatcagaaaacttctcagccagatacagaaatcattccaatgacctracctgtgttcacacagaactccagaacaagaycaagytgacagtgctggaaggagacattctggatgagccattcctgaagagagcctgccaggacgtytcggtcrtcatccacaccgcctgtatcattgatgtcttcggwgtcactcacagagagtctatcatgaatgtcaatgtgaaaggtatggtaggctggggaggagatgcagcaaggtggggaattaaggatcacaaagaagggcaggaagggaagagaagtccctccactgaacacctgctgtgctctgggccaagtgcctttgctgatcactacgaataggagagttcaagactgctaactttagttttttagatgataaaactaggactgagagagggcaagtaacttgtccaaggtcccccaggtaagtaagcaggtaggagagttagactttaaactcatccctgtgtgactccaaaggctctttctactgtgactccaaaagctctttctactgtggttccaatcaaaagtcaactaatttctgacttcagactcttgatacccagacaccccttgcctcccaggccagaagcagaccttgcaggtgccactgtagtcaccattttgaaccttgtgtgtaggctgatgaraacattcagagccctcctgcccacctcaaacaaraagtcctctcgagagaactagcaaagctggttcacaaggtctgtcaggacagaattatccagcacatgccttcccacaatatttttttaacagtgagatttttccagtatcaagaatacagtctcttcagctcaccacagggcctactattccagagccgttttcagccaggtgcccaaagtgcaccctcatttaatcttcatcccttaaatgcttggcgtttcctttcaaagtatggctttccaactaccttaaattcagacacatttccttaaggaatcttctcagaaatctcaccctctgatctccagagtccagtctcttcagcaccatagcaccccaaaccccggcctggccctccgcatttagtctactctgactctttttccaaagcaaccaattgcttttgagtctccagcaccataaaagaaaaaaaaaacaacttccagtttctacttacccatacttctaagtacccctgctgtgcaaggagggtgctaagagtaaccagttttaattactacttcaacagctcccaaaaggaggggatatgaaatgacaggggaagtgttagaggcatctgtttgctaaaaccattataactcccaagcttagaaaatacttcacaatgttggtcatttcccccttgaaggtaaactaactccaaattttctctgccacaagattaatttttgaacacatgaggctgtctttccagaaactcaaattgcacagagacattaaaagggctaagaatacaaaaatttgtaaataaaaatgatcctttccctaggaaattccttccttcttcaagggaaggcactatgggtacctccatgagctttgcttctacacagctcaggggaggctgcaaggtcctcccactgcaggtgttaccagcagaggacacacttctctccccagccctccaccaggctccacaggaaatgccagggcagggtttaaaagaaggtttatcacctccactttacataaccaggtaaacagagtcacagccagaattggaagcagctttcccagggaatgcacaatcaggaagagtgtgggtttccagcatctccccacaacccactgcttgctcagtgactccaggatggtccttgtgacaaagttttattagagcccagcaaaatgagaaaagtaccawcaatttcatatatattgaagagtttatattgcctatatacaatggtgtatgtgtgtgtgtgatgtgaattcttcaactgcccattttgcctaaggactggaactgtccatattcacagagtatagcctcctgattttttagattttaaatgatctgactttaatggtactgattacaaatcataatttgtcaatacccttacttggcaaaataaaaagtgataaccctaggtccctttccaaaattaaagtacacacacacacacatccatgaaacccaaaagtctagaaattcttactctccagaacccacatgtcagtttctcttcattttggtatttttcttatggctgtagtacgaccaaatctcagacagaaccacagaagaatgtaccctgagtctgttacaaccaccatatttgggagtggsgggtggggcacatagatctgtgttygtrgttggcacctcttagggatatatcctgacagtgacaatatgctcttcatggacaggtacccagctcctgttagaggcctgtgtccaagctagtgtgccagtcttcatctacaccagtagcatagaggtagccgggcccaactcctacaaggaaatcatccagaatggccatgaagaagagcctctggaaaacacatggcccgctccatacccacacagcaaaaagcttgctgagaaggctgtactggcggctaacgggtggaatctgaaaaacggcggcaccctgtacacttgtgccttacgacccatgtatatctatggggaaggaagccgattcctttctgctagtataaacgaggccctgaacaacaatgggatcctgtcaagtgttggaaagttctccactgttaacccagtctatgttggcaatgtggcctgggcccacattctggccttgagggccctgcaggacccyaagaaggccccaagcatccgaggacagttctactatatctcagatgacacgcctcaccaaagctatgataaccttaattacaccctgagcaaagagttcggcctccgccttgattccagatggagcyttcctttatccctgatgtattggattggcttcctgctggaaatagtgagcttcctactcaggccaatttacacctatcgaccrcccttcaaccgccacatagtcacattgtcaaatagcgtattcaccttctcttataagaaggctcagcgagatytggcgtataagccactctacagctgggaggaagccaagcagaaaacggtggagtgggttggttcccttgtggaccggcacaaggagamcctgaagtccaagactcagtgatttaaggatgacagagatgtgcatgtgggtattgttagkagatgtcatcaagctccaccctcctggcctcatacagaaagtgacaagggcacaagctcaggtcctgctgcctccctttcatacaatggccaacttattgtattcctcatgtcatcaaaacctgcgcagtcattggcccaacaagaaggtttctgtcctaatcatataccagaggaaagaccatgtggtttgctgttaccaaatctcagtrgctgattctgaacaatttagggactcttttaacttgagggtcgttttgactactagagctccatttctactcttaaatgagaaaggatttcctttctttttaatcttccattccttcacatagtttgataaaaagatcaataaatgtttgaatgtttaatgtggagggaggtgtgagttatgttaatacatactttcctcctttctccttcttttccaggtattgccatctccaatttagaagagtagcataaaacctgggttggggagagggcagagtagtgggagggccaggaagggcggatgaagactgaataagctctactacctttcaggcatgtacaacatgacctacatatgacatatattatcttatttaatactcatcagaaacctatctggtgggggtgactaatcccattttaccactgaggaaacttgttcacagtcacactaactgattattggctatgcctgctaccagggagttggccttgaaagtccttatctttccacggaatcacgcagcctgaactggtcttgtcagtggtacagcagagcactggagcatgcagtgccgatacgtggaagagacccatctccgttgggttacctccttcttgcccagtcccatgcaggggactctctagaacccaggagaatccctggggagcatctggaagggtttgaatgccttaacaaatggccctgagcaggggtgagtgaagcaaaaatgcctccagcctccaccttcaatgccaatttccttgaaggtctctagaacacacctggctatatgtgtgttagtcattctgatcatacataaccctgcatttcaccctttcaaatcacacagtgaagccacaccatgggttcctgggcaagtaaagggaacaagtttaaacttcccccaaaatgtgccttctattcagcccaagaagtaagtctactgtcccacatccccagatttaactgcctctctcttcattctccttctcttcttgagatcatatcttttcctcctttattctttcatctccttagcctctttccttccctccaaatccccttaaatcactggctctctcattcttctcaatttccctgaggaaaggaggctaatcaagacaagcttggggacttcgatgatgacatagtcattaaccaaccaaaggagcaacagtcaaataaaaaatactctcaggggcatcagtgacagagttgaactgaagtgggtgaggaagttgctgtgggtccagagtgtggggaggggaaaattatctccctctggacctgggtgtatcacagccatgataggagtcacacccaacttcaagatggcttgcttcttacatggggaatttacagattattaatcagttgaatttgattactgcaaagaggtagtttcagtattcattctgaagggaaaaggtaagcacattctggtccagaagaacaggtttccaccaccatcaacaccccaagagacagatgatcagcaccagcatcagcatggagtggccccaggcagtagggtaacatggaaaatggaacacccatccttccctggcactgcacaaaatgcaagaaccagcatctgttcagctcttgaaaggcatgcacaccatgtatatgttaatgcaaaatagcagtgaaaggaaaggagggtggtggaatcttggaaaagggcccttcctccttgtttttctgcctagtgaaaccccacacctatgaatccaccagggcaattttcacaggcaagggaagaaaaaggatttatctccaacaggcagtgaggggtgtttgaagtaagagaatagaagactggattggccaatggtctcaactgaacaagcacgaaggcctcagagtcttgtggctaacaaaatgtgccatcccttattacacctgcaggtgccaggcgggcagagctcctgcaccaagccctgctgcacctcacctgatgcaccacatgggggactgaaaaggctccgagggaagaacaaggaagcctgacctggtagggaattttgggttccttttctccagctgggtggctctgcaaggtacctggcacaagaatgaatgaaagcgctagccagtacagcctgagcttttgctgaatgtaccatcttgccctagcataacatgcgaagccttcatatgaagacattccctctgtctacctcccaccccctgcagcccctggcccaaaattcctaaagtcatacttatagttggcaaaataattcaccacaagcagattgggcagacagggaacaaaaccaaccttcaccttcacccttaaatggtgttggaatgtgtaagcatctgtacctctctcatatatgtctccctagcgttgagcactatacccggcacttgcccactcagctgaggggtgaacttcccaggggctctgctctcaatgagacacagccttggggcccggggaaggccagccatacacagatggtatcagaacacccaggcagaaccactccctacttcagctatagtaggtccagaaaagcatctcagtggagtgtcttcagtgaataaaaagaatgcattgaactactttcaatgaatccctggtctccaggaactgaactctgtcagtccttttactagtgttgaacattcttcaaatatatgtatgggaatgccagcttgaacacagcatgtacacttatacctttttcaaatttcttaaacagagggaaacatgggatacagaacaacttgctgcccacctcattggcttccaaagctgagcattcctggctgctggaatgaggcagggcaccagctggatatagagagcactgagaacagtggcctggatctcaggggaacagctggcaattgaaatccattggaatgtgctttgggttagcagagatggcctggatctcaggggaacagctggcaattgaaatctattggaatgtgctttgggttagcagagatggcctggatctcaggggaacagctggcaattgaaatccattggaatgtgctttgggttagcagagatgaccttgacactgcagtctggcagcagaaaactgcaatctgcatggcacttgaggttgtgacagggagacaggggaataagcattaacagcaaagctagagatagctgggcactaaggctcatgtctataatcccagaattctgggaggccaaggcagaaggatcacttgagcctagaatttcaagatcaccctgggcaacatagggagactccatctttacaaaattaaaaatgtatcaaaagccaatcagggcttggtggtgtgcacctgtggtcccagccactcccaaggctaaggtagtagaatcacttggcctgggaagttgaggatcatgccactgcactccagtactctgagtgacagagcaagacgctgtcagaaaataagaaaacaataaaaaaggaaaaaaggttagagaaaaaaaagaatgtctaaatgaataatgtcagcactggaatccccatgatcttttgctacttgccacactctgttctccatacaacagcctgagacatgtttttaagtaaattcaaatcctatgccccacctatttaaaacctttctgtggcttcccgatccatttactatacgctctaaactgatctccagctctcctgggcactgcatgatctgctcatccttccaacgcatttcctcatcactctccctttcactcatgatgcctgagccagattgacctcccttatattccataaacaagcaaatctttcttgcctttggatcttcacatttatcattcccttaacataaaatggtattcctcatatctcatgattggctctctgttgacatgtagatctcagctgaactgttaaggatgaggtgagacatccctgaccatcctctcctgaatacgctctgcttcactcatcacatcaccctgtttctcccctcctagctgttaccacaacctgcaactaacttatcagttgtctattttgttgtttatctgtacctgcatagggaccttaaaccgtcttgctccctgctacattcccaagaatctagaatcatgcccaatgtcatagagagtcccataaatatttattaaataaattaatccatggaggcaaagctggaccagactacctcagcacatctggagaattatagcagtcagaggaggaaaacagtgagttaggatggaacccagcagaatgggtcactacctaagccaacagacctgaaaagtcttctatcattccttgactggacactttcctgcatgaacccatgccattgtgcaggtccacttttgcccagattaacccccagagccaagagctgggtcaaggaaacatttgcatagaaaacaccaaaagagaaagccgtcccacaggcagtcactctggtaataacttttaaggctatttgtttaacccaaatatatgtataggacgtataccatccacatattataaaggaaaaataaactaccattgtacagctctgctttcatataactgcaattcagaacacagaattcaggaaagtgaacaacaaactttcaaatcagcagtgacttaaaaaaattgttttccatagtgtctgactcaaagcagctcctttgattcttctcagaacaaaagatcttaaaagagcagctcagtaatgactgaaacagccagtggattatagtttttttcacatcctttatatcgctaggagataactatggaatgttgcactctggacagaagagcaatacttataaaatattccccaacaaaaatcacactctctattttttatgttattttattttttttattatactttaagttatgggatacatgtgcagaatgtgcaggtttgttacataggtatacacgtgccatggtggtttactgcacccatcaacccgtcatctacattaggtatttctcctaatgctatccctccccttgccccccaccccccgataggccctggtgtgtgatgctcccctccctgtgtccatgtgttctcattgtgcacttcccacttatgagtgacaacatgctgtgtttggttttctgttcctgtgttagtttgctgagaatgatggttttcagcttcatccatgtcccttcaaaggacatgaactcattgttttttatggctgcatagtattccatggtatatatatgccacattttctttatccagtctatcattgatgggcatttgggttggttccaagtctttgctattataaatagtgccgcaataaacatacatatgcatgggtctttataatctttcaggtatatacccagtaatgggattgctgcatcaaatggtatttctggttctagatccttgggaaatcaccacattgtcttccacaatgattgaactcatgtacactcacaccaacaatgtaaaagtgttcctgtttctccacaacctctccagcatctgttgtttcctgacttgttaatgatcaccattctaactggagtgagatggtctctcattgtggttttgatttgcatttctctaatggtcagtgatgatgagctttttttcatatgtttattggccacacaaatgtcttcttttgagagtgcgatgcctccagctttgttctttttgcttaggattgtcttggctatacaggctctcttttggttccatataaaatttaaagcagttttttataattctgtgaagaaaatcaatggtagcctgatgggaatagcattgaatctataaattactttgggtagtatcactattttcacgatattgattctttctatccatgagcatggactgtttttccttttgtttgtgccctctcttatttctgtgagcagtggtttgtagctctcattgaacaggtccttcacatctgttgtaagttggatccctaggtattttattctctttgtagcaattgtgaatgggagttcactcatgatttggctctctgtttgtctgttattggtgtataggaatgcttgtgatttttgcacattgattttgtatcctgacactttgctgaagttgcttatcagcttaaggagtttttgtactgagatgatggggttttctaaatatacaattatgtcatctacaaacagagacaatttgacttcctctcttcctatttgaa

SEQ ID NO: 95797 - DNA, 121843 bp, Homo sapiens
acctgcatctcagtatcttccacagacatggggtcagcagatatactctaaaacgtggattctgactgtaatacctatttctgtatctctaaatgattgtaatctgagacaaggcagaaacgagtgtcttgaaatacaagagttacaatggtatcatctagctctcctctttctttcactcattttacatacaaggagaaagaggcacatacacggaaaaagaggcacgtgaagggtaaatggttcagagatcagtaatgtatgcagattttctccaagatcatgctcagttctacctattaagggaaaaagtaaagaaaaacatagttgattgcagttgttaatgcatctggggaagtccagtgaaatctcactggctgaaatggaatttgactgagacagtgaggtcaagaccctatttttagagaggcagagatatcttttaatcatgtttttataaatatcaagatctaagcattatgttttactttcagtagtcacacctaggatcatagcatcatactagatagacagggtgttggataggatctaatgtagtttgattacaaagacaaacagaaaagagcctatctaaaagccactcgagggagctttttggagatcttgttaaagttccttttgtaaaagataagctttgaacggcaaaccctgctcccccaagttataaagtagctgggagcaaaagatggtgattttaaaatagagtaagtgtacagatagcataaggatcttgtctttaggaccataccaagtggaaaagatacaccacgcaaagagagacaacaaagtaaaatacactttcaaaagttgaattttgctaattttaaagttgtatttcctctatgggatacatgtcctaagactgatgatgaaaaatggggataaggaccattgaaatagtcttacaattctcccaaattattctctattctagatccatacccaagggagcaattctctgccttctttaaagacctgttctctaatgttcaaatggccatttgtaagagtatggagagaaaacattaaatatgaacaggaatcctggggcctgtaacattcctatgtaatcagtattcctcctggttctgaacactaaggactctacttgtaatggagtcagttttcatgcatattattcacttgtgtctgctctgactctacccaccttccccaccttctctcaactctcatcaaaatatcttcactgttgtggggtggaaaattgtccttaaggcaagaagttgaacctggcaatataaaaagtgtggccttgacccttaatcttaagaaaaaagtgctctgagaaaaatcccattttgctattcacatcacttagtctcttcttggattttgccctttcttccagaaataaagtgacaatgatgactccctataaaaccctttaagccttcccaaaggtaagatgagcttctgattattgtccttacagtaagatgctataatttgctctctcccaaaaactactagggaaagacaacatctttttacattaggggtggagatgagagtatcagcctttaaaaataagacatttgcttgttctgactttgaaacctgacacaaggatgtggctttatgtggaaccttccccatttggacccgccctagctttagcctcttcagctttactgtggtgtcaaagtagaacattcatctggagatggatttctttttttttttttttttgagatgagtttcgcccttgttgcccaggctggagtgcagtggcacaatcctggctcactgcaactgccgccttccagtttcgagcgattctcctgcctcagcctcccgagtagctgggattacaggtgcctagcaccatgcctggctcatttttgtatttttagtagatggggtttcaccatgttggccaggctggtctcaaactcccgacctcaggtgatccgcccacctcggctttccaaagtgctgggattacaggtgtgagccactgcgcccagccgaaggttcttctcattgttgcttttacttgtgtgattttggtcaaggtacttaatatctgtggacaagtttcattagttataaaataagaggaagaactaaagttaagccaaaggtaaaaaaagaataatcattattacagtttcccatatacttttatgactcttggaggttatctcactcaaaagcaggatctgcctcactttaatttgggtccttataataggtccagcataagatggcatggtcagagaacatgtacagagaactatagtccataattatgaagagagaggtttgtttgcttttattatggaatctcttctatatttgaaaaaacatactcaatataaatgaaaggtcaggggtgaatgaattgtgctttaagtaagttttgaatacaattgccatctagtctttgcagtctgcaaaattcttctttaagtgaataaatgtgtagggcaactctccattaccttgatcagcatctaataccaacctgacacttagaattaaattagagaaagaaaattggatactttgagacttgagggctgattatactgcttgagctaagaatggatttaaactcttcccttatcccatttaaatctaactaggtataaactctccattactaaggaatagaggtgtgtctgcagaggtggaggttccccttgatgttcttggacaaggaaacctaatcctttcttctgacacacatggttgcaatagaaaccatttcccaactgccagtctggttttaatctgttgtttctagcaggagaggatttgcagggaatgttaaggagagaacaaaattaccagaacttactataaagtaaaagtgttgatgagaaatcaaaatttaaacaagtgttcaaaattgtaagcatgaacatatgtagacatatagttcacgttataaggataggactataaaactttttaatcttaggtatgtttaaagtctgctttccatacaacatttatatcttactttaccaaagttctttagcttactcaaatgatagcagtggtaaaataccgtcattaaatacagtggtgcttcatttaaacaccactgttggagaatgaattattccataggagaattttccatataaccaactgcataatacacacttttcttttctttctttcttttttttgagacagtcttgctctgttgcccagtgtggaatgcagtggcttgatctcggctccctgcaacctctgtctccctggtttaagcaactctcgtgtctcagcctcctgagtagctgggactacaggcgcacaccaccatgcctgggtaatttttgtatttttcgtagacatggggtttcaccatgttggccaggctagtctcgaactcctgacctcaagagatctgcccgccccagcctcccaaagtgctgggattacaggtgtgagccattatgcccagcccatgatatatacacacttttaaatgttaaccattttgtatgaaaacatttcaaaagtgtattgtaggttttttcttcaaagatacattgaataatatatctttccccgaggagtcatggttaccattattaaaaacttattaaaatacgttaaatatactgagctgaatatattcctcctcttagaagatggtgagctttgtagtcatactttccccaacaccaaaatgcttactgtgaaaaagtacaaaagtagacagaactggttcatttttaatacatcctgtgtcttttctgttaactgttccttctggctgttaaaagcataacaattgctgacaataagctgtgtaatttgttaaaatccaatttacttttaaaagaggtgcctactctgcataagagactattctaggtgctgggggagatgttagaaatataaactatagtccttgtccaagaagcaaggctggctgagtgacacctgagagttaccaggtcaccgccacggtgcaaaacacagtttattacttctaacaaagtctaaaaattagcaaatattttcaattttaaaaatcaggatactaaagttataaaacttgtggtcttaaagtcccaccttttttagtgggactatgtcttggaaatacctcccacggaaatattattggtcataggagtctgcagatacgactaagaactacttcttgaagaaataaagtaggtacaccctttgacagcttttggtgcaccatagtcttattgctaggttttatcttgctatctagatgactaaagatgtcagaaagctaatcttgctaattgctagggtcatgtaatctcattaataaaatatatgtaaaacactgtactataatgctttgctctatgtatgagtaaaacatgtagggcatttattaaactgcattttacaaggcataacatatatcccccttcccctggcaaggtttgtttccagggtctcagtaatatcacattctttgggttctacaacacctcttggctcctttatttccatcatctggctactttcactccacaaactctatctgatggtctcaaggatttccttggtttcaattaccatctgtttggtagttcaaatctcttctgagctccagacccatgtatctatttaatgggcatcacattttggaagtactacaagcacctcaaatttaacagccaaaaccaaactgatcagctttgttgaagactataacttgatttcctagttttttttttgccttcatccctttcctgctcacttctaaattacaccaattatacttgaacttcaccagtactttgtatacctacaagattatcctatatggttttaatttactgttttgtcttaccctggtagatttcagctcctttataggcatctcttatctcctacctctccttggtaattttcagtagctggatgaattataaacaaaacacataaaggaattgtcatgaatttcttccagttatatttttactgaaacactcgttatctgtctgggagatttttaggtgaattaacagaagcagaaaaactgtattaaactttctcataaccccaaacaaaacaatttcttccatcaggtataaccttcctgcagccttccctagactaggttgaaacaccacagtcataaccactcctccttaaaacttgcggtgcttgcttctttaacacctattaagtgtacatcatttatttatccgctactctattagactgtacacaacttgaagacaagatatgtctttctctgtaccttcagtgcccagcacattacggtagggttcaacaaagtttacaggacgaatgaaataaggccacataagtccagtgcggtggcacatgcctgtaatcccagcactttaggaggccgaggcagatggcttggcttgagctcaggagtttgagagagcctgggcaacatggtgaaaccctgtctccaccaaaatacaaaaattagccgggcgtggtggcgcacccttgtggtcccagctactcaggaggctgaggcaggagaatagcttgagtctgggaggtggaggttgcagtgagccgagatcgcgccattgcactccagcctgggcgagagtgagaccttgtctcaaagaaaaaaaagggaaatgaggccacacatgtctaaaaagaccacttatattaccctctaagagaactgggagtttctaaacaaactttttaaaggttgccttcacatagctaagatcagaaatgcagcctacttgactttcttccagtctaaagcgttgctactaataacccccaaggaaattctccttccaggaaggctgagcagacaagggatccagggaaaaacactaaagccccaccccgctcctgtccccacctgctcggcaagaactgcagtccgcccgatagcggctgcgctgcgcagcctggaggcccaagccgcgcccagcaagcaggagtcgcgagactgggattggctctctgaacagacgtcattccaaacaagacggctccgcccttctcaagatggcgctgcactcaatgcggaaagcgcgtgagcgctggagcttcatccgggcacttcataagggatccgcagctgctcccgctctccaggtaaccaaagacggyccttccctccgcggcttcccatcccgcgaggttcttctcatcccactgccctctatttatttctctcctcccgcttcttagggaaagtacatgccttccytcgcctaaggtctactcgtctatgactgtcggcctgctcagagcgtagtgacgttgcaaggatacgtgatgacgtaaaggtttcttggtggaaaaagcgcgccgctttctgacctcttgccgccacctccagttctgggagcggagcgccgccgctgttgccgggcaacgcggtgagcctaccccgcgtgtgatgttttcagagacgggttgttttagagactgctcttcttgtggtcttattactgtttttaccctccttaccctaacaacacgctaaggggctatcggagagagtagagaagttttgttaggcattgggcagcttgggtcggggcagcaggttggcagtgtggtacttgagcaagtgtcagtgcatcttccattctggttgctcctggtggctccacagcactgctctatctagcaggctgtgaaagagtgaccgcaagctgctacagagtttgtcctgtcctgcgcttgacaacactgctgttaccattaatctcgtcgtacggagaccatgtcgcggcctggtcttattgggaattgtcttaaatatttggaattttaccctcatagcaaaaaagtcagggggaggggataccctttcagttattcaggattttaccaaacgtcttccaagtacagtctcagtggcaagcactttgacatactttatctacgggagatrtattctgggaactagagagaaaggagagaatgtgattttattaggtaatttcccggcatcatttgcatatgtattgccataatgagtaggtgtgaggatgtcgcacctattgtaactgttgtgttgaaaacagcgctagacaggaaggtagcctagaggtcaagggtttggtctgccacttgacagctgtgtgacaagtcacaatctctctgggacttttcttctttttttgctcatattgagtggaggaagagagctggactgattgacacgttaatgttctttcaacctctggaaaatctatagttccatgattatgaagccaaaacaaagccaatgagagtaattatgaaaaccaaaatttaagttcaacttatttttctagtcatgtcataaattttttgaacttccgttttttattaatgtgagcctcacaaaattcttataagctaatatattaatatataccggaaagctgcttgtcagcaaacaactattcaaatgtcaccttaaatttcagcagcaatgttaggtaagacaattcaaaattagataaatttatcaaaaattcctctccttgaaatttgagggtttgattctgcagaactagaatgagatgattatttataatttatagcacattaacacctatgctatcaaagtagctaagccgtagacccaaacttccccttattccaaactaaagaattgaagatgtcttgagaatagagaatcaaagagagagagaaaaaaaagacaaactgcagcctgctaatgactrcccagggaagtttaagacactaagtcattataaatgctaaagaaaaaatttcttaaacctctactattgtttcagtggcatttatgaatagggctattaaagttaattattaatctagattgtttcaagatgtagaatttccagtaccgatgaatgtttctaaacctttaatttagctttgagtagaataagtattaaatgtgagagtatttttttaaagtataaatctacatataatttcagtcattgaaaatgatggtttgaaagattaatgtggttttttgaaagactgagaaaagatacaaaattgtgttcatagtgttattacgatgttatgtttatatataagtgtttatataaacgtatacatagaaaaaaagcctggaagggaacaaacatttttaacttttttattttgctttggccttcctaaatagtgggttaaaagttatttgtttccttttatagcattacatatttttcacatgtctaaattgaagacacacactttttaataaccagaaaaacgttttgaaatcataaatctttatacagatctttagtcattaatatcatttgtgatattttaggattctgaggaagatacttgtcccacaatgcygttattaaaatggccttagaaaaggactactaaaaatttatggccacttttcctgtatgtatcttctttttctcttgaaaagcttcctttgaagtcaaagggattttgtgaacagatgcagaaatatgtgaaagaggcattggattcttaaaccagatgcattagacatttttatgatatctcataacctttgtagaaaaaaattattttgcaagagtatagtataatgggaaaaaatgtatatttatcatatgaatggttccatcaaaaaccaagaaatagccaagttagtttttattagccttggctgtgcacttactcccttaggtgtaaagcaaaagtgaatgagccataacagtgctatgttagaaactctaactaataaagtgttgtgattcctaagttgttttaatggtttttagtgttttctttttttaaaacaaaatcttgggtaaaaatgttggcatagggcatctttgcttatctcagaggatgcagatgtaaactcaagttgaaaataaaacagggagaaacaggaataacagcacatcactccatactcattatgggatgtctacaatttatatgaaaacggtttattttgccaggtgttgcctgacagaaaactgttgaaatctgacaagatgagcgtagtcataaagtcagaggarttaagatctgacatgttctgtttaaatgttgatggtattaggtaaatttaagcctgtcatcattggccaaacacagaatccatacttctttaagcactaagtcatgattgtattgtgcaaagagtgaaatattgatggttagtagatttttgcaaaartatttgttattcagttgaagtatgataaagtgtccacattttattgcagttgaacatgtttcattattagcggttcctagtctgggtttggccagtattcacataatgttcttgctgttaactatcgctaagtatagccattagatgaagaattacgcctaaaaagaaaaaaagcgtggtttaaaatttttgaccctgtatttaattctcacaagatttaaatttttttaattttaaaataattttagatttacagagttgcaaaattagtacagagaatttctgtatacccttcaccaagctttgtcttgaataatcataatacagttatcaaaatcaagaaattaatattggtacaataatagtaatttagctacagacttagttcaaatttcactagttttttcactgtccctttccttagtccaagatcaaatccagggtcccacaatgcatttagctttcatgtctcttctaatgcatacattttctccttcatgaccttggcacttttgaagagaaccagtcagttattttgtagaatgtctctcagtttaggtttgtctgatttttctttgtgtttagactgaggttatggatttttggcaagaataccacgaagagatattgttcataacaaggccttgaggcaggtattgccaccttatttcaaacgtgaagaaatagtctttggttaagtaacttgcccaatgtcacacaatggtggaattaggatsgtaagatttaatgtaggcatttcattccatattttgcaattagtatttgttattgtaggtttctggaatgttaatgacattaaattggcatagtgttcccactgacttttagcttttctctgccatgtattgttcatgcaacatgcaacatgagctaatcagcatggtatgtgttcaagagctactacaatcatctgggaattttgctagttgattactctgccagtttgatgaggttacttcatctctcatggcaaaaaaaggtgttgcgtggatccactctaaagctccttttaatctcagtcggtgagtcttatttgtttaaagtgcttttgtggttggttgcttttgtgaactgacctagtttattaaaatgataataatatttaaattctttgcaatatagctttgaggagctaatgaaaactactgatagtaactgttgaaaatatagaggaaggaagaactgtagctgaatgctgaggatttatgctagcagatagtacggcagccatggcctggaaatgctgaagagagtgatgctgctgacctccaaattcttgctcagtatatctttcgaatgactgcaagttacagaagagctgtctgcagaagcttctacaactatatgtacacacacacacacacacagacaaatatatattttttatacaaatttatttatttatttatttaaacatctattggccaagcacggtggctgacgcctgtaatcccagcactttgggaggccgaagcaggtgtatttcttgagcttaggaatttcagaccaacctgggcaacatagtgagaccttgtctctataaaaaattcaaaaaattagctgggcttagtggcatatgcctgtagtcccagctagtcaggagactgaggtaggagaatcacctgagcccaggaaggctkcagtgagcagcgattgtgccactacacagttaagatcctgtctgaaaaacmaacaaacaaaaaaaccccaaaacccatctctctctctctctctatctctctatctyatctatctatctatctatctatctatctatctgtctatctaatctatctrtctctatattccatgtctttcagaaaaggaactaacagctagtgcctgctatgtgctaaagtctcatggtatgtgttttacatactttatcttatttacttcatacaacaatttgtaaatattattcatcccattttataaaagaggaaactaagattcagagagtttaggtaattttcccaagtcacagagtaagtaaatagcagtgacacagttcaaacctagtcttgcctatgcttttcccaccttaccagtagtcttttatcaaatgaaatcttacatgaatccctgttatataaaacagataaaagcaaagcttttctgatttaagaagcagaggagtatttttagccctgcttgtttgatttccctctcccccattacccgccccactccacaacccaggggctcctgagacagtgccacacaattttggatttcttaagatgtagtttgaaaaatactgcagcttccataaatatctaagtaagtttgttgatcaggaccacatatgatggatggattatttttaaggagctgcaccgtaaatgagtggtttgagagtatttactttgatgtgtatatattttataactacaatacagtattctattgatcttaagctacataagagtacatgagataatagcagtcaaacaactttctttccttttcttgccttctttcttttttacagcttactgctgccaaacatgctgatctttgtgcccaaagataatgctttggattcagtctgtcactgttgtaactaacctagcctctagcctcctcacagagaacacttactctagttcttttcttgactctattctaataccaccattcaagagttcaagagtttctcttctgaagattacaatatgaggcctaaatctttctcctaaatttcaacagagaaatttactcctttagggtagaagctgctcagccacactgtgagaccctagatgcctagagataatttataggcacagagatgatatgctgactccagcttgacttaatttaactctgctcaggcatttagttttctctctctaccatttcttracaatattctatcttttttttctccagttcagaggcttcacagatttcctgaacttctctgcttactgagcatagcaaggtcatttataggtccttgcactgacccatcacctgagttctgttaggtttctactcattaaccaaaattcatctgtagctttctttttttcttgccacacagtcttctgttttttttytagagctactgctccatttytaattgagaaagttctaattgaaccgacttctggttgactaaagaactgttttttgtttttgtctttgtttttttttttttttttttttttgcccctttgcctcctaaaaagcagagtgaagccaatctgatttttaattcatggatattcttacaacttccacttctacatcttttgcattctttgtggatgcaccaaacagcatgcaagaatgtcagtttctccttcacattcttatcttcatgttctgattgtgactcactgaggatggagccctgaatgaccttggttaggttgcttattatcccattttcttgagatgataggtgtagatttttcagtaaggtagttgaaagtataaaataaaataacatttaccttgtaaaacattttaaagtggaatctattctctttaataatatcctattttaatacagcattttgtagtttttcagaatgcttcacattctcatttactcttgaatacaatatacaaagttcctctatttagccatcaaaaatttttactcgttgattaaacttttattgtgccttcccattttttttaaccagttttgcaagatgatgaatataaagtaaatatcagtgttctttcaagttttacttcagtgactgttatcctatttgtactaaaattagtttaatgtttaattcatttttgggccctggtctgatagtaccatgataatttcagttattactaaacatgatgataatggaggtggtggtgataatagcaaacattcattggatgcttactatgtgccaagcatggttttaagtatttgacattcattaactcatttaatcctcataactcaataaggtaggtgctattagccctattttatagatgacgatgttgggaggttaaataactaacctaaggttacatagctagcaagtgtcagaaccaaaatgtaaacccagctagcctgattccaaaccctgtgcactaactacaatgatgataaattctgaagcaaagtacacatgttaatttgctgataactgccttgtaacttttaaatctgttctatgaaagtcacttatatatcttgccatggtgacatgtagagtagaaattataaatcatcctttgttgttgctattcttacagtcttgtttcgctcaatgaattatgaggaagaagcaaagctgtcttgtaaatttatctccatgtctctatttggctactaccactaggattaccttgtataaaataagggcttttaacacatgagtcccaaggtgcatgtaggaagttctgtttatacacagtctatagctaaaagggcaacctgcacagagccctgcaggtagaggagaggtggtgagagctaaagttgatggctgaccaagggaccactatctagggtctagttgggatttatggctagagtgctttcttcaagaagtggcagaagtacagtcagaaggtgggaagtaagaaaatagtgttgtgggccatttctgcaagggacaaggaagaatttgattctgaaagattgtcctttgaaggagttcttaaagaggtctataattcattaattatagagtattaaggtgagtatattagtatattaattagaatggtgatgaggctttaaaattagcaatattgaacagaattcattttatacatcaaacaaagggcttctcatgaactttttgtcacactcctcatgaacagagactttgcatggagtgttcaactttattatatgaataaagcctactctttattcaccacgttactttggaccccttttgggaagcaggagaatataatagtgaagggaaatggagctgtttactcaaatcgcagatttggattcctgtcctcccatggggagaatggtctgagcagccagttcataaatttgctggaaaagagaagaggcttcttgggctgagggtaagtgtgcagtgcgaagttggagtcccaagggagatgtaaaggaccagactgtgtggaactcttgccagtcctggggagagagtcagattggcccaccgactggctactagctacctggcaaactttggcttttcccatggctggcaaccttccagctactcccatgccrctaagctatgagacatccagactcaataagttgactggctcttcattaagaggaagtgggggaaagtagaccatgcatgactatttggatcagccaggcctggctctaccaccacattttaaatgtgattccaggcagttttttgacttcactaaacctcagttgtctcatgtgcaacatgttaataatactcctcacattgtaagaattttatgtagatttgaaatcctaccatatataaagttccttggccactgcacagcacctggtaggtcctccctgcttgatgatgacttcttcaataatatataattctatccaacaacctttctctcttttactcttatcactcttagtaggattctttccattgccatactattcttcccgccccccaccacaccccctagaatcagtctgactttgttaatctcccaaaagcagagctctaattatgttgttcccttgctgagaagcctgtgggggcttctcataaagtccagacttcccacagaacgtttaaaactttgtacagtccgggccggcgctgtggctcacgcctgtaatcccagcactttgggaggccgaggcgggcagatcacgaggtcaggagatcaagaccatcctggctaacacggtgaaacctcatctctactaaaaacaaacaaattagccgggcgtggtggcgggcgcctgcagtcccagctactcgggaggctgaggcaggagaatgatgtgaacccgggaggcggagcttgcagtgagccgagatcgcgccactgcactccagcctgggtgacacgagtgagactacgtctcaaaaaaaaaaaaaamaaaaaacaaaaaactttgcacagtccggatccaaaatacctctctagaccattgctatcttacatagatcctttgccctagagttcacaaaatttccaagtttcctcggagctactcccttttacttccttattaatgccattacctcttcttggaaaggcctttcttcctatccttatctgtctgtactctatcattctttaaaaacaaaacagaaatatgtacagctttttgcaatgtcaattataccacaataaagtgttttaaaacaaacagcaacaaccaaaaaacctcagatatcggttccaaaaactttgttcttaagctggaaatgattgcttccattttgaaattttataggacattgtatctctcttatagaaaaaaatacatcctttatattctgtctctgtttttagacatttgctttaagatagatggaagagcatgctctttttcatttagaccttttgtgaatacctcagcagaaaacagtttagtatgcaccataccacaggtgcagcataagctgctactcaacaggcagacctcaccaggcagtatgtttctagaggccaccaccagtcatgaaagacaggaagatttgcctgttgagccgtggctgtgataactatgtgtgtgagaaaatgagttattataataaagatttaattcttaaatctttggcataataactcctgttacagaaggagctcaataagtatttaatgagtgaatgaattcagtgaaaaaaaatcagtgagacaacacatgagacagtgcatagcattgtcatcaaggagattgttgaacttaaaccatacatttttgtgtgcatttttatttatttaattacaaaagttgtgtaatgtttgttgcagttaataagtgatcttattattgcccaaagtatccacatgtttataaatgattggaaggtcataccaattttatttcaacaattttctgagagggtatgaatttcaaacttgtcrcttaactgacttttattgtcactctggccctaattgtatttttcacaggtaccactaattatactaggatttgccacctctttatattatactgaggtttgttacatctgtatatagaaaagtgtagacatactcaagattgagatgaaaagattttattttgagtatggttttgtctcaaaggactgtctagttcaataagtgtgccatattatctatacaacaactgatgtggtttttgcttttataatcaagagtatgctttcttcaacttataaaggaaataaaaagctcatttattgtattgacattgcctttttttttttctcatttacccaccttaagtcccatttaagcaacctgtcaaaccatgcctagcacttttgctctgtagatcttggtatgccctgcatagatggagagaacagccctaggtctcactgcaccgttacacgatgtagacaggccatttgtaagctaatgcaacttcatttttctttgcaccttgataaatgcagagaaatgtgattcaagcagattttatatctatatagccaaggttgtgcaaagaatttatattttcttcttttaaagtggccagtgatattatagtagttggtcaggaaagctttattgcaatgcttgcttaccaaattgtcattacatgtttaataaaacctttaattgtgctatatcatatctgttagagagaatgggatttattttattttattttattttttatttttattttttgagatagagtatcactctgttgcccaggctggagtgcagtggtgcagtcatagctcactgcagccttgatgtcctggactcaagcgatcctccttgtgatactcagcttcctgcgtagctggggctacaggcacaaaccaccacatttggctgatttttttgttttttattaaacacaaggtctcactatgctgtccagtctgatctcgaactcctgggctcaaatggtgttcctgcctcagcctcccaaagtgttgagattacaggtgtgaaccactctgcctggccaagaggacgggtttgattgtggcatctttctggtaaatctatgtctaactgtattcaagctgctataacaatataccatagactgggtatcataaacaacagacatttatttgtcacagttctggaggctgggaagtccaagatcaaggtgctgacacatccacgtctggtgagggcttccttcctagttcattctctgagatctcttttatgagggcactgatcacctcccaaaagccgcacctcctaatgccattacattgggaattaggttccaaaatatgaattttgggaggacacaaacattctcttgcagtctgtgactacagtggccagacatcttgtaaaatccagaaccagttatactttataaccataaatctttaaagtgtctttgaaatttcagtgtttcagcatccacatgacatctcctgcaccatttctaacattctaaaatagaacaaaacttctttagcagaccatatttccttaattttgattgagaatatatgaacatatctatgactaaaatagagacacagcttgccctcttgtctttcttttccatctaactagcagggtttttggtcaggcttccatgacacctgtctttttgaaagtcagatgcttaccaaccatgtggatataaagtcagccagtttccattttgaccacaagttagaaggaatggggaacgagaggggtggctcttcaaaaaggagtaacaaagccatgaccactgatgggattactgtcagctgaataccatttaaattgcattttctgcagggagatcattaagaataaagcatgtatattgtggggggcgcagggtgggggtgggagtgggtgggtggtggggaatgttaaatcaagcttttttaaacttctctcagttcaaaccctggggaaaagaccagagttgaggaattaaaaaagggagacagagatggcagaagaatcattaragtgtagatctaaggattccgagggtgtagagaatgtcaggaagaagaaatgaagagcaagatagtgacatggtaagataaagactaaaaattatccattagaatttagcctataatcccagcactttgggaggctgaggtgagtggatcacctgaggagtttgagacaagcctggccaacatagtgaaacacgatctgtactaaaaaatacaaaaattacaggccagtggttgtgggggcctataatcccagcttctcgagaagctgaggtaggakaatagcttgaacccaggaggcggaggttgcagtgagccaagattgcaccactgcactccagcctgggcaacagagcaagactccatctcaaaagaaaaagttaaaaaattttaaaaaaaagaatttacagttggtattatcactaaagacattagcaacaaaagctttagaagagttattagtgcagaaggttagttacaatgagagaagaggtgagaaaatgagttttgctcttttgacgatcccaattgagaagggagtgagcatgtaaagggagctataaagaatggccttaccaaaattttcttgaaggtaaggtcttttgggatgaaagaaacttgaacatgaccattagagcaagtaaagatagagagattgacaatacaggaaagagatggaaagaaatgggaaaaaatgtagtccagagcaaatgattgaacactaggagagtgagagaaaggtagaggtaggtgtgggtctaggtaagtttgctgagaatagtgtgggaaatcgaggagctccaaaccctgttgagcatcattctctcagatggctttagacctgaggagatggtataggttagtgggtttgtatatgggttctgcaattagtctccttgcattcaaaccaaagttcttccactcaataaatgggtatccttgagcaagttactgagcctctctgtacctcattttcatttataacatcgataagaacatcgagataaaagcttgagctagactgccaggatttggagctagtaagctctactgcttactggcagtgtgaccttgtgcagtcgcttgatttttctgtgccttaattttttttcatctgtaaaacagagacagtaatagtatctatctcagtttttggctctgagcagcaccatggaggttggcaagaacaagcgccttatgaaaggcggcaaaaagggagccaagaagaaagtggtcgatccattttcgaagaaggattggtatgatgtgaaagcacttgctatgttcaatataagaaatactggaaagatgctagtcaccaggacccaaggaatcaaaattgcatctgatggctttgagggttgtgtgcttgaagtgagtcttactgatttgcagaatgatgaagttgcatttagaaaattcaagctgattactgaagatgtttagggcaaaaactgcctaacttccatggcatggatcttacccatgacaaaatgtgttccatgatcaaaaaatggcagacaatgattgcttcatctgttctgtgttggttttactaaaaaatgcaacaatcaggtacggaagacctcttatgctcagcaccaacaggtcctccaaatctggaagaagatgatggaaatcatgacctgagaggtacagacaaatgactggaaagaggtggtcaataagttgattccagacagtattggaaaagacatagaaaaggcttgccaatctatttatcctctctgtgatgtcttcgttagaaaagtaaaaatgctgaggaagccctagtttgaattgggaaaacttayggagsttcktggtgaaggtaatagttttggaaaagccactggggacaagacaggtgctaaagttgaacgaactgatggatatgaaccactagtccaagaatctgtctgaagttcagacttttaatagtggcaaataaaaagtcctatttgtgaaaaaaaaaaaaaaaatagtatctacctcagagtgttaccatgagtgtgagaattcaatcaattaatatttgtaacgatgtagaacagtgctaggcacactgtaggtattatgtaagtttttaaaaagggttttataagcagggttgagagcttaattgaaattagaaattgtaaattagatttgaaacaaaattctgcattattttgagatttttttttttttttttcaaaactgctcagctattaaggggtataagtgaagaatgagttctttagccttgatccaggattggagtttttgtcttggctattgggacactatggcaaggggagttgaggttgctcgggagaacatagtccaagtgatgaccatggggccaggctgggtagggaagaagagaagacaggtagggagtgctgtatcagcaaaaaatggaaaaatcaaagtctgtaatttctaaataagcttgaagatacagtgggaattaaaggatgaaagagttaaaaggtagaaggttgcagactgagtagaatattgacatttatgatttcaaaaatggagaaattctgtgtgatggcaaggcccagggtataacatgagaataaaggattgaggttgaggagatccaacaaatgtattgaatgctagtgtattggatgggtagtctacctgataattgaactctcttggagaacagaatttgactcagagagacagccagcttcctaatcctttaatcagtttagaagagtattcaagaggtggaaagataataacagaggcctgaataagtgtaaatatctactctcctctcatttatgtagtcatgtaaaattttttggacccattgtctcctgaatgattaaaagaccctgttcagtggaggattatttgaatatgtcacctggtgaattctgtcctcatctctaattcatgagagtaataaggttgtgagtattttatagtattgattcattcaacaaatatttattgagtacttattatatggtagatattggagatagactagtgcaaagcagaaatcttaaattctagtaggagagacaggcaacaagtaattaagatatatagtatgttagataatagtgatatggagaataaaacaaaacaaagcaggaatcaggaggtggggactgccaaagggtatcacagttgtaaattaggtggtcagcagaggaccccaagaaggtgacttttaatggaagacctgaaggtggtgagaacatgtacaaagtagacatctgagggaagaggatgccaggaagaggaaagaagaatggaaaagccatgaggtgggggctaaactgtcatgtttgaagaccagcayagaggccagtatggctgcaggagagtgagcattttctgtaacaaatactatatagcacttactatgtgttggatacttttctaaatacttcacaagcattaactcatttaattcttgtaacagccctataagacagtacagatgagaatctgtgaaacagatgttaagtaacttgtcacacaagcaacagaatgcacacagctaacaacggtgaagagccagggccttaaccttggggtggtttgcattatgctgtttattatagtaatagtatacgaagtcacatggctaacaggagggtggacgtggggaggtcagttgtatagtaccttagaataaattgtaaagactttggctttttctgggattaaactgggaagtcatgggaaggttttgtgtgggagaataacctgatctgatgtaagttttaaagtctcactctggttatcatgttaaaaatagaatatagaggaacaagaatagaagcaaggagaccaagtaagaggctacaggattcaagcaagagatgatggtggcttggactacggtgagtggtgaagatggtttcatgaggcatgatcaggttctggatatttattttatttttatattttatttcatgtcatttcatttcatttcatttcattccaatttttgagacagagcctcactctgtcacccaggctggagtgcagtggcactatctcggctcactgcaacctccacttcctgggttcaagcgattctcctgcctcagcattccaagtagctgggactacaggcgcacaccatacctggctaatttttgtatttttagtagagacagggtttcactatgttggtcaggctggtctcgaaatcctgagctcaagtgatctgcccaccttggcctcccaaagtgttgggattacaggcatgagccaccatacctggccatggatatttattttaaaggtagagcaaataagattttctgactaattagatggaggatgaaagaaacaaaagagtcaatgatgattccaaagtttctggccagagcaactggaagaatgaatttgcaatttactgagacacaaaataatgcaacagtaacacgattttgggagggaagatcaggggttatcaggagttaagttttaggcaaattgagtttagatgcttcgtgaacatataagtggaaatgtcaggtaggcagttagayatgtgagaccaaagctcaggagagaggtatagatggagatgtacatttgagagttctcagtatagactgtgctgaaagccttgagatagggtgtaattatctgtgcagtaggtttagaaagaagagaagagaggagaggaggggaaggagggaggggaggggtggttcaagtactaagcctgtgaacattccaacattaagaggttgggatgatgagaaccagacaagatagtattatccagataggtaaaagatgaggaggaagtggtaacatgctggaagccaagttaggaaaatgttttatagactaacattaacgtgtgtgtgtgtgtgtgtgtttgcatgcacacaagtgcatgctcttgcacacagtcaaaaacaccctcccctccctgacacacacatatcttatatgtacatggaatgataaggagtatcaactacttttcttcactgattaacatagtctctacttgcaggcagatttaattgggaagccaaattattaagtaagatagcttgatgggtatggaatcagagcaaagggagttcattaaagcacctcattggctagggtaatcaagctatcattacccaaagatccatctccagtatgggacacacgtgttccttgggcaacacattgctggcctgtgccatagtgccaattgacttgggcagttctttaaaacacaaggccagagttttcccagtagagcttcttttttaaagtttccacccttcaagggaacatattctttctttagatatgttaatgtgcctaactttgtttctataagtgtattaagtcttgtcctcagagttcttaacactttttgatgaggaagggtgtggtcactatttcctttgattaaaatgtggatcttctatcttgaaaaatgcgtatatgcattctcaaaactgtatacagtttcacaagttaataaacccaagttaagaactcctacatttttttcctatcctcagagagctgattttttcttctcaatttctcttacttttcttttttttctccatcaccygcctcacacccatttccccaagtccccagagtccattctatcattcttatgccattgtgtcttcgttgcttagttcccacttgtgagaacatactatgtttgattttcccattcataagttacttcacttagaatagtggtctccaacttcatccaggttgctgtgaatgccattatttaattcccttttatggctgagtagtattccatggtatatatgccacactttctttacccacttggttgatgggcatttaggctggttccatatttttgcaattgtgaattgtgctgctataaacatgtgtgtctacatatctttttcatataatgacttattttcctctgggcaaatacccagtagtgggattgctggatcgaatggtcattctmcttttaattctttaaggaatcttcatagtgttttccatagtggttgtactagtttacattcctaccagcagtgtaaaactgttccttctcaccacatccatgccaacatctattactttttgatttttaaattatggccattcttgcaggagtaaggtggtatcacattgtggttttgatttgcatttagctgataattagtaatattgagcatttttccatgtgcttgttggccgtttgtatatcttcttttgagaattgtctattcatgtccttagcccactttttgatgggattgattgcttttttcttgctgatttgtttgagttctttgtagattctggatattagtcctttgtcaggtatatagattctgaagattttcttccatactgtgagttgtctgtttactctgctgattattgtttttgctgtgcaggcactttttagtttaattaagtcccatctatttgtcttggttttcattgcatttgcttttgggcacttgctcatgaattctttgcctaggccagtatctaggagaatttttctgatgttatctcctagaatttttaggtttgaggtctcagatttaagtctttgatcaatcttgagttgatttttgtataaggtgagagatgaggatccagtttcgttattctatatgtggcttgccaattatcccagcatcatttgttgaatagggtgtcctttcctcactttatgattttgtttgctttcttgaagatcagttggctgtaagtattaagctttatttctgggttctctattcctttccattgtactacgtgcctgtttttatactagtactgtgctgttttggtaattataaccttgtagtatagtttgaagctgggtagtgtgatgcctccagatttgttctttttgcctagtcttgctttggctatgtgggctttttttttcttacatatgaattttaggattgttttttctagttctgtgaagagtgttggtggtattttgatgggaattgcattgaatttatagattgcttttggcagtatggtcatttttacaatattgattctacccattcatgaacatgggatgtgtttccatttgtttgtgtcatctatgatttccttcagcagtatttcaacgttttccttgtagagctctttcacctctttggttaggtatattcctaagcattttattttattgcagctgttgtaaaaggggttgagttcttgatttgattctcagcttgattgctattggtgtatagcagtgctactgatttatgtacattgattttgtatctgaaactttacagaattcatttattagatctaggacctttttggatgaatctttgggttttctaggtatgtgatcatatcattgccaaagagcaacagtttgacttcctcrttaccaatttggatgccctttatttctttctcttgtctgattgctctggccagggcttccagtattatgttgaatagaattggtgaaagtgggtatccttgtcttattccagttctcagaggaaatgctttcaacctttccccatgcagtataatgttgcctgtgggtttgtcatagatggcttttattaccataagatatatcccttctatgctaattttcctaagggttttaatcataaaggaatgttagattttgtcaaatgctttttctgcatctgttgagatgatcatatgatttttgttttcatttctgtttgtgtggtatatcattacgtttatttacttgtgtatgttaaaccaaccctgcatccctggtatgaaacccacttgatcatggtcgattatctttttgatattgtgttgaattcagttagctatagaagatttttgcatctatgttcatcagggatattggtctgtagttttctttttttgttatgtcctttcctggttttggtattagggtaatgatgttttcatagaatgatttagggaggattccatctttatcttttgcaatagtttcagtaggattggtactaattcttctttgaatgtctgatagaattcggctgtgaatccatctggtcctgcacctttttttgttggcaatgttttttattactgtttcaatctcattacttgttatttttttttaagagtttttgtttcttcctggtttaatctaggaagtttgtatatttccaggaatttatccatctcctctaggttttctagtttatgcacataaaggtgttcatagtagtcttgaattgtcttttgtatttctgtggtgtcagttgtaatatctcccatttcatttctaattgagcttatttggatcttctttcttcttggttaatctcactaatgtgtatcgattttgtttatcttttcaaagaaccagctttttgtttcatttatcgtttgtatttttgtttgtttcaatttcatttagttctgctctgatctttgttatttttcttctgctgggtttgggtttggtttgttcttctttctctagttccttgaaatgtgaccttagattgtctatttgtgttctttcagactttttgatgcaggcatttattactgtgaacttttctcttagcactgcttttgctatattccagaggttttgattggttgtgctgctattatcattcacagttcaaataattttttaatttccatctttatttcattgttgacctaaggatcattcagtaacagattatttgatttgcatgtatttgtatagttttgagggttccttttggagttaatttccagtattattccactgtggtctgagagagtacttgatataatttcaattctcttaaatttattgagatgtgttttgtggtctatcatatggtctatcttggaggatgttccatgtgctgatgaaaaaatgtatattctgcagttgttgggtagaatgttctataaatatctgttaagtcagtttgttttaaagtatagtttaagtccattttttcattgttgacttcctgtcttgatgacctgtctagtgctgtcagtggaatattgaagttccccactattattgtgtctatctcatttcttaggtgtagtaataattgttctataaatttgggagctccagtgttaggtgcatatatatttaggattgtgatattttcctgttggactaatccttttattatataatgtctctgtttgtcttttttaactgttgttactttaaggtatgttttgtctgatataatagctacccctgctcacttttggtgtccatttgcatggaatatcttttttccactcctttactttatgtgagtctttacgtgttaggtgagtctcttgaagacactagatacttggttggtgaattcttatccatcctcccattctgtatcttttaagtggagcatttaggccatttacattcaacattagtattgagatgtgaggtactgttttattcatcatgctagttgttgcctgaataccttgggtttttaaaaattgtgttacttttttataggccatgtgatgtttatgctttaaggaggttctattttggggttttgtttcaagatttatgactccttttagcagttcttgtagtgctggcttggtattggtgaattctttcagcagttgtttgtctgaaaatggctttatctctccttcatttctgaaacttagttttgctggatgtaaaattcttggctgataattattttgtttaaggaggctaaaaataggaccccaatcccttctggcttgcagggtttctgctgagaaatctgctgttaatctgataggttttcctttataagttacctgatgcttttgcttcacagctcttaagatgttttccttcatcttgactttagataaactgatgactatgtgcctaggtgattatgtttttgtgatgaatttcccagatgttctttgagtttcttaaatatggatatctagatctctagcaagaccagggaagttttacttgattattccctcaaataagtttgcataacttttagattgctcttcttcctcaagaacaccaattactcttaggtttggtcatttaacataatcccacatttcttagaggctttgttcatttttaaaattcttttttctttgtctttgttggattgggttaattcaaaagttttgtctttgagctctgaagttttttcttctgcttgttcaattctattattaatacttttcagtgtgttttgcttttctctaaatgtgtcttttatttccagaagttgtgatagtcttttctttaccatatctatttaactgggaactttttcmtccatatcctgtatttttttaaatttatttaagttggttttcacctttttctggtgcctctttgcttagcttaataatcaaccttctgaattatttttctggcaattcagagatttctacttggtttagagccattgctgaagagctactgtgatcttttgtgggtgttatagaaccttgttttgtcacattactagaattacttttctggttccttctcatttgggtagactgtttcagtggaaagatatggaactcaagggctgctgttcaggttctttggtcccacagggtggtccattgatgtgatgctctccccgtttctctagggatagggcttcctgagagccagactgcagttattgttattgcttttctgggtctagctacccagtggggctaccaggatccaggctagtgctgtaaagagtcctgtgatgtgacccatcttcagttctcccagctgtggataccagcacctgctctggtagaggtggcaggggagtgaagtggactctctggaagtcctcggttgtagtttcgtttagtgcaccagttttcttcagtactggttatgctcacagtgaagttgtcacgtgaacagactcaggacctctggttagccagggtggaattagctgttgtcttctctttctttggagcagggttgttctgctattagttgaattggttggcctccagccagaggtggcacagagtgccagctgcaatagtagaagggggatatagtcttgccctacattggccaggatgagtactcaggtttctcaggtgatgggcagggccatggagctcccaagagattatgtcttttgtctttggctaccagggccgatagagacaaaccatcaggtgggtgcagggttaggcaagtctgagctcagactctccttaggtggggcttgctgcagccactatgggggatggaggggtggttctcaggcccatygagttatgttcccagggagattatggctgcctctgctgtatcatacaagtcaccagacaagtgggggaaagctggcagtgacatgcctcactccactcccatgcagccagcaaggccattctcaccttcaccgtgcctccctaactgcactgagtttatatccaggcagcaggagagcagggctgagatcttgccttagcctaaaagcctcccagctgagaaagcaagcagggctctcagttcttacctccctgcctgcctgaacctttggctgtgacttctgtgtttgtatctgcacttcctgttcattcctctctactcctctgccctggattctactcggggaagttcgtgctcggttgaaattattacagagttcagctaggagcttcccttagcctgtggcctctccccagttccactggctgcrtttccttctccaaggacmtctgtgagataacgcgaggaatggcttccytggggcttgagctgaggactgggaatgcttacagggctctttctgctacttgtacttttatatttcacttagctccctaaatccatttcagctctaagtatggttaaatcctcccgtgatctggatttttaggttccccagtgaggatgtgtgctcagaggctttttccccctttcacactttgggaactcacagttttttggctatcttgtggcatttgcagcagaaagccacttctttcaaagggtctgtgaattttttcagttttcctggtatattcctgcgatggttcttggagccaaagttcacaatgtgagtctccagacactgttctgttctttctaagtgggagctgcacattagtcctgtctcttacctgccattctttttttctccctaacaactcctactttaagttgacttatctttgttttacggaagaaccyggaaggtaaacgtatttatttctttcaaatgctgagccctcctcctcattgttgcctcctccacttactaactatacttactccacttactaactacaaagctggtcttatgctgtataccacaggacttttatgtgaataattaggtatttctggtatgatagaaagtcaaatcttcaataagtaaagtctgggagagtgaagcagactttatatcatattccttactatacaaatgtacttagagtgaaggtctagtgtatgcttacacaatagcgcaaacgcataatgcttatgctagtcaattctgaaatcagcctttagtgagggtgtgagagtctttctataagacaatgctgcctaaacatttgggaacacacacacacacttggttaatgttttgaaggaaatagtggaagagtaaaaatatttgcctgaagggagagaaaaaagctttccagaatattaacagtaacacccatctgaacttcacagaaagtgtcatgggtgtcagtgattagaactcatcagatatttggctgtccttttcaaccagaagatcgatttgaaccagattaccacattcatggtttagttttgaagagagaaagaaagagagagaaaactaattatttgtctctttgttcaaaggcctttttgtattgtatatccctgaaaagctcataggggagccagccttcacatccattaaggttagccctgaaactgttgaatttgatctcttccatttgccatctggatacagtagagaaaaagctatgctacattgggttgctggacactatccagaaaataacatgtcagggcatcaaaggcttgaggcacttggtccagtctgtctaatgatcacaggcagggtttgctctccagttttgtaatatgttttattttttcagtgacaatatatatcccagcaaaatagatcacaagggttactgccaacttgtcaaagctaggatgcttccatcatagacttcaaaaaaagaccatattttaattgggcaaagctcgattgccacaactgaggaagctccatcgccctttatcctagtctatcccctttcttatagacagcacttactgcaagaaggattctaattcatagattgtttcatcccatccccaagtcccaaatttaaaatgtcattaatattgacattwtttaaaattgtattaagtgtttgtaagtgggcctagtatctggctagttaatgaccatactggcagctttccagaaatctgacaaccacatctcattattcacaccaactggagccaattgaagctgatttttcttttattctgttattttaaaatgtggatgggaagcaacagcagtggcatgtcttctagtctcctctgagattggggaggaggcttgcataataggacttataatatcagggagcatatggctgcatttaaggtagctggaagccatctacgctgtgataaaacaggctttggtttagttctttgcaggatgtacttaggaattcatttatagcttctgcagtaggtaaaattgtagggaattgctattttgtctcttacacagggatgggatggcaagaagagttgccaaatcctacccatgaaaattacttttcttgtggacagtaatggtcctcaactatactctgattactaggacaactcccaaatctcctaacctgaaccaggaagctgaagaagccttgctaagttgtgttgctaaggggtgttgtttaccttgttcaggttatctggaaggtccaaagttattatattctgctccaaactgatactgtcagtactcctatcttctcctcatttagggactttactccagaactttcttgttattmttttcttcttttagatgctggtattgaaaacaaacaaagtctcctccaaactataaaacaagcaaagcagtgttaattcttagcaatattatccctgctaagcattgtacacatactcatagcttccatttgggcactttcagactagtctgtccctttctgtaggttggcgacttgtttttcctttagcgtttacctgctctcagatcccctctctggtttaaaaataaaagaggaaaggctgttataatcaagtcattactagagccagacttcctggccccaccatctcctacctgagttacttaaacccttctgtgccttagtcaccttatctgtaaaatacaaataataatagtgcctatgttataggtttgttttgatagctaagtaaggtatataaagaaaagagcatagtgtaggagagtgctcagtactgtgtatatttactactgttgtttcttattagatataacttagaatagacaagtttacttatttttacctcaagcaagtatttagcatcttaagccttttattaattattgtaaatgaaaagagctmgaggtgtgctgaaagaattacagagattagcaagcaggagagttgaagcaagagagatccttaaaattatattattgtcttattatagttgaagaaatagcagaagcatagggtgttggaaagagccaagaggctcaatctccatgagaaggtaaactccaaaagtgcagggatttgatctttttgttcagttttgtcttaccagcacataaaacagtgcctggcctcatgatggtgacctccttatcttcagtcatctccttgatctcagcttagtccctcacaaactcccatgattttttttaaaggacatttatcttttactttttaaccttaaaaaaaatttactgccaatatctgtctagaccccttcctagtcttaaggaatctgctatctgagtgagctttggggtgacacaaaccctttctgctacaacggaagccaaattgagggatatccttactttctttgcccttaggtaaaatgagcaaggaaaggcacatgacctgggctcagacaataggtttcacctgcttgggcatatgactcttacagggggcaactaaaagacaaaggatgagattcatggttgtgktctaggccctagcagtatacagtggcagtgtcagcatcctgactgcgttgtttctgctactcagccttttctgctttaggtaggcaaactcaatttgttgcatacagtaagaaattttgaatggcttcaaatccagatcttgtcatcactaacagtagcataacttcacaaatatcaccttttagcattctaatctctaaaccctacctactgaccrtggactcacttagtcaactatgtttcaacctcatcatgtcacttatctattgaccttacttctttctcatgatgtgtcaccctattccttacggtcagtcatggtagtcactgcctttcaaatactctcaatccctttgcagtctcttcctctgttgtgtgcactcagcaaacccccacttactcttcactttcttcacacttatactcaaacagccaaacaagactgcagaagaatattatatattacagttagctaactttaaattccagaacaaaaactggaaatgggcatttactgttgcctggtaactttttctagtaaattggcttgccccactctctgaaactctgtgttatttctacttctgaaactctccttacttcccagacagataatgttctcacttcatacttcattaagaaaatagaatgagacatgagcaccgtatttttgtgttagcagtacgcctgtgttctctgttgttgcaagacacaacggaagagatgttcctgctcttaacattggttgctcagtccttctgtgttctgcatttactctctgctgactttgatgatttaacacctgtttttatattctctctcttctgcatcataaatgtctccctctctgctgggtaatttccatcaccataaaaactgctctgatatttcccaattaaaaaacaatttcttggctctacatctttctttactgttgccatgcttctctgccacctttcatggtaaacttttctaataaagttgtcagagttgggtatataaggaatttagacatctccacttcatcctaacaacaattaaaaagctgaacaggctagacgtggtggctcatgcctataattgcagccctttgggaagctgaggcggccagatcacctgaggtcaggagtttgagaccagcctgaccaacatggtgaaaccccgtctctactaaaaatacaaaattagccaggcatggtggtgcatgcttgttatcccagattctcaggaggctgaggtaggagaatcgcttgaacccagaaggtggaggttgcagtgagccaagatcgcaccactgcactccagcctgggcaacaagatcaaaactccgtctcaaagaaaaaaaaaaaatctgaacaaactcaaaaatcaaaccttcttagatctgtcaaagaaatgaggtcacagcgaagacttctgccccccaaaattggagatacagatatttggatacagagaaccacaatgtactggtataaaaacccataagcagaaacctccctaggaaccagtgaccgagcggggatatccaagctgtaattgaggaactcctggaggctcagcatggaaaactctgacagctgaaaatatgagggggactcagtcatgtggggaagcctacatttttgtgaattttccttccagaagttttaccaggttctcacaacaaatattagagaaaaatcctctagtgcttccagcagggagaaggggaaaggagtcattttgaaatatgccagagcactctttttaacaaggcctcagaggaaactattttaccagagactaatctactgaaatttggcatagttgaacctacctggaggaaggcagattcccaacttcagcctcttccagccatcctgtctcacctaagagggggagagagatgaaaaaataagccgaaaagcacttgcgaatttcacagttcagggtcacaggttcaccaaatcactgagacctaatcataagactgtagaatacttcatcaccccctacaacttgccactacactattaaaagcctgtttactgaagttccttttacctagtagattatgtccacctttgaacaaaaagttacaagacatactaaccagtaaaaaacacaatttgaagagactaaacaagcctcagaactagagtcagatatgtcaggaatatgagaattattagaccaggaattttttttgactatgattaatatgttaagggctttaatggaaaaagtagacaacatgaaagaacagataggtaatttaagcagagagatgggaattctaagaaagttttaaaatgctagagatcaaaaacattgtattagaagtgaagaatgcctttgataggttcattagtagggtggacatagttgttgaaaggacctctgagcttgagacaacagaaacttccaaaactgaaaagcaatgagaaaaaataaaagataaacaagaaaagaatatccaagaactataggacaactataaaagttacaaatacatgtaatgagaatatttgatggagaagaaaaagagacaggaacagaatcaatatttgaataaaaatgactgagaattttctccacattaatgttagacagcaaacacagatccaggaaactcagagaccaccaagcaagataagtgcaaaagcaaacaaataaaacccccaaaactatacctaggcatatcatattcaaaattcagaaaatcaaatattaaaaaaaaagtcctgaaagaagccagagggaataaacacctatagaggaataaagataagaattacaattgacttctcttcagaatccacgcaagcaaaaagagagtggagtgaaatatttagtgttaagaggaaaaaaaatcaatctggaattctgttccctgtgaaattattatttaaaagtgaagaagaaataaatactttcttagacaaacaaagatttagagaatttgttacaggacacctgccttgcaagaaatgttaaaagaagttcttcagagaaaaggaaattgatataggtctgaaatttggagctacataaagaaagaaaatgcatcagagaaagaataagtgaaagtaaaatggaaactttaatctttcttattcctaatttagctaatagataacaattcattcaaaataattatagcaacaatgtatttgattacatatgcatatatatatgcttatttatgcttatatataagggaaatgaatgacaccaatgatacaaggatgggaggaaggaattaggcatattttgttattactaggtatttgtaccccctgtgaagcagtagrtgttatttcaaagtcacttggattagtggtaaatgtatggtgcaaagtctagggcaatcatgtagaaaaataaaaaaagtgtaatagatatgctaaaaaaggaaagaaaattgaatcatataaaatgcccaattaaaaactacagaaaagtatggaagacaaaaataagaacaaaaaaaaggcagaaaagtgtggaagacaaaaataagaacaaaaggccacaagtagaaaacagtagcaaaaatggtagatgttaatccacctatgtcaataatcattttaaatgtcattggtttaaatataccatttaaaagacagattgttgaagtggatcaaaaaaaccaacaagaatcaacttatgttgtctacaagaaacccactttaaatataaagacacatatggatttaaagtaaagagatggggatataccatgataaaactaaataaaagaaactagctaaaaggggatcaactgtattaatttcagacggaacagactgaatgtcaaggaaagttatcaaggataaagagaaacattacttaatgataaagaggtcaattctctaaaaagacatgataatccttaatgtgtatgtgcctaacatcaaagtgtaaaaatacacgaggcaaaaactgatagaactccaaagagaaacagatgaatgcactcttatagttggagaaatggagagatctagcaggcagaaaattagtaaggccatagaactcaacactccataaatcaactgaatagaactgacatctatagatgatttgtatctcacaatagtagattacacatcttcttaagcttacatggaatattcaccaagatagaccacattctgaaccataaaacagatgttaacaagtttcagagaatagaaatgttacaacatctgaccttagaccatatggaattaaactagtagtcagtaacagaaagatgctggaaaatcctcaaatacttgatgattaaacaacaaacttataataacacggtgctcaaatataaaatctcaggagaaattctaaaatattttgaattccatgaaactgaaggtacaacttattgaaatttgtgggatgcagtgaaagcagtgcttagagggaaaattatagcattaaatgaatatatttgaaaagaaaaagatctaaaatcagttatcagaactttcaccttagatagtaaactagcaaaataaaagcacattaagttgaaaataagcaagtgaaaataaataataaattggagcagaaatcaatgaaattgaaaatgggaaatcaatagggaaaacctacaaaaccaaaaactagttctttgaaaagttcaataaaatcaataacatgcctcccaaaaaaatagtaataaaatcactaacccttagccaggctaagaaataaagagatgacacaaattacttatatcataaatgaaagaaggaatattactatggatcccacagacattaaaaggataataaggggatgttatgaacaaccctatgcccacaactttaataacctaaataaaatgggccaattccttgaaaagcacaatttgctaaaactcacagaagaagaaatagacaatctgaatgggtctaaatctgttaaatcaattgaatcaataatttaaaaccttccaaaatataaagtaccaggcctwgakgggttcgctgatgaactctagtagatgttttaggaagaaattgtaccgattctctgtaatccctttcagaagatagaagcagagggaatacttccaaactcattctgtgaacccaggcattaccctataccamtaaaagacaaaatacaaagacattacaagaagagaaaattatagatcagtatgtcttatgaatatggatgcaaaaatcatcaacaaaatactagcaaagtgaatccaacaatgcataaaaagaattatacaccataatcaagtgggatttatatcaggtatgtgaggctggtttaatatttgaaaaccaatgaatgcaatccatcacatcaacaaactaaaaaagaaaaatcacaagatcatatcagtagatgaaaaaaagcatttaacaaaacgcaacactcattcatgataaaaactctcagtaaaccaggaatggaagggaacttcctcaacttgataaagaatgcctgtgaaagacctgcagctaacatcatacttaatgcagagaaacttgaagctttctgctaaggttagaaacaagacaaggatgtcaccaccccttttcaacattgtgctggaaatcctaactaatctctctctctctctctctctctctctttctttttctatttctccaactataagagtgcattcatctagagagagagagaggcattatataggaaacaggtagaaggagactatatcagttgactgtatatatatttacagtcaaagaaaggcaatacaatggaagagagagtcttcatcaaatgatgctggaatgattagacatcagcttgaaagacacgaatctagacacagacactacacccttcacttaaatcaaaatggatcctaacactaaatgtaaaatgcaaaactataaaccacgtaggagacagcataggataaagtttacatgactttgggtatagcagtgacatccataaatgaaataattgctaagctgcacttcattacaattataaacttctgctctgcaaaacacaatgtcaagaaaatgagaagtcaaaccacagactaggagaagatatttgcaaaggacaaatctgataaaggactgttacccaaaaatatacaaagaactcttataactcaataataagaaaatgaacaacccagttgaaaaatgggcaaaagacctgaacagacacttaaacaaagatatacagatggcaagtaagcatatcaaaagatgttcaacatcacttatcattagggaattgcaaatcaaaacaacgagatatgactacacacctaacagaatggccaaaattcaaagcactaatacctccaaatgctggcaagaatgtgaagtgacaagaactttcattcacagatggtgggaatgcaaaatagtacagacaccttggaagacaatctggcagtttsttacaaaactaaatatactyttaccatacaatctggcactcatgctccttggtgttcaccaaaatcaattgaaaactatgttccaaaaaacctgcatgtggatatttgtggcagctttatttataattgctaaaagttggaagtatccaagatgtcttttagtaggtgaatggataaactgtggtacatccagacaatggaacactcttcagcacttaagagaaatgaactatcaagctatgaaaagatatggaggaaatttagatgcatattactaagtaaaagaagccaatcagaaaacgctacatattttatgatttcaactatatgacattctagaaaaggcaaaattatggggacagtaaaaagcctagtggttacccaggctttggaaaagggagagatgaatagccacagcacagaggattcttagggcagtgaaactctcctacatgatactataatgggggatacgtgttattatacatttgtccaaatccatagaatatacaactcccaagggaagaccctagtgtaaactgtggagtttgggtgattatgatgtgtcagtgtaggttcattgttaacaaatgtaccactatggtgtgggatgccagtagtggggaaggtgatatatatgtggggacagaggatatatgggaactccattttctgctcaattttgccatgaacctaaaacgtctctaaaaaataaatttattaatttaaaaagaactgttaatactttctctacttctgaccttctaaaacagcctattccaagttggtttttattccgttgtcttccttctacctatttcctacctatctttcttattaaagtctttagtaaccttcacagtgccaaatccaatagtcaatatttagtactcatattctttgatcagtcattagcatttgacacagttgactccaccctccctcctaatacacttttatttttttgagatggagtctcactctgttgcttaggctggagtgcagtggctcagtctcggctcactgcaacctccacctcccaggttcaagcgattctctgcctcagccttcctagtagctgggattacaagcgcgcattaccacaccggctaatttttgtatttttagtagagacagggtttcgccatgttggccaggctggtctcgaactcctggcctcaagtgatccgctcacctaggcctcccaaagtgctgagattataggtgtgagccaattatgcccggcctaatgcccttttttaatgccttggtttccaggacaccacatgttcctgttttactcctacctccctggctgcactttgtcggtcacttatcttggctccccactccaccaacctgtatgagttggcggctcctaagctacctcctgagttctctaccacacagtttccctcagtgagctcatctggtttcatcttttaaataccatgaatatgctgatgatttttgaattactgttccaactctcccctatgcatcagatttgtctccatttacctaattaacatttgtgtatagaagactaatastaagcatcttaaacttgtccaaaatagaacatttgatgataattttccatttagtcccatcacagaaaatggtcctaggtaccagttttaccaattaatccttagtattcatccttggtaccacccttttcctcagccccacacccatttcaccagcaagtcttattgaaattcccttccaggtatttgtcaagtctgtccacatctctccatttgcttgccaaaaataccctaatcaaatccactgctgctgcttacctctgctcctgcaatgattttcctgcttggattcttgactgccttctatcatttcttgatctagaggccagagtaatctttgtaaaatataaatctgattgaatcactcctttcttaaaaatcctcgaatcatttgccagtccaagctccttgtcatagcatacaaggccttgtatgatctgctccctcactgcttttccaacctcatttcctgctgctcttcgtcctgtgatcacttgatcactgcacaccaggaacactgatttccctttttgttcttgctggttttttttttttttggcctcttcttacaatttattatctcctatattatttaggtaaaagttcaaatgtcatgtgctccaaggtacttttcatgtgcgtcctatctaaagtagggaattctccattactctgttatttcaccatgtttttttttttttcatggcactaatcacattctgtatttatcattgttatttgctttcttattttttacatgtctctttatggaatttaagctccacaataccagggccacatattagatgctgaacaaataatttgttgaatgaatgactctcccactaatttagtgttcttgggcaatttggttaatttcttgaggcatcagttttttcatcagaaatgtgttgctgtttgacttttctatatttatatttttatattttatatttttaatattcttatgttatatgattctcaaaaggaagaaaatggaggcaaggacaccagtcaaagtttattgtaagattataggtataagggggaaaggatcctaatattatgggtattagatagtttaaaaagaatttgttacatctctatatattgacctggaaggatgtctatggtatattgtaagatggaaataaaagcagagtaatatatggaaatatatggaaatatggaaagtggaaataaaggcctggctcagtggctcatgcctataatcccaacactttgggcggacgaggtgggaggatcacttgaactcaggagcttgagaccagcctgagcaatatagtgagattctatctctatttaaaaatatattttttattttaaaaatatatttttaattaaaaataatacattttttaattaaaagaaaaaaatatatatttttcctttttaattaaaagaaatctattttttcttttaattaaaaaggaaagtagaaataaagtgcagagtaacatatgatcccaatgttgtttaaaaatgtgccctaacatatgtaaattgtttcatatttttaaataaagttatagataaatacacttgagtcttaattttgatggctttatttaggggtaatatgaaggaaggaagaacaaattttttaccttttaatttatatagttctatgttatttgacttgttaccagaattatttgacaattttttaaaatctagtatggtgaagaggagtaaaaagatgacattatggcctgaagtttcagtacaaaaaagttaaagtacaaattctcctttaaaccacaggattccttttccagagcttctaaaggagatattgggtcagtggcatatgataattaaaatagtatattattaactactaggtatgggcctgatattcctatgtctagctcttgtaaacttgattaggcccaaagctcttgacccaaatccaaatgttgggatgtgaattaccacctatctgaggtaatgggtaccagagaccaacttgagctactgcatgagggaagagcaagttgaggaagccagacctggccctagcgtaggcttatagggataacagaaacggcaagactcctctggtgaaaaagaaacaaacaaaaaaccacaaaaaccaaaacaaccaaccaaccaacaaacaagcaaacaaacatggaccagtaatggtccttgaatctggtcaattcgatgagcaattctttgacacaagtggtaaacaagatcagataaataaagtaagctctcttgttctcttttccgtgaatattacctgttgtagcagaaaaaaaagtagaaaactgctgctttagatccccatttattgagaataaaaaatgaggaaccaacaaagacaaaattagagaaatcagagtgtaaaatacaaacaacgcagtgtagcttcatgaaaatgagaggggagtgttttataggatgataataaacagtgtcagttgatagattcaaagagatcattgaagagcagcaagacaaaaacagcctattggattaaaggattaggaatcattttttgtttttattttagaagagctttagtaattctgtgggtaagaaagcagattgtggagagattaaggtagggggtagcttatagagagttaaagtggtggtggcaggtataaagttcttaaaggaatatttgggaagagtaggaaagggagaaatggcccaagatgggggtaaacctctttatatttccatagagtaggaaagacttgaaggatctgataaagagttaaagattaaagatggaaaaaacataaaacctgatgcagaaatattctgaagaacacagaaaggatagaattagtagcactgcgggaaagggttaatcttagagggacccctttctgtgaagtcaaagacagaggatggttatctatgtggaaatatttgcaagtacgaagtagaaaagttggtacaatgtactgaattcagtaaagtaagaactgaggttaccggttaaatagagagaagctcttgggagcttaagcagacggagatttaaaattagttctaagtaaaatagaccaatgaattggttgtgcttggcacaatcacaactggactatagacttctcaagggaattactatttcatgactgttgtgttcccactcctcaacacggtgtttggtacatggctagtgctcaataaatgtaaatggatggatgaatgaatgaggatctggtatttttattttaactaaatcgaattattgcccacccccccaacccccaccgccaccaccgcttccaacaagggcctgggtgaagttaaatgtaatcattaaactaagtccatagtggtctgcagtttgtaaataggacttaataaaatagatgattatcttttttataagcccaaaattgtgtgtgttggctttcttaggataaagggtagtggtaatattttattttggcagtgctggatgaaaaggaggagttgttagaactagcacacattgttctgcggcttgtagctctggaatatttgtggtttcagtggcccttaaggagcctgctctttcctgctcttgtgtcctcatcagaatgttccagtaactttgagatagttcagatctccctatttaaaactgaagaaatgactagcatgtttgttagagaggcttgggagcttgggttcaggaatcctgtgttagatgtgataagtgaacaccaagattgcagatttgaggacatgtgggtttacttcagtaaaagattttgatgaaaatgaggacagggacagacactgcttgaaaacataaataggcttatagtcttttatttttctatgagaataaacagaaaagtaattatgaaattatctcatttactcatttatttaataagtatatattaagcacctgtattatgcagagaaaaatgttagtaaaatgtgacttggtaactgggaaacattttgactatccttcataaaaagtaacatgactcttatattgtttttattttatttttatttttatttgtacaaatttgtggcatacatgtgaagttttgttacatgtatataatacataatgtgaaattttgttacacgtatataatacatagtgatcaagtaagggtacttagggtgtccatcatccaagtacaatacatttttgttaactatagtcaccctactctgctgccaaacattgaatttattccttttatcgaactgtatgtttttacccttcaacccacttctcttcatcctcccctctcacccacactcatccctcccagtctctgttatctatctttccactctttacttccatatgatcaaatattttagctcctacatatgagtgagaagatgggatgtttgtcttttggtgcctggcttatttcacttgccagggacggtggctcaagcctatagtcccagcactttagaaggccaaggtgggagtatcacttgagcccaggagttcgagaccaacctgggcaacatggtgaaatcccatctctacaacaaatacaaaaattaactggtgtggctattcaggaggctgaggtgggtgaatcacttgagcttgggaggtcgaagctacagtgagccgagatcaggccactgcactccagcctgggtgacagagtgagaccctgtctcaaaacaaacaaaacccccccagttctatccacattgctgtaaatgaaaggattttattttattttctaatgtctgagtagcataccattgtatatatgtacacattttctttatccattcatctgttgatgaacacttagattgattccatagctttgctattgtgaatagtgctgcagtaaacatgcgagtgcagatatccctttgatatattgatttctttttctttgggcagatacccactagtgggattgctggatcaaatggtaattctatttttagtttttaaagacatctccatacagttttccatagaagctgtactagtttccattcccaccagcagggtataagagttctcttttctccacttcctcaccaacatccattattttctaccttttctgatttgggtaagatgatatctcattgcggttttgatttgcatttctctgatgattagtaatattgaagattttttcaaatacctgtttgccattttcatgtcttcttttgatgaatatctattgatttcctttccctactttttaatgggattgcttttcatttgtttgttttgctgttgagctgagttccttgtatattctgggtattagtcccctgtcagatgagtagtttgcaactatcttctcccattcaacaggtgtctattcactctgttgattatttcttaaaccaaaataagctttgaagtttaattaggtcctacttgtctatttttgggtttgttgcctgtgcatttgaggacttagtcataaattctttgcctagccagtgtgcaggagagcttttcctgggttttctgctagtatttttatagtttcaggtctatgtttaagttcttcatctattttgagttgatttctgtatatggtaagagataagggttcagtttcattcttcaatatgtggctctccaattttcccagcattatttattgaagaggatgtcccttctccagtgtaagtttgtgcctattccaaatttatttcctaatgaaagttgaaataattctgatgctaaaacacacatttatcctctactaactagatgacattaggagtttgctgtttcttccttactgctgaagacattagtaagaccaaagcgttttcctccatattgcttttggttcttaggaatcttcgcagtggtaggaaaccctgaccccttgaaccatagcagcagcaggtgagcagaaaaggaactagatttcaaaatattttaagatgtgttttgttgtattgaagtcatcatrcaacatctgatattgattttgagattcttaattcattctttttaaagattgggattaaaaaacctaaacacatttccatgcagttttcccataaatcccatccattaactcaattcaaaacatcctgatcctgcagtgttgtgctgtgtttctgtccttgctgaattaggagtgctcttgggtgtctcgtggggtatgtgcagtgctgtcttccagaaaagagaaaatgacactgtattataagttcaatgtatactctagctaagggcaaaactagtcaaaaatcaaactgaatttatattgaatttccctatatacttgtgaatgcctctttcacagaacattgttaaaataaatatcagggccgggcatggtggctcacacctgtaatctcagcactttgggaggctgaggtgggtggatcacctgaggtcaggacttcaagaccagcctggcaaacatggtgaaaccacgtttctactaaaaatacaaaaattagccgggcatggtggcatgcatctgtaatcccaactactcggaaggctgaggcaggagaatcacttgtatccaggaggtggaggttgcagtgagctgagatcacgccattgcactccagcctgggtgacagagcgagactctgtcttaaaaaataataataaagcccgggcatggtggctcacgcctgtaatcccagcactttggaaggccaaggcaggtggatcacctgaggtcaggagttcgagactagtctggccaacatgggaaaacctcgtctctactaaaaataacaaaaattagctgcgcgtgatggcgggcgcctgtaatgctagcgactcgggaggctgaggcaggagaatcgcttgaacccagggggcagaggttgcagtgagccgagatcgtgccattgcactccagcctgggcaacaagagctaaactctgtctcaaaagaaaaatagtaataaaataaaataaatatcaggaaattatcacataacatctactctgaactttaaagtgagattacttgcactctaaggagagttgaggaactttataaagagtttatgaggtagcttttaagcacttattattctaagagtattttattaaatttaatgtattaggggttgttttgttttgttttgttttgagacggtgtctcgctctgctgccctggttggagtgcagtggcacgatcttggctcactgcaacctccacctcctgggttcaagcgattcttctgcctcagcctcccaagtagctgggactacaggtctgtgccaccatgctcggctaatttttgtatttttagtagagacggggtttcaccatattggccaggctggtctcgaactcctgaccttgtgatatgcccgcctcagcctcccaaagtgctgagattactgttctgatagttgtaggtattgttacctgaaagatggccagctgggataggcagtctgagaagggataatttgaaaattttccctactcatcttgggaaatggcctgcctctatcttcatccatcatggggactctgagtgtcatgggatttaagacgagacttcagctcctgcattctataagcctcatgtagtattcatttctacttcattsacatgcatatattgaatctccgctctgttggtgttagggataacagcatggttctttccctcgaggatttcactggctggcgagggtagtggacatgtaggaaaagtaagttacagtacaactatgtgctataatagagggaggacaaagcattgtagttgcttacaggagcaagtgactcatcttgtcctggggatttggagagtgctccacaaatgtggtaacagctgcaccaggtcttaaaagatatattgaaatttgttaggtcaagaaagggattccaggcagagagaattgcaagtgcaaagtcttggaagttagcaagagtatggaagtaaaagaagtatacaattcatggaggggaatggtagaagaaaaaggctgaaaaagtagacttgattcttattaacccagtagtgccggtggggtgggaggtcaggaaaaagttaaaattgtcagaaatatgagagaacttgaaaaatactttgttatataaaacatctgatcggtaattgggctattttttctgctacagtatttttaaaaatcacacatttctcatcaagatagaaaataaacaaagaaaatcacttcattataactcgactgatgacatttcaatagcattgtttttacccagctggggttccacctgtccacacaaaacagctctgttccacttggtacatacatttctcactgtcctttactgtttgatggtccagacatgagcatttacagttaccttataattatttgatagtaacagcaaaacaaaagtctgtgttatttttcccaaaaatgtccaggagtttaccagttgaggcaagcaatggtatcacgtgtggtaccaggtattttatcattaataacttttcatggtacagtaatttgtcatctaagtagatgaaaagtaatgcactttgaagatacattttcaaaccacgtgtttgaaattgtcaaaaatgagagcgctatttgattttttaaatggaaacattgtaattgtacatatttatggggtacaatttaatatttcaatacatatgtatatagtataaaaagccatattctattcatgctaattattttatctactaaaatgtagtatagagaataattatgtacaacatttaaaaatttccagttggggaaggaggagtctcaaaaactcataagtaaattgcatttaaaattattacagtttgagtgtgagtgttgattttatggtgaagctattgaaaaattataatttattgacttaaagcatatttgcaaaagtagaatatacccatctaaagatataaaatatataaaaataaaatcagaattgaaagtgtattgtttactgcaaaarggatatggtaaatatttcgctggtgaataaagtcaacttgttagagttgttagaaaagcaaaataaaatattaaggagaacattattttgacctttacatttacaattgattactacaagaatgctcatattccaaatgatataattgacattagagaaacaaaactttgttgctgcattactttacaattgaaatacatgtttcctcagtgtattaaacaatacattataagctaacttaataacaatttttaaattgtcatcatttatgtaagcaatcaggaaaggaaaggctctcttaattaaagaaatgtccttgaattttattaggcacaataagacaactgactaggagtgtagttattttataaacatacacagacacatagacacacacagagcaagtgcaaattagaaccatgatggtgccactaaacatgagtggaagattcaatgtgatggtaaaaatttagaggaagaactaagtactcgattgtgtcaaattctaaggtttaccagtgagtttgagaaactaaaaactcttcagtgtcccccaatactgacacttccttggtaacatcctctctgcatctctatatagattgccagtttctttacaacttgtataagaggctcaaagatatgacatacaggaagctatgtggtatgtcagaaatatattggactactggctgggtgcagtggcttgctcctgtaatcccagcactttgggaggccgaggcaggtggatcacgaggtcaggagttcaagaccagcctggccaagatggtgaaaccctgtctgtactaaaaatacaaaaattagccgggcgcggtggcaggcgcctgtaatcccagctacttgggaggctgaggcaggagaatcccttgaacccaggggtggcaggcagtgtggaggttgcagtgagccgagatcgccactgcactccagcatgggtgacagagtgagactccatctcaaaaaaaaagaagtcttttgttcacagtgaaaggaatgttgactttgaaattatggatttatattaatgttactataaaccaatgggaatggtaatttttaaacaaacttgctaaatattgagagactaaactactaagttaataaattatatatagcagtgtagctttctctytagatggtgtctcacaatggatttctgttgcttgactattttcttagtgaatatttaaactaaggtagtgactgagatttggtgatctggttaagtattttgaaacacattttgaataatatagcttagtgttaacagggaattaaatatgatttttttcttactcatttcaccttccctatactgtatatttggaatcgatcataaaaaaaacctccaaaagaaaattaatctgtataggactatttgttccccaaccttataggctgtcattcagagcttccagagattattgagataatcttttaaacataaagagggatggtgaattaatgattggctgatgatactggtttgcaaatttgaatttttctctctttttttttcctaaagttatttattacgtacaagaattctttgtaaaggaggaaatggagagatgtaggtcagaggatgcaaagtagcagatatgtaggatgaacaagtctagagatctaaatacaacatgaggactataggtaataaaattgtactgtatttgggattgatattaaatcagaatttagctgcttttgacataaaaacaaaagaaattgataactatgtgggatgatggatatattaatttactttactatagtaacctttttggtatctgtatatatcccataacatcatgctgtataccttaaatatatacaataacatttattttttagaagtttttataaagagcttcaaagaaaatttaaagacmtatttacttgtttttttaaagtaaaagaaatagtttactgcttatttaaaaaaaaaacaaacacatatctcaaaaccgtttgggctggggtaattatgccaaaaaacaatctcaagatttcaaagggggaaaaaaaagtccttttggagagcaataattgatcatggaagttgaaatagcgcatgccatccatactgcttcatctggaaaatggtatacaatcaatatttttttttaccaaaggaaataaatatttgctaagtttaaatttacatttttctgagagattacagcataatgaaaatttcagagctactgtttaaatggaagaaataaatggagcaaagtcaactatgtgcagtaattttatggaatcaatgcaaatgtgatcctagaactttgatcccagaacaaagtaacagcaacttcatctatgattatagccccttagttgatggctgtttgtttatttgacatggtctatgtaataatgcttcctgcctctcagcactactacctacatacagttgtggtttggtcagtcaccacaacccgtgcagaatacttttattctactctgcattgccccaggkcttgcacagtcttggaagagaaggccagtgtcctggatgtgaatttctgacagaaatagtaaccagattacagatcctgaacaactgaccttacttaccttatcagtttaagacattagtcaagtgtgctattaatagttttctaaggctgccataaccaagtaccacaaactgggtggcctaaaagaacagaaatgtattctttcacagttctggaggctagcagtctgacactgaggtgttggcagggcatgcttcttaagactctaaggaagaacccttccttgtctcttcctagccgctggtggctcttcgcaatccttgggattttcttgaattgtagctgtatcactccaatctctgcctccattgtcatgtggcccttttccctctatgtgtctgtgtgtcttctcttcttttaaggacacaagtcattgtatttawgccacttcatcttaactgattatatctgcgaagatcctatttacaaataaagttacattctgaagttctaggtagacatgaattttggagggacataattcaacctactacaccaagcaatggaagtacactagaaaaatggcatgtaattttttttatgttttaggctttaaattatagatcctaaagattactcagtggtttttcagtgaatatgatacttactctagtgttaggataatcaatgaaaaatagcatgttataaaatgttaaatgtaaaacttgaaccctatatttctcataagacttctcacttgcttaattaatgttgattcatggggataattgcccttactatgtctaagtaatctacatatatttgaagtcagattatgaaggattttatacactaaattaagggtttggatttgactctgtgaaaaaggaagaatcagtggagattcattacttttaaatgctggttcaggtaatagtgtagaagattaaaaaactcagaaaaaagctattgaaacagcacaggtgagatgattgtggtttagactacattgatggagatggagaaatgaaattgtattgagaaacatccctgatgatttagtaattgattagatgatgaagatagctaatatttattaagcattttctatgtgccaggcaccaatctaaacactttttatgtatcaatttgtttaattcttgcaattctcctataaatcagtactattaaaatttttatttcaggtgatgaaactgaggcacaaatacttgccaaagatcacatagctagtaattggaggaggcaggatttgaaccaacagaatctggtaagggaaaggaaggagttggggatgaatcttaaggttaggagactaggtagatggttgtatcattagccagaattgagaatacagtgcagaatcggggagagttgacctgaaggtcatgagtcaatagatttagtttgggatatagtattaagtttaagagctgctcgtgggaagtaagacaggtgatagtaagtactaaaataatatttgatgttaattaatttttacattaatttccttaataaagataatgtcattttaaatgtatacattatgcagctatggtaaaacatgaagaattggtgacgctggctactagtcttgaaaagcaagagtgctttaacagggtgcaattccttgtgataacgtattctcatatcatccctacattaagttaggtaggcaaacaactatcttacttggaactttgtgaatgttttggtcagtcagagaaagtagaggaattcctaagtttgtacccagccggtcattagtgaatttacttcattacaaactctctttatattctcactctttgatccacgcatcccaccaaatatacccctgtgttgctctaaccacggggaattctagattctagttcaaaccgggcagtttatgggaactgcttttgttgaaatgattaaataaagaaatgcctgtgaattatccttccgaagcactgcctgttttctgtgtcattttggtctcattaatcagtgttgcagccaggcagacactgtgctgtgtattttactgtcctcagcacagcggcttctacgtctctgctcccaggccgacacattggggaaaaagagagagggaaaccatcaatcttcccagttgcacatgtcagcagtgattccttcccccttcctgttggctgtctctctcaccacctgtgtttagaattagcactgaagctgctgcccagatgaataagaaccactgtccttgtcacctgccctggtatgggccaccacttctcaatgaaacaagtatatcaagcagtcagttatctttagcgtgagcagtgtaagagaatcacacaccccttagaagtttattataacataaaattaaaattttaggccatacattctagtgaatcaaaggggtaaaacaaataatttcttgagtgccttgctatcttctcataatctccctctgaagtacatatggctgaagttaatcgacctgggttcaagtcatggctccactatttactaggtatggaccactcatttaacccttctgtgcctcagttccttcatccttgtgaaacaagtacctcagagtttttatgaggatcaaatgagataatacatttatagctcttgctataatgcttcccatttagtaagcactcaataaatgttagctattattaccattaacctcaatgtccaaataataaaactgagtttcagagaggttacataatttgcaaaaggcgctaggaggcatagaaggattttgaacctagcactgtctgatcctcaaaactcaagtcctttagattacactacattgtttctattttagtttcattttacaaattacttaatatctgaacttaataaatcatttaacattgtctgtcttaatttcccattatttaaaatgaaaatggtaataaccaacattcctgttagtatgagactcttttagttacatatcaactaattcaatcagaccaccatatgccgaaaaactaggccgatttttcttttgagacaggatcttgctctgttgcccaggctggagtatggtggcacaatcattgctcactgcagcctcgatgtccaggctcaagcagttctcccacctcagcctcttgagtagctggtactacaggcatgtgctaccatgcctggctaattttcctgtatttatttgtgtatttttatttttttctggtagagacaggatctccctacgttgaccaggctgatttcaaactcctggctcaagtgatcctcccacatcggcctcccaaagtattggcattacaggtgtgagccactgcatctggcccaggcttatttttaaaatttggtgacagaaaaatgacatgcgttttttaaaaagttaaacaatacaaaaagtcaaaaaggaaatcattactcccatttccttgtataaccactagtaagttaggtatgtaggctgtcttccttgtcagcatttatctatttaacaaatgtctatatagaaccttcaggggagtactgtcattcctcccattttacagctaaggaagttccgtgatttgtacaaggaagcacagccagtgcacaagaaggctggcactggactcacatgtctgactctagatttgggctcctcacctccaccctgtgccaattctcagtacttaacaggacctaccttcgtatctattccatagtatttcattatataaaaagaaaactataacttatttagtatttcccctagtgatggacattagttgcttataattcttttttttttttcaactttaaagttcaaggctacatgtgcaggatatacagagttgttacatagataaatgtgtgccatggtggtttgctacacagatcatcctgtcacttaagtattaagcccagcatccattagctattcttcctgatgctctccctctccaacctgacaggcctcagtgtgtggtgttccccaccatgtgtccatgtgttctcatcattcagctcccacttataagtgagaacatgtggtatttggttttctgttcctgggttagtttgctgagaatcatgtcttccaactccatctatgtccctgcaaaggatatgatctcattcctttctatggctgcatagaatttcatggtgtatatgtaccagtataattcttttgtaattaaatgatcagggggaacaccagatcttcttacattcttgtgtgagtatttctataggacagatttccatacattgaatggttgggtcaaaataaaataaaattttgatctccagatatggttagattactgagagcttattctgtgccagggttatactaataaacttgtcacagtcctccgaaccaccctctgagataggtactattattatccctattttgtacatgttcaacgccacataagtaactgggcaaagtcttgaatcccggcagtgtggcactagattctgcttctcagccatggtttataaccaagctagttatcacaatcatattttagtgcttggttttgtcattcttcgaacttactataaggctgagttaacaacctgagctgacagaagggtctgatgatgcaaatgtggttggaacaccctgtagtcttatatcagtctacaggttggatgagaaagggagccatgattagctggaacatgagacttatttgctcttggaagaggtgaaataacagtcaaaaaaattcccttttttgtaaactattttatgccaggaaactaactttagaaatgtgttttcctgtttggattgtgagtactttgtaagaaattcacactgtctctcaaaggttcagaacacttgagatagggaattatatcatacattatatataagaattactggcatctcagcttcacttagccaaggccacatgatattagtccaggtcttggccaaccaactgagctaaccatgagacccacttacagtgctcgagtgttgaatccagactttctggtaggaaagatcagaaggaagtagggagtttgccaagcagggacatgggtaaaaacagtatctctatgcagagataattttgtctccaatccattactgatgttgaacactcctcagtggtgttacttccttggtgatgtccaggctatatatgctttctgaatccctgagccatagagatttatggaattggactttgccaagtaagtctacctagccatcgaagatagcatgcctacttgttgtcatagatgtcttctctcaccagcatagaggctacgaccacagcgtcataatcttctgtccttcgtggctgccgcatgtaatatccaaactgctgggagccaaaggggcctctgcctatacatgattaaatcattgcattagagatttcattaccttgaaatgtaaattactagcaagtgaacttactcttcacatttttagtccttttatttgtgtgtgtgtgtgtgtgtgtgtgtgtgtgtgtttcagtgtttcctagcaggttggcagctttggaagataattatgtagcagttggcttagaacagtggtttctcattcatggcttcatgttagaatcacctggggagcttttaaaactcccattgctcatgccaaatcccagactgattaaatcagaatctctgggggtggtgcccaggcatcagtattttttaaagctcccaagtgattgcagtgcagccaagattgagaactgttggcttagaagggaccttctctttttcattcataatgtttttatctgtacctcattttctgcagttgaagtgaattttaagactagattattgttgcccaaaaacctcgctcaaactttagcatacatcagaatcactgaagaggcttgttaaagcccgggccgcataaattttctcatttcttcttctgggataagccccgctcttagaattcctgatttagtaggtctgggttggaacccaagactgcatttttaacaagttcccaagccatgatgctactgctggtactggaaacacactttgagagcctctgctgtaatcccttcctctcaccttctttctgctctttacttttccaccagcagtggccagggctgctgcctctgacagtccatacaatatcaataagaaaggcaattaatgcatgaggatgtttaacctgttactccacctcaaagtaatcatacaatctaactaaaaacaatttactgtatatgcaaatacaacctcctctgcatgcataattgctccccttaagtcctttctaatacaaaatcaaagccaccactgaatagatttctggtgtccaaaatggacctcggattccactttcccacagaaacaattttatggatgctggttaggtacagctgaaatcatgctgttaaaaccattcttcaagaatattgtaggctcagagagactttgatggtctgcttcccatttaaagaacccaatttctgagtttcaaagaaccaatttttaaacaaactcttagaacgtaacttgtttaacaattgcctgcaactgaaacatatgacttattttctttatagttattttaccctttacatttggaactaaagtatgggagaaaggatttgtcatgattcagttaacatttataaggggaccacaacatacctggcactgtgctatttactgggtatataaagaaggaaaagatagtccctgccctagaagagctcatattctaggygggaaaatatatctatggagcaaataaaaaaatatttaccaagttatcaatgtgatatgtgcaataatgaagaattgatgaaggaggcatctgttcttctgagtgagagagagaaagagagacattggtggtgtgtgtggtggagcatggaacaggtgtgggtgtgtttggtaggaggaagaagcatgtttaagagtctcagaatcagtgagagattgttagggcttaatgaccaaggagagttccccacgcagaaaagaggtgaaagggcattctaggatggtggaagagtgtgaatgcagagaggagtactctacagaagaaaggcaagtagtcagctgagttccccaggtggtgtgattggagaatgactgggaagggcattgaccaccccacaaagtcagagtcttgtctcagaggaagaaatgagaagagttatgctaagtcagtatatgtgatatttgcacctctatcccatattttagtatctttcttctcctgtatattccccaataccctgaggaagacagtttcaatttcaacaaaatattaatactttgaaaatgtctgaaagcggttttcagactgtgctctgagaagccccctttgtgcttgactggggtgaggtcaaaagagcagtcagggacccaccagagctcccccactgactctgctattatccatccacctctcaagcttttctttggacaattccacttattaggcacatctaagaatattatatttgaaaaagggtacacagttagaaaagtattaaaactagtgtaattaatcctcgcatgtttagtaacagtctgacgacttggtgtggatagccacatatctcagctgctggccaaaggatgaatgttctcagataatcagctgaagaggggaatcaggcaggtgtcaatgtggatgtgtgagcagtgataattgttgrtatgataagcctttagttggccacaagagataatgaaaatatcatatacccccagaatgaacacttgaaaatcaatgttagaattttcttatgaaggctgggtgcaattgctcacacctgtcatcccagaactttgggaggccaaggcaagaggatcacttaaggctaggagtttgagaccaatctgggcaagatagcaagaccttgcctctacgagaaatttaaaaaattagccagggtatgtgccacactgccttgcctgggcactgatacctgaacgctgagtttgggcccgtggagatgaaccctttaactaaggtgaagctgatcaatgagctgaatgagcgagaggtccagcttggggtggccgataaggtgtcctggcactccgagtacaaggacagtgcctggatcttcctgggagggcttccttatgagctgactgaaggggacatcatctgtgtgttctcacagtatggggagattgttaacattaatctcatgtgggacaagaagactgggaaatccaaaggattctgtttcctctgctatgaagaccagaggagcacaattctggccattgacaattttaatgggatcaagatcaaaggaagaactatccgagtggatcatgtgtctaactattgcgttcctaaggactcagaagaaatggatgatgtgaccaaagagctccaggagaagggctgtggggctcgtaccccctcaccaagtttgtctgagagctctgaagatgaaaaaccaacaaaaaagcgcaaaaaaagacaaaaaggaaaaaaagaaaaagagacaactgactgggaggtacaggcagagcaaccatcctcttcgtcacccagaagcaagacagtaaaggaagaggacaaccctggccctaagaagcacagcagcaagaactaggagagrgctcagaagtcagtgcccagggaggggcggaagctccccaaggccaggactgcctactctggttgggcagagaaccgagagagggagctgaagaaggrgaaacccaagcacgagcacaggtcctcaagcaggagggaggcaagagaagaaaagaccagggataaggacagagggcggagctcaggcacactttctagcccgtacaacgggcgttctgaagggcgtagtcatagaagtagaggtaggagctgagataaatcccataggcataaaargacccagcgctgccgggagcaggagtctttgaattccagtgactgtaggcgtcactgaagactgttcagctgctcggtagatttggaaataattatgttttttaaatgcagtcaaattcagttggattgttactatttttgtatctaaaactcctggggctggattcttttaactccttgagtattagagtcattgagagggctgcagtttcaacagctacatatcctagatattcttcgtaccattcattgtccctgaaccagagtacgtgccctgaatgttgattcataaatatggctcttgaacccgtagaaccaattgaagatggaattttcaggaaagggaaaataccagataattccagaattctagttttgtgtttgatgtttagagctcagcatcgtgggacctttccagttactcggtttggacagcttgatgtgaatgaatrggataggatttttaagatcaaccagctccatgcccaaaacctcctgtttaaaaaaatgtttaatgtcttttctttttcmttacaacttttttgtttgattggcctctttccaagttttttccttgcaacgtatttattatttatttgtattgaggtgaaattcacataacataaagttaaccattttaaagggaacaattcagtgacatttggtactaaacatccacaatgttgtgtaaccatcgcctctgtctatttccaaaacattttttatcatcccaaaatgaaaccctgtacccattaaacaagaactctccatttcctccctcctccccatccctagcaaccaccaactgacttcctgtttatgggtttgcctattctggatatttcatataaatagaattataccaaaaaaaaaaattagccgacgtagttgtgtgtgcgtctagtcccagctacttgggagggtgggtggactgcttgagcctaggagtttgaggctgcagtgagctctgatcgtccacagtactccagcctgggcaacagagagacactctgtctcaaaaaaaaaaaaaacatcgtatgaggaaaaactaaatttttaaaacattttatatcattttttgtacttttaaaattgtagtgcttcttgatcgattacctgtacttactgtcctgttcaagataataatatgctgtgttagttagtatgttatggcaagaatatgacacttgctgatttggtttagcaagtagtgttattaggaattaaaatattttgcactacatttaattttctaattatttatgtcatgtttagataattgttaatttagttttaagcatctaagacaaaaaaagacttgcctccttattctttacttacgtataacctttgcatttaaatatagattagctgccctgaggtgatgatgtaatccttcctgggagccaaagtgtcatgactctatattttatcatttcttcctgctggggagacagaaaaaaagacctgaagaaaatagcccaaagagatgtttaggtacaaaagaaataactacagaagaaaagaacagtataaaattaaaaacctggtgtcttagttcatttgtgctgctataacaaaatactacagactgggtaatttatgaagaacagatacttatttcttacagttctggaggctaggaagttcaagagcgaggcaccagccttggtgtgtggtgagggccgctctctgttttcaagatggtgccttgttgctgcatcctccagcaaggaggaatgctgtgtccttacatggtagagggggtggaaggacaaaacagtgtatactttctctaaatctttcctttcttttcttttcttttttggagatggagtagcgctctgtcacccaggctggagtgcaatggcgctatctcatctcactgcaacctctgcctcccgggttcaagtgattctcctgcctcagcctcccaartagctgggattacagacatccaccactgcgcctggctaatttttgtatttttagtagagacggggtttcaccgttttggccaggttggtctcaaactcctgacctcaagtgatccacctgccttggcctcccaaagtgctgggattgcaggtgtgagccaccacacccagcctgaagcctcttttataagggcattaatccatccatgagacagaaccctcatgacttaatcactttctaaaaggccctgccttttaatactaccacagtggggattttcaatttgaattttgagggggtcacaccttcaaaacatggcacctggggaagaacattatgtggtgtggtggccagagcactggagttctgaattgtggctccagctgtgccactagttgtatgcccttggccttttcattaacatctccatggtacactttccccttctgagaagtgtgttggggagaggggttgggtgggagtgggatgcttgaagccaagaagttctaaattgcattcagttcagtgtgatggaaggaatatagaatttggagtccagtggcaagagctcagatccagatctgactcacctgcctgtgactttatgcaggttatttaacttagcagtgtccttccctagaaaatgatgcctatgattcctaccttcactacatgagatgaagtacatgaaagggccagggcatgtttctgatagctaaatttcatcacaagaaggaaaatacatstgcaaaagcattccatcacatgatagaaggatggtaggtacagcacgtgtaaggaaaatagatgtgtaactcttgaaatttgaaaatggcctaaataagcctgtgggggaatatttttaagaattaagttgattccttttaaactcttttactgaactaacaatacatattaagtgcttatcatttatgcccttaaggagctcacagtctaattggttagtcactcctttttctttctttttaaaaatatttttccttcagttttaattgttggcctccatattttttcttatttggaggtgatgtaggaccttctttctcttatactgaattaatatttactctattgattcctaggtctgagcatctggttttatttctaagcagatgcttagaaatgatgaacccatttttcttggtgctgagtgagcatttcttaacagacctggactctccagtgctttccggaggaaagagctgactgtagcagaacaatgctgaggcatggccaaaccttcagaggagcaccagtgtcacgccgggtcttctctgtttcagctcttcaatccttaattgccaatagaggcattttcaagaaaatgttgaagataatttcaggaatgtaggattgaaatagtagggcaatgtagatgatagaattgagaaacactaacagagctaaggagtgacagctttaaacaatattttaaaatttatatacaatgagaagaataaatagacttatagaaagagattttcatcccaattacctggtaatgttattgaatacttttttattacaatctgtgataaaatgccatttatgtaaccartaagacatagtgtggccattgagccaagtttgtggtttacctttgactgtagttaaaacaagtgtgatgaatgaacaattgctgttacagctggatacaagcaggactttgtaagaagagtcttgaaatctttagttgaagtctgtttctcaccactgtactgaagctgaaagtgtttcaaagctagtaggcagccttcttttgatggatcttattcacttgaaattaaagacagaagctcycctaatcacaaaaattcttttgccataattaataacttgggaattttcaattgcttttgagtacagtaagaaaattaaggaaattacacattttggatgtgctcagtaccttacaacaggaatagtttcagctatgtctgtcaaaatgataagtatgctctacctttgatttgaatacccaccctctcttctagtatatgtcaaatcctagagctgaagctccccagggatttggtactgctggttctgttataaaaatgagccaataaatgtataggctggaagtggcatttaccagggaaatatgcctgaaatgaaatgaagacctactttctaacatgcttcttttttaatcctctgcatactgtgatggaattgtaggttgatgctccaggcttccccttgaatgaatgcctgtgggctaggctagaagctgttttctttgtggtttgtctcttgtccaaacccatgggaagcccaagctcctttcgttttcattcttttctaactctagtgcttttgaacacagaacccccatcctcccaccacccaaactccacattccaaccccatgatttcatggtacctggcatgtctcccctgccatgccgtcaggccgcctgctgactcctgcagagggaacagacgggaacataaactcactgcagaagagcaggatgctctctgtatatttttaagaccaggtatccagttcccatttagaggctgtatttttttaacagcgccttgaaaattgaacaaaacacttctcgttggtctcattgcttgataatatcattccctctgcactaatgtatagaatcccaggaactagagaatggaaaagatgtattagatcatttctagcccattcccactggtcacaatacttttttcccacagtctcttctctggtgcttttctcttctagttttctcaagaatttgttttctccatttctcctggggaataatttctgagtttgaagatggaggaatatatgtgaaaatattcctattattttcaacttaaaattcctggtctttataaccctttacattaccataaacagtcccttatcttcctaggtcaagtatttcaggatggtatttttttcctttccatttattaacttcagagtttgtttttctgctttgctttctctcttcatcaatcagtccctaaagcccattaatcatttcttactgcactgaaaattcctttgcttattcccatatcaggaatccagagctggttagggttcctaggtcctggaggaagcctcgctaataggtactcattctatgctaacttctctctctctctcaattctcaagtaggaattattttaaaaatattgtttctagattatgatttggggatttcatcacttgaaagccttttatgtgtgtgtttgtgattttgagtgtaagattatatttgttctcaattacctgaaagatatttttcatatcctcagagccacagatcatttgggtttcctcctcagttcctggatcaagcacaattctggaccatggaactatgatgtagcattctattttagggctatcatcttaggagttgagaggaaaatagactatatttgtaggatttggaatacttggggaaaaggaagtgccaaatttaagtaaccttggcactcacatatcaaaagtagattagctctcaggagctagcattaggtataaaaaagacttaacatggcttgtggcttcctggattggaggactcaatattataaagatgtcagttctccccgaaacaatctatagatgcagtgtgatctcagtcagcaaccccaaccagcaattgcagcttctaatctgatctaaaaagaagcagcaaaaaatgaacagggtttttttttctcttgagacttgacaagatgattctaaaatatattgatacgtataaagggccaaggatggataaagtactcttgaagaaaaagaaggttgaaagcctcactttagcaggttccaagacatatttttaaaaatcaatgttatactgacacagtgacagacagatagactaatgagtcagaattgaaagaccagacccttaccagattcttcatagagggatccttgatttatgatggygatggaatttcaaagcagtgggaagagacagtcttttcaataaatggtgctagaataatcagatattcatataggaaaaaaagaagaaattagatgcttacctcacaccatatgcaaaaaaactccagatggatacagacctaaatgtgaagagtaaagataaaacttcaaagtgcacacacacacacattttgtatatgcatatgtgtgtgtgtgtgtgtctagctatatgtatgtatccatatatgcacacacacacacacacacacacgtgcaccttcrtaactgcagggtattgaaagatttcttctatgatacaataatctgttatcagaagttatatatctgattcataaaattaagtacttatctttgtcaaaagataatataaatagaagacagccatacaataagacaatatatgccctacatgtaattgacaaaatattarcatctagaatatgtacagattctgaaatcaatacaagacaatccaatctgagaaaaacaggcaaaataatttaaataggctcttcatagaataggaggtaaaaataggtagtaatcataaaaagagttcccaacttctttaataatcaaagagagttaaaccataatgagattctacctcatttccatcagattagctaaaaataaaaagactgctaataccaagtgttgatgaggatatggaacaacaggaacttggtagaaagtgtataatgttacatacttaggaatagttcactatattgaagtactacaattgaagatacgtatacataccttatgactcggcaattctactcctagatatatacactagagaaacttggctcataatacattaagatacctgtataataatggtcttttttgtccctgtaattttttattttgcaaatttttaaactgactgaaaagttgcaaaattaatacaatgaatataataaagtcttaatagatggtagctaagcaaagcatagtagctagtagagagagcatacatgggctttgaagtcagtgatatctggcctgaaacctcaactccaccacttactagctgtgtgaccatgggcaatctagttaaatctgtgagcctcacgtctctcatctataaactggaggtaataatatgcctaccatattaggtattaaaatgattaaatgcattaatatatgtaaagcactgggcataaatgcttgcaacatagttgttcagtaaattattgctgctattgttttgctgtggtggtggttaaaaatgataatgatgcattatattttctcagggccttttagttacagtatatttattgatacatactcatttttggtttttcactatggaatgtattataaaataattcaggggaaaaatagcaattttttttactttgtattgcattttttttcttttcattttcctattataacttcagtattagaaagtacaaaccaaagggaaaatatgaccagagtaaaaatgctttttataatttaaataattatgtagaattaaaatttccttttgaagaattgaaaacccaaatatgattttattaaaagtaaaaggaaaccaagrcatagaaaatgtaaataaccttattaagaagtaatattagaaatagagtgtatgttttctaatttctagcccaagatctcatacaccaaattataatatcaacaatataaaaaaatcttaaggcaatagtagtagcctttagcactaatgctaaggccttcatttccttaactgcaaaataaattaaatgacatgaaaaacccttgaggcccctttaatctccagtgaaatttcattctatgtctgaaggcttcctcgttgaccaccaaacctcagttatcttttcctcttgggaattcctctctgaaccctattctgtatcattccaaactggtcatgatcatgttaccatgttatacctttacttatcttttcataaacaataccctctatctccaattagatcacatgctcttggggatgcagatcttttcctttttttttttttttttttttgagacggggtctcgctctgttgcctaggctagagtgcagtggtgcaatcttggctcactgcagcctccacctcccaggttcaagcarttctcccacctcagcctcckgagtagctggsattaaaggtgtaccaccacgcccaggtgatttttgtatttttagtagagacggggtttcaccatgttggccaggctggtcccaaactcctgatctcaggtgatccaccctcttcagcctcccaaagtgtcgggattacaggcacgagccaccaygcccggctgcagatcttttcttatatgtctttgcatttgtmcatgtttgagtgcaaaaacatttttartatcatttttttgtgcctagtagcacctagcatagtgatttacagtgtaggcacaaaataaatggatgatgatgactgtcagattgtagtttacaaaaatataactagctcccatagctatgataacatgggcataggattcatgggattctgcctcaaaagcaaatatgcttgttttcctttgttccagaaagacagcaagaagcgagtattttccggcattcaacctacaggaatcctccacctgggcaattacctgggagccattgagagctgggtgaggttacaggatgaatatgactctgtattatacagcattgttgacctccactccattactgtcccccaagacccagctgtccttcggcagagcatcctggacatgactgctgttcttcttgcctgtggcataaacccggaaaaaagcatccttttccaacaatctcaggtcagcttctcagattagaactgagaaaactcttatgtgtagattatttgaggaaaaaatgttgaatggttcatacagcccctgctcgtgatttttaaaaagtgtttgaaggtgactttttcaaatgtgatttttttcagcttaatgttttacttgtatttatatcattaagtatcattatattgcaagagtatttttcagcttttcctccactgtattcggtaagtttatgatgcttcatataccaagaattgtgtttcattagtacttctagccctggaattgttttgctmtgctgggttgctttcaaactgattactttgtgttgttgactaatctccttgtgatcaaggatagaagttagtgaccaatagttttatgtaattccaatgttgctttattagatgttctatttagaaggtctgttggatgattcccattgttcattctttwtataatagtttttgagaagatttgatagcacaagttgggaaattggaagacaaagtcccagtgtgttgtgtctaagccaagaaaggcttcatagtaaagccaaaatatttgactcatatcttcactatggatgaatcagtttattcttggacaggccgatagtctggcctagagacaaggcaatcaagatacaccctagaaaaagatgaaaattctaactagatcatgccttcattatgtatctgctttaaccttaggacaaagcccagccaaggaatggtatgttatacatgctatggtacatgttaacatgcatgtatatatgcaaccttccttgattgtacatttctatcattatttttatatatgttttgttatacataaaacttaatgtaatgattcttacagagcagacagttaaaaaatatgtgataaacgaaaagagtataatgatcccttggcatccaaagagtgttggctccaggaccaccaaagctaccaaaatctgcagatgctcaagttccttatataaaatggaatcatatttgcatataacctacacatactctctcgtatactttaaaccatctctacattacttataataacctaatacaatataaatgctatgcaaatagttgttatactgtattgttttttaatttgtattatttttctatcgtggtattgttattttttgatgcytaaatacacactgatttcatatatatrtatatatatacactaattttttaaatttttagagattaggaaggtgtatgtgcagttttgtcacatggatatgttgtgtagtggtgaagtctgagcttttagtgtacctgtcacccaaatagtgaacattgtactcaataggtgatttttcaaccaacatcctcttcctggcttttggagtctctagtgtctgccatttctctctatatgtccatgtgtacctattgtttagttcccacttataagtgagaacatgcaatatttgattttctgtttctgaatgatttcacttagggtaatggcctgtatttcatgttggcctccatgttgctgcaaaagacatgatttcattccttgttatgactgtgtagtattccatagtgtatatatagtggcggtgttatttttattagttgttttttcctaatattttcaatctgctgtttggttgagtccatggatgcagaacacacaaattcagagggccaactgtatgtttaaaaaataaatgcagttatcaactttgttgccagcttgtagataatttgataaaataatagaatctgatctttaaaaggaccataaagtcaatttacctcaacttcattccttatagttggtcaggaaggctttgcttacacatgacttttcaaattcagcgttggacagatccagttactataaaatacttgcttttactgaccaaatatctacctccatatagtttccattcattcatttaatttctgctctgtaaaaaacaataaatcaactctgtttccacacaactgctcttcaaatacttggaaagacatttattatgtaccatttgtatcttaccccgtaggtccttactgtataggtcttgccttctacaaactagctgtccctgggtctctcgccttcttggtcatcctatctcaaaagcactctcaccttctttctgaaaagaatgtgcctggagcttcacatccattgccaatgttggagagctgttcatcattagagccactttttgagtcacctaatgcattttgcaaagcacatcatcttcacttcatctaagctgtttttaatacaagctggcttttgatccttagctgatactatttctaaaaattgtattcccagccacgagtacctatttccatacttcttgtagatgaatgtctaatctccacaaagtaaccacttgccagattgctttttaaagtgatctttaatattaaaggcttatttacaactacatcctatacttgcactttgagctcaatctctcaggaatgattaccatagtataattttttttcactttgtaaaggatttttagcagtgatcttcataagcatctaaaatttgcaataattgagatatgttcttccatgtggaactttgttgttcaaaatagcaattgaagaagtaacccacaatatgggagactttgtaaagacttccccattaaggagggacaaaattcaccttctcttaaaatggaacctaatgagctcattgggtctaggtcagagagtggaagggacagacttgactggtatgtgcccgtcttctcctcatagccttaatgcagttgtaaagctgttttataattcacctcctgccatccctcacttcagctccattgtggagaattttgatagtttgccagcaaaatttaagggaggtactcatcttgcctacattatacaatttgtctcacaaaggcaatatgaaaaatttcctcaggtgtctttgtaacctaagataaacttggtcttagccatttcgtcctttggctcaggcaaccaaccttactacaactctatggatggatggatggatgggatattttatcaggctttctttccccctttttaaaaaatgtaattttatttaaaaatatttaaaaaaatttataacaatagagagagtagtatactataccccatcacttgttaacatttcattatttgtctcactgatgttactttcttttctttttttttttttcttttttgaactagagatatggtcttgctctgttgcccaggctggagtgcagtagtgtgatcatagctcactgcaacttcgaattcctgggctcaggatcctcctaccttagccacctgagtaatagctaggactacaggtgtattctaccacacctggctttttttttggagagatggggtctcacaacgttgtccaggctggtatcaaattcctgagctcaagtgattctcccaacttggccttccaaagtgttgggattataggaatgagccactgtgcctggttgatgttattttctttgttgaagtatttcaaagcagataccacacatcatggcattccaatccctaaatattttagcatgccactataaattcaggaaattttcttacataaccataatactgtaatgacgcctaacaatgacaattccatattatcatctaatacccaaattaccctgactctcccaaaaatgacttttatagtaggcttgtttgagtgaagatctaccaaggttcacatattacatttgattatggatcttaagtctcttttttttatgccttttgatttgttcatcaaattttaatttatttcctgtaaagttagtcctgggcttaaaaagaattaaaactttgattttttatgcttctactttttttcacacctttgatgtattgatcaagttttctgtttgctataaagttaattattttgaacttaaaaataaaccttagttttttagttgctttctctttacactaatctgtgttaactgatggttagtgactataaactgctgtcccacatagttgctcatcaccattttcattaatttgagtagaagctgtgcttacctactgcccgtggattgcctggaaatgaacattagacatcagcttctttagaatggccataatgcttcagtttgttcatgggtgatgatggaaaggtcctcctcatgccttatcttagagccatgaaggcatgtattggcttttgcttcttagaaccattttcaagtagaagtataagtgaataaactagtcttctggaaacagttattatcttagccacatgaccccattatatacagagttctagtaggtgaaagatcatcatggtgatgacttatgttttgtaatacaaaaatcaagaaaaaaagtctttttttctttttcttctttttaacaggcaatgctaggaagaattcttttttctttattttaaattgacaaataaaaattgcatatatttatggtgtacaacatgatgctttgaaatatgtatacattgtaaaatggctaaatcaagctatataacatatatattacctcacatacttagctatctttaagtgattttcaggtatacaatacattattattaactayggtcaccatattgtaccatagatctcttgaacttattcctctcgtctaactttttttgtgtcctttgaccaacatcttcccatttcctcttgccccattctactgtgcttctatgagctcgattttttagatttcacatgtacgtgagcttatgctgtatttgtctttctgtgcctggcttatttcacttaacaaaatgtcctctgggttcatccatgttgtcataactgacaggatttcctttttcaaggctgaatagtattccattgtgtgtatatactgtattttctttatctgttcatctgttgatagacacttaggttgattccatattttggctattatgaatagtgctgcaataaacatgagagtacagatgtgtctttgacatactgattttctttcctttgtatatatacccattagagggattgctggcttayatgatagtcctgtttttaatttttttgaggaaccaccatactgttttccataatggctgtactaacttactttctcaccaacagtgtgcatgggttcccttttctccacatctttgccaacacatattatcttgtttttgtttttttagacggaatctcgctttgtcagtgcagtggcacaatcttggttcactgcaacctctgcctcccgggttcaaacaattctcctgcctcagcctcccaagtagttgggattacaggcgcctgccaccaagcttggccaatttttgtatttttagtagagacagggtttcaccatgttggccaggctggtctcgaactcctgacctcaaatgatctgtccaccttagcctcccaaagcgctgggattacaggcatgagccaccacacctggcttgttatctttttaataatagtcattttaacaagtgtgaggtgatcaatctgtatagtcttcagtagtgggggagctgaaaagaaaataatcatatcattttcagatttataaaaaaatgcttattaggaaactattttatttatttatttatttatttatgacagggtctcactctgtcacccaggttggagtgcagtggtggagtgatagctcactgcagccccaaactcctgggctcaagcagtcctcttgtcacagcctcccaaagtgctgggagtacaggtgtgagccacctgtgcctggccagaaaactatttttaaatgtgtaaggctggctggacatggtggctcacacctgtaataccagcactttgggaggctgaggcaggtagatcccttgagctcaggagctccagatcagcctgggtaacaaggtgaaaccctgtctctacaaaaaaattaaaaaattagccaggcgtggtgtcgcacgcctgtggtcccagctacttgggagggaggctgaggcaggagaatcgggtgaacccaggaggcagaggtggaagtgagcagagaccacgcccctgcactccagcctgggtgacagagtgacaccttatctcaaaaaagaaaaacacaatgtgttaggtttaccaagctatttcatgtatatgacttctctcttaatcatcaaaacagccacaggaattaaatattactgttatctttcactaatgaataaattaaggtatgaagagattaagtaaattgaaaatgtacttaaaattatctttgagcagtacctggtacttagtaaatactcagcatatagaactttttcattagctgcctaaggtcacccagtttgtaggtggcaaagccagggcttttacrgttttcccctaaagcaccacttacggaagatgtactcatgaggcgggaaccttgttctgtcccctgcctacatacccttctccagccctcacgtctctgcttctggagatgcttgtggaggggaagtggggagttggggctgacctcaaggccctcattatttctcacctgaacaattaaattactctttcactcctgccctagcctcacagtttggcagttcattccccacaaggcagccacagtcacctttctactaaaaacacatcagcgtctctctcctgccctcatgtaaaaatctaaactcagcttagctagaaatcccttaaaaaatgaagcccaagagtacactaggccagtgtttcttctactacaccactcagttatgcagaccttttattatcagtttgtgtttggatgatctgattaccttctaccaatgactctttaaagctgaagaaaaaataatttcttctggtttaattttgagaagatttgataaatcagtccttaacttacaaaacagataaattagagattatttatctacatttttaaaaggctttttgctatttcctttatactggtaggtttatagtgtatttaagcatttaattgatcattaaatatrtaacagaaaggataagaatttagaaaacaattttatttaatgttttgggagccaattccagttaacattagttatacccacctccccatcacacaattatttacaagtaaaattaagaatttttgaaattatgagttagagaaaaatattattttataatgtgattttttcagctatattcgttgtgttaagcaaattacttacagctaaattataaaggctatttttctgtgtgctattgttgaacattagaaaatgttctaatgatggcttgaaatagggaaaggatttagctatgttacaatgttgacttttaccagtaattttcatctccaatcctttgcattctttctcagcagtctgactggaacaattcagacttactgaagatttttctcattattttctttttctttctctcccactggcctctagtcatgtgcttcccctaaaatatgttcaccatatgtggggaattttatagaccctctcctctcaaaggtgtgtgtgtgtgtgtgtgtgtatgtgtgtgtgtgtgagagagagagagagtaagagagagagggacacgtcgtgggaagggggtcatgcctatgtgtgtatttagcagaggtttccatccccacaccatagttaatggtcttttatttctagcaagccagcaggcctgagtgcagatccagtctgagtcgtacagctgcctggggtacaggcctctacatctttcactgttactctgcagatggaagataaaaagtggaggacatagctctaggcactggatttctgccaaggcaaggagaaaaggacagttggggccaccagatattgtgttacgagggtccaaagagaccaaggaaaagttgagggaggaaagggggatttgcatctctggaatgtgggctcattctctaattagagttatgttgtttcccaggaaacaaaaatcagtaatgatgaagagaggcaatggaggaattggtttctgaatgacagccaaagtaactgactacataaatcttggcttactatacataaataaaagttatacctcaccaactgtcccttgtctcagaggtataaaaccaaggccttaaactggacagagagtctagtgcttccattattctggtaatttaggaaacatatttsagtgtatttatatttgttaaactctcaaagttgttcgctaccaacaataggtgctctttcagctcacaatggaaagggagcaaaygtctgcgtagattagtggacttggagaatatatttgtaaaattggcatcacctccaaagttcctaggaggagataagaatctaaatggcccatggcataaataataagtttggaaaattattatatcatcaaactctgcatgtatttccttctccacagtttccaataataccacttccttgcctggatctatgctcctgtgtgacatgatgaacaagctgcagtacttgtgttacttctatcctggacataggaacaggtgataggttaattataccttcaagaagaattcttttcttgctgtcaaaacagtagtgaaaaaaaaaaaatagaggctttgaagccagacatactcagcttgaatcttactgtcacttctttttggttgtgagactatgggcaagtggctcaagctctctgaatcccatttttaatgtctttaatagcaatttaaataagataatatattttgtctagcaaatgttaactttctrtcaccctcctccactatatacaatgctcccaccctaggctccttgatattgagaaggatttatataagggtagagtgggattagaagatggagataaagttaatgacaatgcctctttttatcttcaataataaagtattttcagaagagtttgttgtctaaggttttttgaggactttttaagaaatatttgaaacattcataaaaggatgaagatgaatggctgccttttgaattgcttgccttttggcatacttgcttcatgtgatttttgttttttacatattaaacattacaagtataatagaaacttttctgcttagttgtaacgccattttcctctgtgccttcccagaggtaaccactattatattgatttgatactcatcattcctacaaatgtgtttatatttgtattgcatataatatagccattaacaatctatattatttgttttgcatgttttaaaactgtgaatggcatcatgctgcccatattctcttgcatctattttttgtgtacaatgttacatgcttgggatttatttagtttgactgctaaatacagtcaaactaactaaatggaaactgctagtacagtgttccattgtctgcctccttaacagtttatccattttcctggcaaaggatatttggatttttttccagctttttattactgcaaacaatattacagagggcatacttttgtctgccttttgtgcacatgtgaaagactttctttagctgtattaatatatgcctaagagtacattcaggaggatatatgatatatacatcattggcctcagtgaatgttgtcagtttgttctccaaaatggtattctaacttacattaccaccaacaggaactctcctcggcaacatttggtgttattagacatattacttttggcactgtaatgcatgaaatgtgccatcttattgtttgaatttccctgactactggtaagattaagcatttatttcttatgttttaactcctttgttttcttttgtgaattgtttgctcatatcttttgactattttttaattgtattttcctattgatttgtagaggttctttacatattctgagtaccaatcctttgttatacattatcatttttcagtttgtagcttgtcttttttttttttttttttttttgagacagagcctctctctgtcacccatgctggagtgcaatggcatgatctcagctcactgcaagctctgcctcccaggttcacgccattctcctgcctcggcctcccgagtagctgggactacaggcgcccaccaccacacccggctaattttttgtatttttagtaaagacggggtttcactgtgttagccaggatggttctcgatctcctgaccttgtgatccgcccaccttagcctcccaaagtgctgggattacaggcgtgagccaccgcacccagccttgtagcttgtcttttaatttttaaatgctgtctgttgttgtacagagttttgttttttgtttttttttaatatagccaattcagtattttcctttatggttgtatgcttctggagtatgtttttaagttattctatactggcctagtgtgataaagctgttcttttatattatctcttgaatgtggtaagttttgcttttcacatttaagactgagttatgtagatcttacaaattctgtcacattttatttacagtatttttaaaaatcacattggttaataccacagctctcatcaggaatgtctcgacatattggaagctgtctaacgcataatgatggatatatgttttctaaaattctaatttattctagaaagctgaaatgtttataaccaataccatctgtgggttgttttccttgaaatgcctttgttcctttgtttcctcttgataaattttgttagagactactctattaatcatttagaggatatacttttgattttgtgaggctgttattgtatcttttttatttatttcctttttttttttttttttgagacagagtctcactctgtcacccaggctggagtgcagtggcatgatcttggctcactgcaacctctgccttctggattcaagctattctcatgcctcagcctcccagatagctgggattactggcgcccaccaccatgccagctaatttttgtattcttatctagtagagacggggtttcgtcatgttggccaggctagtctcaaactcctgacctcaagtgatctgcctgcctcctttgttttttatttcattagtttcattccctcctccattttattttcttggaaattatgtggttgtgcttttactaacttcttgagtggacctcattaattttcagccattcttctttctaatataaacatttaagcagtataaatttccttctaagttctgttttgtcagcattgacaaagttgtgatatgttatagtattttcactataaatcagttctgaataatttctaattttcactattatttcttatttgatctatcatttatttagaagtatgtgtttagatttccaagtacagggctctttttttaacttaacttttttaaaaaattgatttctaatgtcattacatattaatcaaagaatatagcaatgctttcagatcttttgtatttttaaagcttgaatttagcaaatggcgaatttttacaaatgttctatttgtgcttgaaaatactttctattttctgattcagtgaatttcaaattttttattgtttatgactatcagtaaaagatttttgagactttcctttaagataggtatatactgtacatcattrtattagtctgttttcatgctgctgttaaagatatacccgagactgggaagaaaaagagttttaattggacttagagttttacatggggaggcctcagaatcacggcgggaggttaaaggcacttcttacacaccagcggcaagagaaaaatgaggaagaagcaaaagtggaaacccctgataaacctatcagatctggtgagacttattcactatcaatagcatgggaaagaccggcccccatgattcaattacctcctgctgggtccctcccacaacatgtgggaattctgggagatataattgaagttgagattatgtggggacatagccaaaccatatcattctgcccctggcccctccaaatctcatgtccttacatttcaaaaccaatcatgccatcccaacagtcccccaaagtcttaactcatttcagcattaacccaaaatccacagtccaaagtctcgtctgagacaaggcaagtaccttctgcctatgagcctgtaaaatcaaaagcaaactagttacttcccagatacaatggaggtacaggtactgggtaaatacagccattccaaatgggagaaattggtcaaagcaaaggggttacagggctcatacaagtccaagatcagtggggcagtcaaatcttaaagctccaaaatgatctcctttgactccaggtctcacactcaggtcacgctgatgcaagaggtggattcccatggtcttgagcagctccactcctgtggctttgcagggtacagcctccctcctggctgctttcacaggccggcattaagtgtctgtggcttttccaggctcacggtgcaagctgtcggtgggtctaccattctgggatctggaggatggtggcctcttctcacagctccactaggcagtgccccagtaggtacactgtgtgggggctccaaccccacatttcctttccacactaccctagcagaggttctccataagggcctcgctcctgcagcaaacttttgtctgggcatccaaggcatttccatacattttctgaaatctaggcggaggttcccaaacctcagttcttgacttctgtgcacctgcaggctcaacaccacatggaagctgccaaggcttggggcttccaccctctaaagccactgcccgagctctgtcttggcccctttcagccacagctggagtggctaggacacagtgcgccaagtccctaggctgcacacagcaccagtaccctgagcctggcccacaaaaccactttttcctcctgggcctctggacctgtgatgggaggggctgctgtgaaggtctctgacatggcctggagacattttccccatggtcttgaggattaacattaggctccttgctacttatgcaaatttctgcagcgggcttgaatttctccccagaaaattggtttctcttttctccccagaaaattggtttcgcatagtcaggctgcaaattttccaaacttttagctctgcttcccttataaaactgaatgcctttaacagtatctaagtcaccttttgaatgctttgctgcttagaaatttcttctgccagataccctaaatcatctttctcaagttcaaagttccacaaatctctagggcaggggcaaaatgctgccagtctctttgctaaaacataacaagtcacctttgctccaggtcccaacaagttcctcatctccatctgagaccacctcagtctgtacattattgtccatatcactatcagcattttgagcaaagccattcaacaagtctctaggaagtttcaaactctcccttatcttcctatcttcttctgagccctccaaactgttccaatctctgcctgttacccagttccaaagtcacttccacattttcaggtatcttttcggcaatgccccactgtactggtatcaacttactgtattagtctgttttcatgatgctgataaagacatacctgagactgggaagaaaagaggtttaattggacttacagttccgcatggctggggaggcctcagaatcatggcaggaggcagaagtcacttcttacatggaggtggcaagagaaaaatgaggaagaagcaaaagtggaaactcttataaacccatcagatctagtgagacttattcacgatcatgagaatagcatgggaaacacgggtccccatgactcaattacctccctttgggtccctcccacaacacgtggraattctgcragatacaattcaagttgagattatgtggggacacagccaaaccatatcaatcatacaacttttgtataaagcaaaaatttaaaatatgggattaaaaaatgaatataagtaaaagtccttttttttttatttgctgtgcttcaggagatagtcttgcacagccwctgagaatcacaaatctcattttggaaaccactgttttaattgctcatctccagtggccaccatgctatctttgtaggttcaagtaaatattcagaatcatgagaccaccacaggttatgtttggtactagtctacttaaaaaggcatagaacaagaaccttagcttgccagcaaggtagcttctctaaacaagagtccttactagagcagtccctgtagcagtaggcagctagctccaggaggtattttctctccaggtgtactcataggtgtaggaactattttttctccagctcaaatgcaaggagatgagatctacatcagtgggtggtacaatctcccttaccaaagaagcctcagttttccacaagagccaatatctatttttacatttcatatatagaccttggggtcactgaaagagatgtaccagttacaagggtcactatactcaggaaagcctaaactattactttctctcaggtatttatagttctctaagcctagatgtactttaccagctggggattatttttatcataagcaatgttgcctagcagtgttgttaacacatactgttttatctggtaaatacagacctaggttgttgatccagagtcagagtctcatggagcaggtgaaaatgttttgttaacctgcttactcagttggctactagattccattaactaatagaatccattagatcagtcatgttgctgctcttttgattctctactaccatttctgtacttacagacagagcaataacctgtgaacactttaatgctgkaaaaataactatgaggaattagtttctccctaagggagaaggtagcatccaacttcctgatcctaaatatgtagtttcatgagactatgttcctttattttctcaatcttctaactctatcttccttaagtgggttaatttctactgatctatcttttcattcagtgactcttctgccctcccaatctgtgtttaagactttataatgatattatttcagatattgtatgtttttattctagtatctttattggcccttttttattggtttaaaaaatttatctgctgagattttctatctgtttattcatctcaggaatattttcttttgtatctttaagcatagttgtaataatcgcttcaaaatttttgctaattaaatacaacatatggaacatctcgggtttggtctccattgactgcctcttttcttaagaatggtttttgtttacctattttttaatatgtctaataattttggctagtatcttgaatattttaaatgacaaattgaagagattttaaattatgttgtattcctctgaagaatatctttaaawaaaaatctgttgtttttttagcaggctcaagccccaaattgtctttccagtagtaagcaataattgaaatattttgccagttgttttagccattgttggacagcttggaggtggccccgtgcatgtggaattcaggggttggccagatacttgggtagagttaatacatagaatataaggctataccactctgactctttatttagaaatttcactgcttattttccaggcattatggtgacccaaactttgttttttcattcttcaagccagtaagaatgcrggtttctatcayatttagatgctttttatgtctgcaactgaggactgccctcagacagaaagtcacaaaacaggacacttactccgtgttatccrttttttaaaagagtaaaccacacccctagtttctgcctgctttcgattgttctccaatgccttcaggccgttgatttttatattttgctcagagttgaaacttgctatctgtgttagaatttatccaataggagcttgctatcaactgagttgtatccctcaaaattcatatgttgctcccttaacccccagtatgactgtatatagagatagggtctttaggaagtaattaaggttaaatgatgtcctaaggakggagccctaatctgataggcctgtggccttatgagaagagggaaagatctgtctgtttttctctttttctgcctgccatgtggggttatagcatgaaggcagccatcagtaagccaggaagacaggaagggagcactcactagaacacaaccatgcaggccccttcatctcagacttccagccatcagaactgtgagaaaattaattcctgttatttcagcagcccagtctatggtactttgttatggcagcccaagaagactgataccaagctaagtagccattactagaagtgaaagccttgtttttagattggattggaaaactcaatattgttaatatgttatcttttaaacttttaagttcaggagtacaagtgcaggtttgttacataggtaaacttgtgtcttgggggtttggtgtacagattatttcatcacccaggtattaagtctagtatccattagttatttttcctgatcctcttcctcttcctaccctccaccctttgaaaggccccactgtgtgtgcttctcctcaatgtgtccatgtgtttttatcatttagtccccacctataagtaagaacgtgcagcatttggctttctgttcctgtgttagtttgctaaggataatggcctccagctcatccatgttcctgcaaaggacatgatctctactttttttaaatattgatctatagacttctcacaatcgcaatgaaaatttcaacatacatttttatataaactgacacactgaatctgaaatgtataaggccatgcaaagtgtttagaatactcaaaacagctttgaaaaagaaaacacaactagaggacttatactgcctttygaagcttattatacagctataataattgagagtgtggtatggacatagacttacagrtcactgaaaagaaatgtagaaagctgaaactggatcccttccttacaccttatacaaaaatcaattcaagatggattaaagacttaaacgttagacctaaaaccataaaaaccctagaagaaaacctaggcattaccattcaggacataggaatgggcaaggacttcatgtctaaaacaccaaaagcaatggcaacaaaagccaaaattgacaaatgggatctaattaaactaaagagcttctgcacagcaaaagaaactaccatcagagtgaacaggcaacctacaaaatgggagaaaattttcacaacctactcatctgacaaagggctaatatctagaatctacaatgaactcaaacaaatttacaagaaaaaaacaaccccatcaaaaagtgggcgaaggacatgaacagacacttctcaaaagaagacatttatgcagccaaaaaacacatgaaaaaatgctcatcatcactggccatcagagaaatgcaaatcaaaaccacaatgagatactatctcacaccagttagaatggcaatcattaaaaattcaggaaacaacaggtcctggagaggatgtggagaaataggaacacttttacactgttggtgggactgtaaactagttcaaccattgtggaagtcagtgtggcgattcctcagggatctagaactggaaataccatttgacccagccatcccattactgggtatatacccaaaagactataaatcatgctgctataaagacacatgtrcacgtatgtttattgcggcactattcacaatagcaaagacttggaaccaacccaaatgtccaacaatgatagactggattaagaaaatgtggcacatatacaccatggaatcctatgcagccataaaaaatgatgagttcatgtcctttgtagggacatggatgaaattggaaatcatcattctcagtaaactatcgcaagaacaaaaaaccaaacaccgcatattctcactcataggtgggaattgaacaatgagatcacatggacacaggaaggggaatatcacactctggggactgtggtggggttgggggaggggggagggatagcattgggagatatacctaatgctagatgacgagtttagtgggtgcagcgcaccagcatggcacatgtatacatatgtaactaacctgcacattgtgcacatgtaccctaaaacttaaagtataaaaaaaaaaaaaaagaaatagggaatcaagaagtagacccacatatatatggtcaaatattttcaatgaagggttcaaagcagttcagtgggggaaaaaatagtcttttcagcagagggtgttaggtctccagctagatgtccatgtgagggagaacatgaaccttgactctcacctcataccattcacaaaaaagatcaacttaaaaccaccacagacttaaatgtaaaatctgaagctatgaaacttctgaaagaaaatatggggaaaattttccaggcctttaggataggccaagatttcttaatagtacacaaaatcacttaatataagagaaactattgatacatttgatttcatcaaaagataaagcctctgttcttcaaaaacaccattaagaaaatgaaaaggtaacccataaagtgggagcaaatattcacagtacatatatctggcaaggcttttatccagctgtataaaaaactcttaataataaggagacaacctaattttttttcttttttttttcttctcagatggagtcttgctctgcatccaggctggagtgcagtggtgggatctcrgctcactgaaacctctgcctcccgggttcaaacaatcctcctgcctcagcctctagagtagctaggattacagrcacctgcaaccatgcctggctaatgattatattgttagtagagacggggtttcaccacattggccaggctggtcttgaactcctgacctcaagtgatcctcccgcctcagcctcccaaactgctgggattacaggcatgagccactgtgctcggccatgctaatattttaaatggccactttatttgagtagacatttcacaaacaaaggtaacaaatggggccaggcgcagtgactcacgcctgtaatcccagcactttggaaggccgaggagggaggatcacgagatcaggagttcaacaccagcctggccaatgtggtgaaaccctgtctctactaaaaacacaaaatttagccgggcttggtggtgtgcacttgtagtcccagctactcaggaggctgaggcaggagaatcacttgaacccaggaggcagaggtttcagtcagccgagatcgtgccactgactccagcctgggcgacagtgcaagactccatctcaaaaatgataataataataacaaatggctaataagcacatgaaaagttcaacatcatagtcgtcagaaaaaaaaccatagtaagataccagttcacccacttggatgaccaaacttaaagatactgagaatactatgctttggtaagtatgttgagaaactgggattattttacattgctagtaacactgtaaaatgataaatctaccttagagaacagtttgtcaaagttaaacgtatacttaccacgtgacccagcaattctactcctaggtatttacccaaaagactttaccaataatctacaaaaagagttgtataaaacatgctgagtattaaagccaagcataagagtttatattatataatttcatttaaatgatatagaataagccaaacaaatccacagtaacaaaactgatcagtggtttcaagagcaaggggtacaaagggacatgagagaacttcttttgggagaatcaaaattttctgtatcttgattggtgtatagatttgtcagaattcattgaactgaacagctaaaatgagtgcatcttattgtttataaagtatgcctcactgggcttgatttactatatataatatatatatttagtatatatatatattatatatttagtctatagtctaagtctacaaatatatagaatgtatatggactaaatatatactataaaaatatataatgtttaaatgaataggctcgtaggatgttgttatatgaaccaaaagaaagaaggaaagcccatggaattgtgtagtgtagggaacactgcaggtagtttactgcagctaaaaaattggtatgggccaggcgtgatggctcatgcctgtaatcccagcactttgggaggccatggcaggcagatcgcttgagctcaggagtttgagaccagcctgggctacatggcaaaacctcgtctgtactaaaattacaaaaaaaaaaaaaaaaaaamaattagccaggcatggtggcacttgcctgtaatcccagctacttggtggggctaaggcaggagaatcgcttgagcctgggaggtcgaggctgcagtgagccaaggtcacaccactgcactccagcctggacagcagagaaacagagagagacccgtctcaaaaaaaaaaaaaaaaaaagttatggtatgaaattttcatctgatctttgaatcatgtattcacaatgcaaccaagaaacagcctgctcagagttttattccgtaaactaataatttgatttgttgatgtatcatgttccctatactgatagtttgtttcttttatcaactgcttttctttaatcccccaaaattgtcctccaatccataacttttgactatttcccttcagattttctttctttctcctttcagatattctttctttccttccttccttcctccctccctccctcttctcctcctcctccttctctctctcttctttctttcttttctttctttcttgcctttcttctctgttttttgtttgtttgttttttctttttgggacagactatccctctattgctgaggctggagtgcagtggcatggtctcgactcactataacctctgcctcctgggttcaagtgaatcttgtgcctcagcctcccaagtagctgggactataggtgcgcaccatcatgtccagctaacctttttgtaccaccatgcctggctaacttttttgtatttttagtagagatggggttttgccatgttggccaggctggycttgaactcctgacctcagataatccaccttcctcagcctcccaaagtgctgggattacaggcatgagccaccatgcctgaccacttctcagatttttttctagccatttcgtttctctctaattctagacttgtattaccagctatcttctagacatctctgtgaatatcttcaaagtctcaagttcagcatatctgaaaccagacctttcctttttgcctcaaaccagcccttccatgtgacktttaaaaacaatttattgaaacaaaactcacataacataaaatttaccattttttccaacttgagaaatacgtttcatctatatttttatatacctttttaaaaatttttgaaatttgtaaaacacattaaatttatcatcttaaccatttataagtataaagttctgtaatgtatattcacattgttgaacaaccaatctctagaactttttcatcttgcaaaactgaaaattctatacccattaaacaataactcattcccctctcccccacagttcctggcaactcccactttaccttttgtctctatgagtttgactactcaaatgtatacctcatacagataaatcatacaatattggtctttttgtggctggtttatttcatttagtatartgtcctccaagttcattcatattgtagcatgtgtcagaattttcttaatttttaaggctgaataatgttacatcatatgtttgtacatttcatttatctagtcatcttataatggacatttgggctgcttccatctttcagctattgtgaatgatgctgttttgggcatgagtgtacaaatattctttgagaccctgcttttgattcttatgtatatatatgagaaatggaactgctgaatcatatggtaattctatttttaattttctgagggatcgctatgctattttccatagcagctgcaccattttacattcctatcaacagtatacaagagttctagttactccatatcctcaccacacttactattttctgggagatatatatatatatggcagccatcctagtggatataaggtgatatcacattatggttttgatttgcatttccctaattattagtaagattgggcatctctttcatatgtttgttggccatttgtatatgttctttggagaaatgcctattcaaatcctttgcccatttttcaatcgagttgatgtttagttttgtttttgctgttgatttgtaggagtcctttatttaaaatgttttatttaataataatagttattgttttatttaacaataatttataattaaataaattataatttattaaatagtattatttaattattattattatttgatagggggtatctctctgttgctcaggctggagtgcagtggtgttatcatagctcactgcagccttgaccacctgggctcaagccatccttctgcctcagcctcctgagtagctgggactacaggtacatacctctatgcctagctaatttaaaaaaaaattggttgggggatgatagagatggggccttcttgtgttgcctaggctagtcttgaattcctgggctgaaacaatcctcctgccttggcctcccaagtgctggcattagtggggtgagccaccgcacctggccttaagagttctttgtataatctggatgttaactgcttgccagacatatgatttgcaaatatttttctcccattttataggttgcctttttactctgctgattgggtcccttgatggagagaagttttaaatttcgatgtagttcaaaaaacctttattattttgttggacctaagttcctggggctatcaaatatatcaacatagaaattttaaatacaatcttactgaaaagataggtttgaaaaaaatcagctgtctgccatcaatttctctacaggtcaattctcttattttttgtcatggtagctaatttgggggatgtactagtggtagattattattgttcccagttattcatttttatttattgtaagagcagagattatcaaactttctgtgaaaggatagatagtaaacatgttagactttgcaggcarcacgtagtctctmtcgccactgccattgctactatctcttccttgtcttctttttctctttcttcctctcctctttctcctcctccttctccatttttcctcttcttttttaaaaaaaaatttgattactcttatgaaatgcaaaaaccattcttagcccatgggtggaacagaaagagtccacaggccagatttggcctgggagcagtagtttgctgacccctgcttcggaggattatatgtcctcacccattgccttgtgacttctcctgtgggagaggcatctctttctgtcccactgatgttggacttgtccatgtggtttactttagccagtggaaagtgagtgggcatgatgtacaccatgttcaggaagaatctttaagagccattgcatgtttgctctagctctcttgctctttttccttctgacatgagaacagaatgttcagataggggctatttgttcaacttggatcctggaatgaaaagatctataaagcagaattatagccaagctataggtaccaatatgtcatgtgaaagaggaagaaacaattcctgtaagccacttaaatttgggggctgtctgttaccctgtatagcctagcataatctgatgaatatattgttacaggtaaacacacacacaagcacaataagcaatagaatttacatagaggtgacttttaaatcaagaacagcctgacagaagctacttatttaactttggaagtattagactaagaaaaagtatagagaactccagatgtgtacagacagatgtttattggcaaacaagagtactgagtgggggaagaccagttgaagagagtgagcttatattgatacagagattccttaattaaaatcagaaccccagagttcctgttaaggggatttgtcatggggatagtaagagtctaataaaaacaactcagcataaattgctagtttccaagaggaagcaataaatgagaatttctgagtctaaatagtcttccaagtgtcctaactaaaacttacaggacccaattcctaggaagataacatttacatgcgaaaaaataaaatcttaagggacacagagatttgatccaggatttactgagccagctaattgcttgaatcaattgattgatacctagcagctatatctttcagaatcatgctgtctatcctgcactctttctgttaattaaatatttttgaaattaaaaaaatattaaaaattagcccatctcaaatctttaaaaatacagcaagggccgggtgcggtgacttaygcctttaatcccagcactttgggaggctgaggcaggtggatcatttgaggtcaggagttcaagaccagcctggccgatatggtgaaaccccgtctctactaaaaatacaaaaattagccgggcggtagttgcatgcatctgtaatcccagctacttgggagggtaaggcaggagaatgcttgagcctgggaaggtggaggttgccgatcgcgccactacactccagcctgggcaacagagtgagaccttgtctcaaaaaaaaaaaaaaaaaaaaaaattacagcgagataccaactcatatcagtctgaatggctattgttaaaatatcaaaaaataacagatgctggccaggttatggagtaaagggaacacttatacactgttgacgggagtataaattagttcaaccattgtggaaagtagtgtggcagttcctcaaagagctaaaaacaggactaccattcgacccagtaatcccattactgggtatatacccaaaggaatgtaaatcgttctaccgtaaagatacatgcacacatatgttcattgcaacactattcacagtagcaaagacggaatcaacctaaatacccatcaatggcagattgaataaagaaaatgtacatataccacattttaccatggattactgtgcagccataaaaataaaaaataagatcattttctttgcaggaacatggacggagctggaggccattatccttagcaaactaacacaggaatggaaaaacaaatgccacatattctcacttataagtgggagctaaatgatgagaacacatggacacatagaggggaacaacagacactggggcctacwtaagggtgtcgaatgggaggagggagaagggcagaaaaataactaataggtactaggcttagtacctgggtgataaaataatctgtacaccaaacccctgtgacatgagtttacctctataacaaacctgcacatgtactcctgaacctaaaataaaatttaaaaaaaaagcaaaatgcagaaaatggtaaaactttcatattcccaacaccaaaaatgaatattaatattttgtcatatttgtttcaacttttttatattaaaaacattattgatgaagttgagggttccttcaattctttcccttcctattccctttacccctcctgattgcatctctttcctctattcccaggcaaccaaaatcttggatttggtgtcaatctagcctattttttataattgttttcatgtgtaattcgatgaacagtatataatatttttgtttgtatggtttaaaatttttttcgtagttggtataatagtacagtacttttttgcagttttttttcacacactagtatgtttttgttattcatgtttattcatttaaatctacctcacttatttgtatacagtatgcaactatatacatatgccacatgtttagacattgtctataaatgtctaatgtttacttttatgcatgcattcattaaatatttattgagtacttaccatgccctaggtactatagcatgatatattagtgaatatatcagagaaaaatctttgctaccatgctacttatgttctattagagtaatataaaataataaataaataagccaaacataaagtatattagaaggtgatgagtgatatggaaaaagattaaggagaactgggagtgggattgaggggaacagactcaatcagtgtagtttgggtaagcctccttggtaagatgatattagagcaaagacaaggtgagggcgttagtcagtgaatatctagggaagacaattcctatcagagaaaagccagtgcaagcccttaatgtaagagtgtacttggtgttttctgagaacaccagaaggccagcatggctggagaagagggacaaaggggataggagtaggacttgaatcacagaggttacagagttgaaacggaggagatgactttgcctcatcttacaggctgttatgaggactctggcttttacgctgaaaaaatgaaaagtacatgaaagattttgagcggaggagtgatgtgatctatgttgtaaaggcgtcacttaggctggtatggtaagaatagactgtagggagctagagtggaagcagggagaccagttgggaagttatcacagtgttctgggggaggattgatggtgtctcacactggagtgctagcagtagatgtggtgaaaagtggtgagactttgaatatattttgaaggtagaggcaacaagatttgccaatggattagatacagagtgtgagagagtacgaggagtgaagaatgatgccaaggtttttgcctaagcaactgcagagttggagttaccatccaagagatgggacagctgtggatagagcagatttggaacggaggatcaggagttacgttttggatgtgttgagcttgagaacctgttagatatccagatagagaggctgaataggtagctggatatatgagtctggaggtcatcagcaaggtctgactggagttataaattcaaaaggcatcaactatacatattttacttaaagcagtgagatgatgtgatattgcaaagggagtgggtataaaaaacaatagaagaaacaaagactgaaacctgggtgtcagcaattaagaagtcaggttaaaggggaggaaccagcaaaaggagactgaaaagagaaactattgaaatacggagaaaacagcagatgggggagccagaagggagatggttttcccctggagttgggccgcttggtggcccaggttgtcctccgactgccccagacaaaccccatgtcgttccgcccgtcagtggcccgctggtgtgctgcccgtgtttcatgtgttcctccgctgatgtgctcccctcgatgtccagccgcctgtgtgtctgcctgctaaggtctcagtattttattttattttattttttactttttatatttttgggacagagtctcgctccgttgcccacgctagagtgcaatggcttggtctccgcgatctcagctcactgcagcctttgcctcccggattcaagagattcccccgcctcagcctcccgagtagctgggattacaggcacccgccatcatrcccagctaatatttgtatttttagtagagacgggtttcgccatattggccaggctggtcttgaactcctgacgtcaggtaatccgcccacctcggcctcccaaagtgatgattacaggcgtgagccaccgcgcctggccgggtcttggggtttttataggcacaggacgagggtgtggccgaccaaggtgatcttggaaaatgcaacatttgggcaggaaaacaaaaatttttctcctcgtctaggtccatgggcacatgtccgcgtgtggagccctagccatagaccatgccttgcccctctttgatatcatttaaagggaccacacccttctttccccacttctgtatcattgtgatattaagctgtagttatgcatgatgttgccattgagggaaactgggttaagggcgtacgggatcactctgtattatttcttacaactgtatgtgaatgtacaattatcttaaaagttaaaacagaagtatttctaaaaattrtaataataaaagccaccatttattgagtagttactatatgctaggttctgtttacatactatcaagtggatattattgttaacctcattttatagaggggaaaactgagacacaaagagattaaatcacttacacagagtcactcagcgactaagtggcagaacttgcattcagatccaggcaacctcactccaaagacagggctcttaactactttgcaatgcttattgtgtatctgcctttatatcctgccttctagtctcactcgtcagcccactgcaatttacctttcatcccaatcactcccctgaaactgcttttgcctcaatcaccaagtctgttgccaaacctaatggtcccattctttttacagcctttgctattgcccacgcattcaacaaatatttcctgaggtacattgtatgtctcaggacatgcaatgtaccaagttactttctacagctgtgaaaaagataggcaaaactgctgcaactgaagaatgcaccttttagaattagaggtctgaaatcttcagttctttctttctactcatcactgctgacttgtttgtggatggtcaataggccactttattgtccatgcctttgtttttctgtggctaatcrggttatacagctagtttgtttktggtttcacagcataaatgataaaatattatatttagataccatttttcctttttctcccaagtggaactctgaacctttccatgcaattgtcatgaatatgaatgaagtaagacaaccaaatcctgaagtatcctacccttcttatataattattaaaaatgaattgtaaaaaattaattgccattgaccttttacctactttttctgtatgaagataatttgaattaattttatgctcaccattttggaaacaccaggaagatctctgcagaatattaagtaagtttcattccatatgtccaaataaaaagctactccaaggaaaatactcagcttcgtggagacatagtggtagctttttgcgtatcaccaaagctaagcatttgaatcagagttaaagaggcgtcatcttgtctccttccacatatccatggttattatctgtgttttcattcctttcttccaattcagtaaagaagaaaaaaaaattctctcctacttcttcatgccagaaaaacagctcttgttttattacttctaatgggaatgtattttccttggtgattggaagcaactctagtcctcttgcctacatccagggttagtttctgtttttgtctgatagctatttgtttacagcagcagttagcaatttgcatggacagtgtgtcaatgtcactgccctgaatgaaacccaaatgcctcttggaagaaagatgacagattcagcccagggacttgcaaaactttaaaagtgattccttatcaaacacgtgaaaaacaactcttccctctctataacttgaggaaaaaaatgagaaactatcttacaacagatggcgattccttgttagtagaacaggcctgggctgattcagctccactcctttatgttctttttgcaaaacccacaaagaacacatttggggccacttttcagagttggcagcagtctctgctttttaaggaaatcatgtggatgaaaaaaaaaaaaaaagccacagttgatgaagggcttgtaatccccagagtaaagaaacgggatgcataggccttaaattctaggtcatcaggtttggtagcttgattaaatttggttgaaacaaacaaatttggggctgggcgcagtggctcacgcctgtaactccagcactttgggacgctggggtgggtggatcacgaggtcaggagttcaagacaagtctggtcaagatggtgaaaccctgtctttcctaaaaagacaaaaaaaaaaaaaaattagccggatgtggtgacaggtacttgtaatcccagctactcaggaggctgaggcagagaattgcttgaacctgggagtcggaggttgctgtgaactgagatcacaccactgcactgcagcctgggcgacagagtgagactctgtctcaaaaaaaaaaaaaaattggggaaagtttatattttcttgctgattagacttcttcttaaaaaaaaaaaaaaaaaaacagaaaaggaggagaggaagatgaaaaagaggagggagaggaggaagtagaaactataaaaataccttttggggtgatggaatgataaagtgatctctaactttcaagttaccctatatctaaagaattcaatctttaatgttaagtccagtacctttttccaccacttatatgtaaagtactatagctgctttgatgtatttagaagttatttagagaggcttggaaccagtgtgtgagtgtgtgtgagtatgtgagtgtgtgatagagagagagagagtgtgtgtgtgccttcttaataagcttggctttttacagatagaacagatgcctcaggacatcatgaaactttctcactgaagatgttgaagcagaatctggtggggtattgtggagtagacttaaacactagattaataaccaaatcagttagcttgtatgatttttttcttcacctaagagtctatgcttcatgaatcagaactaagcccccttcacctgttcttataataaccttaatttggggtattttcagacatttagggtaatacttactacttagttcttcttatatgcaagaaracactggccacctttactaatgttctattttatttctttaggtgtctgaacacacacaattaagttggatcctttcctgcatggtcagactacctcgattacaacatttacatcagtggaaggtaaatgccagtaatctgattaataaacagacaagaagctatttttcccttcctgttaggctctgggaatcctgagtttactctcctccctggtctgccactcactaatggttggaacatcatctttaacctccctgcttcagggtattaaaaggaaaataaaaggattttccaagattcctcctgacttaaaaattaggttcattgtttttatctgtgtacagttgaatcagagttacctttggatagacttggtaatgactttgaacaaccacattatagttaataaacaatcacagattgtagattactagactctgaggttgcctcccatttccactggaattaactggcagtaaggaaagaatgttttcattgtggagagaagagacaacatattttatttaacatttaaacaagttgagtccaggcaacagttcaaactcacagaataattagggctatactttttgtaagaagttcaaccaagaaagataaattggataattcatagtactttacttccatttatttttgcagtcggataaccccagggtaggtagcccccaactacgtcaacactaatttcaatttcaagcttcttttgaggtattttcagggccattggtttcctcaaaagctggtcttcagaagccttcacacatgctacagaaagaaatagataaagctttaaagtgacagtgcctaaatgatatggtctgaatgtgttccctcagaattcatatgttgaaacctaactcccargatgatggtattaggaggtagggcctttgtgaggtgattagatcttgagggtgggaccctcatgagtgagattagtgctcttgttaaagaggccctagagacaccgcttgctcctgacagcatctgtggacagagctagaagtcactatccatgaacaaggttcctcaccagacactgactttgccttaatcttggacttcccagcctccagaactatgagacataaatttctgttgtttataagccacctagctgggtattttgttatagcagcctgagtggactaagacacttaatacataagatggtactagtaatgctgcagattcattacttgccacaaattagaaacaaagtttcataatgttatctgccatattttggttttaggcaatactttcccattgtaccatagtattctaccattaagtgtaatgttgaaatcctttttataggaactgaatactaatctaataggaactattcccactttaaaacagcatctaaagatctcctgctagtatattactagtgcatgtactgatattctggaaaagcctttccattagtatataattgcttgtttgtaggaaatacatgaatttcaaatcccagtcttatcctcagatatgttactgtcttctgtggtgattccttcattaatactaattaaatactagtgatatcttctgtgagtcttatgtcataataggtgctagagatatagcagtcaataagaagtaacccccttygtgagacttatagtctgtttgggaaaagacaattaaacaagtaataagaaagtgtaagaagtgctctgagtacaggattccagtgctataggaggatctgataaaggcatctagcctggtttccattgggacagcaaaaggtggaatagtggcacagaagggtggggtgagggttgctgaggtcagggttatttagaggattaatgagtaacatatatgtaaaacatctggagcacataataggcactcaataaatattaatgctctccacattttccctctcccttgtaatttcaaggtccattatgctaatacgaaaaggctataaattgaatgtgatggcaacttttaaaaattgggttcttcttcaatttgcacgtttccaaattaaactttcattatctttacctggtgataattgtgaactagcctttatcatgaactttgtaattaggggatgtagtgaagaaattgtatgttcaaacattgaaatttcctttgaatggcctagagcattggttgctataagccagaaaccacttgaagtatactcagaaaagttaagtttgtaactaaattatgaaacaccaaaattaagatggctaaggagagaagctgttgtattttcagactgagccttaaaaaatatgtctgcaccttggtaggggtatcccaagtttgtaagctcatgagcttggtccctggaataaaacaagtttataaattcagttgcccagttcatttggaaataatcagacttgagggaaatgattcagattaactcaatgagtaagatttgtctacacaccaaagtatccatttattttacaagagatgctataccttaggccttgaaactgcacagaatattgccatctaataagtagctctactcagagaatcaaacgacatgtcagcaatgtgcagccacagcaagggagttagcatcattaggatcatgtttagtgagtacacagtagtagtttataatcagcatctattgccccccccagttattaaatgtttctaacatcatctcaggtgtttccatcaacttctccattaaggaactgttttggtctatacaacctgtactgctcattgggtcacttgaccctcactgcttcagcatgcttaatcacctaagaatcaagacaggtcattaggattggttagatgaatatttctcycacttacttttattttttaaatgccatgacttttttgttttttgttatttaaatgtgattttaagggaacattccagttttctcagtggcatgctgtgagactttttggaaagtctccatgtataaacaatagggcttttgatattaactcatgttaatttgtagagatttaatttcatgacggtttgtggccttgtctgtgaaatctggaatttatccgatttggaaccaataaatgcctgtatccttactttaataaaataaataaaaaatagtagcagtgcaggatcccttaaaggggcagtgatgaaatgcactcaccttattcctgcctcagcctggagcatgaagacaagccagccagaagatggctagagttgctaaaaaggaaccgatgtataatgttattacaggtggcttcagatcacaatttgcttgttttaaaattttcttaatctagcagtataattaggttcaagtcagatttcagatttcttcccctcctctcttttcacctctcacaggcaaagactaccaagcagaagcaygatggcacggtgggcctgctcacatacccagtactccaggcagccgacattctgttgtacaagtaagaagagagttcagcccagtcttatacatactcatggtgacaagagagtgttttaacctattcaatacagacttggttcatgggcaaggggaagtgcagaaagcgtcagacatctgaatcagtttatatctattccccagaaatactacattatagaagtatgtttctacatgtataatgtactacattatagaagtatgtttctgtgagaaactaataatatyaagagctgacatttaaatagcacttacaatgtgttggaaaccattgtaagtactttatatacatcaacccttacaacaaccttctaaaatttgcactcttattgtcccgattttacagatggagaaattgagggacagagtggttaatagcatgcccaaagtcatgtaattagcaaggcttggagccaggatttgagtccaggaagtttggatacagagtctgtgctcataaccagtagctatatatatttccccagtaatgcytgattaaacttcaagcattttacatgttgattttttatatattctagactctaaagcaatgctgtccartagaatgctctgtgtttatggaaatcttctatgtctgtgctagatcctgtagccagtagccacatgtgtggctattgagcacctgaagtgttgctagtgccacagaggaactgaactttaaattctatttaatttgaattaaatttaaataaccactgtattagacctacaggttgagagcaagtttttaaaatatgatgtagggtacctgtacttttcctggacccctaatccatccagtcagctactgctgccacttaaagtcctcaaaaatatacacctgaggatgctgatccctgcactcgctgtactactggccagggcttytgatttcatccccctctcaattcttccgtgcwaacccctcatcagcctcccttgacccccatttggccttctagagataaagcctcccaattggcatgtgcttagggccatgctactgtgaaagcttctgggaaaagaagacactkcaccagtgtttttgcawccctttcccctaaagctgtgaattgcaattctttgcatggaagtctgataatagcatgaagatgacagtatctgtacctcgtggcatgactccagagcccttgtgcaattatgatggaaacggccaaaagagcagctgcttagctctacaaacagggaatgtccatgagtacatgcagcctatcttcaattctgatgaaaacttgcaaggcttatttgtctgtttgttgtattaacttgtatgctggactcttgataacatttattatttgtaataagtagcttttgacttatttaaaaggctagaacaatattctccaataagtaacaaatgaaagtataatgaaagtcttaataatacattttctagagaggtaggatatttgcttgtaaaggttctgtgaagaaacttgacyttctcacctgtaaaacgggaataattattaagcacaggattattaaaggattaaaatgaaatataggccaggcagtactgtgactaggagctgttacttggttatgactaatgatgactatgtctttgataattacaatgttgtctaattttgtttcaaggcctacttctttatagaaccaaaggctagccaggtgtgatgttgcatgcctgaagttccaactacttggaaggctgaggcgggaggatcacttgagcccagcctgggcaaaatagtgaaaccttggctccaaaaacaaaaacaaaaaacaaaacctgagaattgtcagcactagaataagaaaacacatgagcgtggtaggtttccttaatagttcaagagctgtaatggaagagtcctctgagtttagggctatggaaaagcataaactttaacaagaatgactacattcttaatgataccatgaagcaaaggatgggaaggagctttaaggagcctcttctttaattccattgctttacagcttcagtccagtgtggtttaacaacttgcctgaagctaagtagccagtcagttgactttggaacatctgggcaagactatgggtctacagcactttttctgctaatgtacattttgtatttgtctcattatgttttctctcaagtttagaagttcctaattgctcaataataagtagcagagtcaggatttaaactcaggtttgatttttaagctatatcattgttttccctataacagagatgaagcacttgaagrtatttttatttgtttttgttttgctttgttccacacatttctggattttgaaaaaggtcattgccagaatgtctatgaatatttgtattataaatgtagacaggtagaatggtagattgaagggtggataaaacatctgtgttttttttttcctatcagcaaatctatgtgtgacctcttcataaaattttgaygcaagccaaatattagtgtttccttttgtcaaaatcatcattagaatgagtggcatggtgggtcagaaaacaaacataatagaaaggaatggaagaggagcctttcagataagtttataaaagatttatgtaactattttggcagaacttggtaaggaaccctggaatggacagctgagaccatcttcagcttgagagtatgataagtacaagaaatttgaatacagacaaaatattccaatgctcaaaaatagcaagtgttcatagtttttattttgcatctgtattatttctccaaatgcctaatttcaaatagctggctatgtattaagtaaatgtttatttctcccctttctctctctgtgtatatgtctctctctctctctttttctctctctctgtttgtgtgtatgtatatgtgttatatatatgtgttgtatacatatatatatacacacacacatacacataaaggcacacacatacatatataatttttattaaacaacarcaaatagttgctaagtacctacaatgccactgatccrgaaaaagggcactatacatggccttgagggaaaggaaaggaaggacttgacatgtgttgagaattatttgccaggcatctactaactgctacacactcattatctattcagttctcacaatagggctatgaaataagtgggtggcattatccccattttacagatggggaaatgaagtttcagagagattccactaaattcattcagatagagatgaaagtgagtatctgggctaatcagattatctttctcaagaatctgaaaaatttgggaagaggataagaagactrgaaactgacgggcacagtggctcacgcctgtaatcccagcactttgggaggccgaggcaggcagatcacctgagctcaggagttcaagaccagcctggccaaaatggtgaaaccttgtctctacttaaaatacaaaaaattagccgggcgtggtggtgtgtgcctgtagtcccagctactcgggaggctgaggcacaagaattgcytgaatccgggaggaggaggccgcagtgagctgagagtgcaccactgcactctagcctgggtgacggagtgagactctatctcaaaaaataaaaacaaaaagaagactgaaaacaaaagcaaaaatgatatagaaaaatgagaaaacagaggcctcaagaaactgcaggcagaaaccaaaccaaaccaaaacccagaaagtatagagagtaaaatgattgctcagaaacttcagactggtagagtcagagaagaggtgtcatcataatgtctaagaatcaggctactgccattgaggaccattgaaaataagctttttgagagctttgtattattattatttctctttctttgagactgtcataaaacagcatttgagagctttttctaagaatgctggatttcctatagctgccttggaaacttccagttcttgaagtgcttcattctttgtgaggccggttgagcctggatttttccgagatgcaggaagctactcatttctgtagtctgctcatatccacatattcacccactctacctaagcaataattttttatctttctctttccactttacctctattaggcaaatgcctacaccaaaccagaaccctactgaaaggcagtatgaaaaatgtagwttccaggctgcagcccctgaaaatcaagaggtagcatagaagggagagaatggtgctgagatgtcaacagataatccagtacactctctaaaaagtaacaggaagctatttgtacattttaaggatacagcaaatttgatatgacttatacttttaaaagagaattgattaaaatacagagaatgagttttaggaagagaagaatatctggggccatctatttagaggctatttcactagtctaatatgggccatgatgatgacagtgaagatgcagaaaagtagacaaatataagaaacatttaggaagtaaaactgataggactggatgtgtatgagagggaggtgtcagggatgacccgatatttctgacttacccaactggattgatagcattgccattcactgagataggggatgctgaaggaggactggccagaagaatttaaagcttcattgggtattatctctcctcctggtggccttaaatctttagaaagtaaacccttcrttatatctttcacagtacccagcaccaggactttcacatcgtgggtcttcaataagtaattgctgaattagagagtcattattgcatatcctacaagcaactagtcatgaggaattaatcctttatgacaagaaaacaccaccaaactcctgtcccagccgggctggttaaaggcagcagcactgaaaacttacaaacacagccaaaaaagtagaaaaagaaataataagagaacaaatctctgtgagcagatatatgtaggcaacgtttattcatctggacactaattctgccagaagggtggggtgatctcaagtatcatagatgcaaaaaggaactaagcaaaagaaaaatggtttagtcaccaaaggagaagatcagaggcattattatatgacagaagttataacaatcaaaattatgaaaggcttttgttttatgttgtgtctaagaaagcacagtcagagtaacttaaaaaaaaggaaaacagaaaaaaagagaagacacattaaaagggatatcattatgcagggtataaatttttaaagaacagcactaaattatttgaagtgaaagaaagactgaggagaaaggctgaaaatatgaagagaataaggcacataagtgagtagaatcaaagacaagatgaattaatgtaaagtgtaaactcaatggatgagaagtaaaggctaagataaattataggaggtgaaaggagcagcaggagcacagggagggaaggctagaaacaaacacactaaaatcagatgaaaaagccaagtggagcaatggggcagatgaaaaagattaaaattttttaaatcctttttgtttttaaaaagcaaaaccccacagaattgttaaaaaagaggcaaggatccgacatcaggcaaagatgcatgcagagtcattatgaaaactaaatgtgttttctgtttagtttggttgctttgtgaatctggaaccattttgacaygtggaaatattcattttgatgtgcttaaagtgtattgattatggtaattgttttttctgtgttggttgcagtccattgtgatttcctatgggctactgtaattgctttctaatctgctctgttggctaatttggcttgggggcgtcaaggtgacctctgcatgtcagcctcactataattacaagacaggtatagcraagtccactcaaagaagagaaagttacaaaggtggggtgtctgcatgtacatcccagagaggagtatcatgtaggaccatgagtgctgaggaaaacataaaaaggaatatttttgtttttgccactcactgatccagtggctttctactccaggctgcgtggaagagagcaatggctatggccctaatagttattctgtagaatttcccacattaacttatttatttttatttttatttttatttttcgaggcagagtttcactcatttcccaggctggagtgcaatggcgcaatcttggctcaccgcagcctccacctccgcctccgggttcaagagattcttctgcctcagcctccggagtacctgggattacaggcatgcaccaccacacccagctaattatgtatttttaacagggaccgggtttcgccttgttggtcaggctagtctcgaactcccgacctcaggtgacccgcccaccttggcctcccaaagtgctgcattacaagcgtgagccaatgcacctggccaacattcacttattgaccttagaagaagagaaaccactctgggtctgctgtcatggtccttacattttgcctttccattgattgttctgttcttgttttccttaaattaaaagagctctcagaattcctgtaacataccatttatattttgggattacctgatcagatatgtgaactgtcagtttcaagtaagttttctatgcatatcaggatcactgcccaggtctgygactatctctgggattatgcattactatttgtggtatgtcagctctgaaaaaggaaaatgatctggtgtgaaaaaagtcagtgtacccctcatcaaggttctctatagtatctttattttaccatttgtccttcattttacctttatttgtccttcatcatgtcagatattaatgaatatatagttatatattatatcaatagcaaccatttattgagctcttactatcaattagtatacgtgttatccatgaaagagctatatgaggtaagctccatgatgaacctcactttacagaggaaacgaaggcttagaaagggtaagaaacttgcctatgatggctcgctgcttttttcacaggagcaatattstttctttgattaaaaaaacctcagcgcactgtattacttgtattatcaggtataaactcccagccaagcattgcatgtataaaattgcctgttttttaatcccgccatawtgcttcagtataaaattttcctcatcaagacttctctataatggttcattcttcccttatttgatgtactatgtcatgatctgacactgcaaactttacatatgggattaaactcatgatgaagtcattccctatattctgatatttttggtttcacatcttcatttcttmataatatgaaatattacagataaaattcaagtctcctttgttcttttcttcagatctatttcctttccaccttctctagaagcagctacaattacaaatttggggaggagcttccagtatgtttttttacttattattacagatatatttccataggcacttgtaaaatttacgtaaatgtcagtgtatttcatgttttctccaacttgcttttttcatcccacatagtttttgatagccatctacattgtacttrtagattttaagttctctgcaacatattaattgtcctgtgattgcaatgtacttgaaaatgaagcttactccaaagaatattgaattactccctatgtgacagggaggaaaaactcttgcctgaagaactttctgctgcctttgatttgaagagtggggtggggtgtctttcaagtrtgagctgtagttctgaggtaaagagcatctgrtcagggctgggaataatatgtgctgactgggtgagggaatgaggagtagttttaaaacacaattgtgcctagagcatatgctatttaaaatcccattcctccctcccagcaagatcctgtcatgctggtgttgatggctgtattcccctgctgtggaaaaaacacaactagagtagagaaacatctctttggcttttgtctgatccatagataaagacttaggtctaaacattccctctatagttggtgaacatttgttgaataccaacagtgaaatattcacaggaaatgcagctgyttgcaatatcatttctgtctctaagaaagagccttgctgttgtttttctgtctgtcttttattaaaggtccacacacgttcctgttggggaggatcaagtccagcacatggaactagttcaggatctagcacaaggtttcaacaagaagtatggggagttctttccagtgcccgagtccattctcagtaagtaagaaacttataattgttacatcagggtatattctaaagagaggattggacaatagataggcttggaactttcttgggactaacctcagctttcttgtagacaggcttcaggatctgtaactagagtcctcattgttttctctagtgtaggactagaaagtagactacgttggattcctgaaaaagatgttggattattgaaaaggataactaaaaatattttaaaagtatggaagagaccaaaaatttaaaataatatttataaagtagtatataatttatgaagtatgaacagatgcttcttgacttataattgggttacatcctgataaagccattgtaagttggaaacactgttaatcaaaaatgcatttaacacacataacctactgaacatcacagcttagcctagcccaccttcagcgtgctcagaacacttacattagtctataattgggcagaatcatctaacacaaagcctattttataataaagtattgaatatctcatgtaatttattgaatactatactgaaagtgaaaaacagaatggttgtgtgggtatttcaagtacagtttctactgaatggatatcacatttgcaccactgtaaagttgaaaaatcataattcaaaccattgcaagttgggaactgtctgtgtgtacatcttggtgatctgtttgttttgtttttgttttgggtatgtgtgtgttggtgtttttaacctagcatccatgaagaaggtaaaatccctacgtgatccttctgccaaaatgtcgaaatcagaccctgacaaactggccaccgtccgaataacagacagcccagaggagatagtgcagaaattccgcaaggctgtgacagacttcacctcggaggtcacctatgacccgsctggccgcgctggcgtgtccaacatagtggcggtgcatgccgcggtgacggggctctccgtggaggaagtggtgcgccgcagcgcgggcatgaacactgctcgctacaagctggccgtggcagatgctgtgattgagaagtttgccccaattaagcgtgaaattgaaaaactgaagctggacaaggaccatttagagaaggttttacaaattggatcagcaaaagccaaagaattagcatacactgtgtgccaggaggtgaagaaattggtgggttttcyataggaagtttcaacgaatcacagcaaggcttttgtgccttgcactccatgcattctgataacggcagctttcctaaaaagaaaaagttatagttttgggacatttaatttggtatagctgattattggctttatttgatgaatattgctttgtagctttgaaatacgacagtgttccaaatcccatcaacaaaatgctgtgaacaacaacaacaaaaaataaatcaagaaggcatagctstctgaatccccaattattgaggcacactccttggcctgcagaaatgtgattgaagtaaggagtartttgggaaatggagtatcatttgtgcttctctctggagtacttactgtaacagatgcacackttatctacttcaacccttttataaagcaatatatagaggtcttagatgtataatccttgagatgccatttgatcagatgccaatttgtattcagagctcataaaaacaagtccattcttatagtttgtttgtcactgagacggtgcctgatttaatatatttaagctgcttaacttgttttccaagagataacaccaactgttccagcaataatttgttttttaattcagagatatgggatatgatcttctaaggaggttgcattattttgacctgatttatttattgtacaagagcccaagtccctgaattatattcttaataagtgctttcttgcattcatttcagtttagtctcaccaaccccctatgaattaggagaattattgtcattttacacatgaggaaagtgaggctgagagaatccaattagcttgtacgatatcactccataagagaagcaaatctgagagtaaaacccttaccccttattcttaagaatagtgcttgtttattcagtacaaaaaaaatgctgaaaggcagcgttttttagactctaaacattctgattttgaaggtgggtrttggaacgactgatgatgttttttatatcatcaattcagccaatggatgcgaacttaaaatctggattcacagaaccgtggtcacatttccccatcaaaatccccaaggcgggtcccaagttctctcctctacgctcattgcagaaatactttgaaataggttctgccagtctacaatagcagtgaagactgacaaatcagatattcccaatgactgacagcttctcatcttgcctctacctcagttaagtaatgtcaccctgaaacctagcttttctgcacttccatttctgacacctgaaaawgaaaatgataatcctaacttatacaccaagacctgttagcaagatcgattttgtaacagaaattgcttataagttttttatcagtaaggaccatgatcaccatttgtacatacataactaggttgttgagcaaagcatttttgctcatgtttcttaaggaagtagagtagtccttgtgtcagaacacatgttaatccacaaaacgccscatcccagattccaaattaaaacatcgtttttaggattcttggagctagcctggatcatgggtaaaggaaacattttgccttttgtatcttatactggaatgggatgtctgtaagtcctagaacctctttgagcatatttcttacaagcctctgttttttcccctttaaaggaaactttgaaaggattgtgaatactggaaaatgacaaaactraaggtagatctatcaagccaattgtctgtttatctgtttgtgtggtttttacccccttgcaatacctttcctccaaaaaattaaggcactatggaaagaatctcagaggagaaaaacagataacttgtgataacttccagggaccgaagtctatgcattggtgagggtggacttgtttgcaacctgttgttattttttttaagtgacccaactgttcaagtccaaacttggcccataattattaagagaatcttatccggttaatcagtattaatcaggattcttcagagaaacaaaaccaataggatatatatctatatattagagaatttattatggggattagctcacccaattatgaaggctgagaagttccatgataggctatgtgcaagctggacccaagagagatgatggtgtgatacagtccaagtccttaggctggagaaccaggggaaccaatgatgtaactgtcagtccaaggctgaaggcttgagaacctgggggccactgtaagtcccagagtctaaaggcctgagaaccaggagctgtgatgtcctagggcaggagaggtgaagttccagctcaagaagacagcaaatttgcccttcctctgtctttttcttctagtcagtccctcaactgattggatgtcagcccacatcgatgagggcgtatctcctttattgagtctactgattcaaaggccaatctcttccagaaacaccctcacacacgcgctcagagtaatgctttaccagctatctggatatcccttaactcagtcaagttgacacataaaattatccatcacggccgggcacggtggctcacgcctgtaatcccagcactttgggagaccgaggcgggcggatcacgaggtcaggagatggagaccatcctggctaacatggtgaaaaccccgtctctacttaaaatacaaaaaaaaaaaaattagctgagtgtggtggggggcgcctgtagtcccagctactagggaggctgaggcagaagaatggtgtgaacccaggaggtggagcttgcagtgagccgagatcaaaccactacaccccagcctgggcaacagagcgagactccgtctcaaaaaaaaaaaaaaaaaatccatcacacccagtgatctcaggaagttgataaaagagccaacaagtatggaatctagatctattttcacatcccttccacttattgtttataggcccttcacaatctttctaatggagatgacacattggagagaaacctaatttttttttttctgtatgttttgtgggaagttgaaatggtgaaaaatatttcaggtggtaataataatggtcctgtaactggtgctctgaaaccctgcttcaaaccgactttgacagctggtcactcaacacagtgggggtgtcttgccctttgtaggtgacccataaacatttatcaaaagtatgtgtcaaaaaatgggctagagatttctaataaagtgtgaatttttttttgcaaaagccctactgatgtacaccatcaagatgcttatcataataacactattgagttctcattgtgtatcaggcaccatactgaatggcttataacagtgtttttccaagtgtggtccccagaccggcaacatgagcatcacctgggaactcattaggaatgcaaattatctgactccctcagacctgttgagtaaaaaacctagaggatgaacccagcaattggtgtcttcgccttccaggtgatactgatggcatgctgaactttgagaaccattgctttatttgcattctctaatttaatctacaagccaataaagtagatactgttatcaacctcagattgcaaaagttgaaactgaggcatgggaggctgagttacttgcttaatgtagttcagcttctaaagggaagattctggtttcaaatccaggtcacctaatccagagccccactaggccacagtgacctgtataaggtcttttggtacgtatggggggcaacactgtccaatatggtatgtgtccatttaaattgaaataattaaattttaaaaattgctttcttagcagcacattcaagtgccctgtggcttcatgtggttaatgcctgtcatagtggataaatataggtggagaacatttctgtcatagaaccatctatagatactgcttcttcagtattcagtttactggttttgcttataatagatcaaatacgtaaagttcaagactcttcctggagagttcttcaactggacaattcttgaatatagtaaaaacattacttgagaatgaccatatagtttgccaaacaatgttaaataataagagctattacaatatgtattatatacttgccatatgctgagcactttgtaagtgtgtttatgttcaatgtcttatttcatgtttatatcagctctataagataggaactattaataccagtttttaaagtaacattcagcaacttgccaaaagtcacatatttattatgagtctctagcttctcccaattaagaactaagaaatatcccttaactattgtgcctaagggagtagtctgccactcttcattgagtctagaatcttctccaagtacttgtgatactctcttgtgtgtcctatgatattcttagccctcacttctccctccttgcctccttttcccctcccctctccttactttaatgctgttataattattcccccaaaagttcttcatttgtacacagagcagtccttagtttgctctcacatgcagcctttgatttctttcagttcaccctatcaagtgctgtgtgcccctgttactagttaaagggaataattgtgcatgtgacaattcttggtctctttctcttcaacacaaggactctgtctgtgttctcyttgtgtgtcctccctatgtgatcgacattctcttttcagtctgtcaactggatgcatcttttgaaatgttttggctaggaagtcaatccctccctgagattgagctgaaaacaaattgcctattaatagcacttaacattttcaaaccaccccctttaagaagaacaacctggaggctttactgttaatcattttaagtcctcatatgttaactctcaacagttctgttatattggccaggcagggattatcttctttctctaggaaggaaactgggtttcagagctatagtgactttatccttagataggtaattcaacattatgacaaatgtttgtgtaggcactgaggaaatgcaatatgactacaatttagaggaggacacacagagataccagctagcaaatgctgggtgtgcctgggaatgagtaattcacaagaatgttcaaggaaggaatatgatcgatataggacaggagaaagggcttttcaattaaaaagtagggcacagaaacatgagcacatttagggaaaggcaaattcatacaatatgtggacaaaattagatggaaatattatgttgagtcacatgaaattgtaatatttgattactattttttaccaaaaacactggcagttccatgtggattcacctaatatactcagtgaacaagcatttgtggagtgcctgttttgcaggtacaatccaagtacgaagaattagaaatgagacacagtctctaccctcaggctccttgtctatgtagagatggacatggaaagccagtgagaggtcgaataggaattataaccaaagtcttctgagtcttgtccctctcctgtgcattagctatggcatttgctcttaattactgggaatgtggcctctagatgtcacaatcacttagtagtccttgaataaataaaatatttaatatttgatataaccatgttggctcaatggaatgcaaattcattttataatatgccctcctcacttctacccacctatgcacatagtaaagcaggcctacagtcgtccttttcttctaagtgtttctgaaaatcaaatgatatgactttatatgactctaggacaaaatggtctggttttacagatttccctttgtgggagtaatataaacatacaggctcttcctgggaagaaagccatgtcccatttcctatctgtaaatgcagtgctgaagaagtgctacgtgcttggcctttaccaccagatctccccacaccagcctgtcctgtagggaaacccattgcgaacaattgtcagttccaataaataggttgttcagcgagttccctgagtttgcagtagcctcccccaaaaagaggcttctgtaacgacttttttttgttttaatgagagactgcgtggcttattcagacatgagtgtgggaaccagccctggggagagaagtgttcccaccatgaaccggacggccagtgagcaggaaaggtgttgatcctcagcaatattccagaagaaagttcctgcactgaaggaggaggtgaggactcatgaggatgaaggccacaatattattttattatagtttcctctcctgggccccttatagaaaaattaacaaatagaatttctgaggttgctgattcctcagtgaattattatgctttcattttttctgtgccttccttttctacttgctgttttcttttttttattattattattaatatactttaagttttagggtacatatgcacaatgtgcaggttagttacatatgtgtacatgtgccatgctggtgggctgcacccactaactcgacatctagcattaggtatatctcccaatgctatccctgccccctcccccaaccccaccacagtccccagagtgtgatattccccttcctgtgtccatgtgttctcattgttcaattcccacctatgagtgagaatatgtggtgtttggttttttgttcttgcgatagtttactgagaatgatgatttccaatttcatccatgtccctacaaaggacatgaactcatcattttttatggctgcatagtattccgtggtgtatatgtgccacattttcttaatccagtctatcattgttgaacatttgggttggttccaagtctttgctattgtgaataatgccgcaataaacatacgtgtgcatgtgtctttatagcagtatgatttatagtcctttgggtatatacccagtaatgggatggctgagtcaaatggtatttctagttctagatctctgaggaatcgccacactgacttccacaatggttgaactagtttacagtcccaccaacagtgtaaaagtgttcctatttctccacatcctctccagcacctgttgtttcctgactttttaatgattgccattctaactggtgtgaaatggtatctcattgtggttttgatttgcatttctctgatggccagtgatggtaagcattttttcatgtggtttttggctgcataaatgtcttcttttgagaagtgtctgttcatgtcctttgcccactttttgatggggttgtttgtttttttcttgtaaatttgtttgagttcattgtagattctggatattagccctttgtcagatgagtaggttgcgaaaattttctcccatgttgtaggttgcctgttcactctgatggtagtttcttttgctgtgcagaagctctttagtttaattagatcccatttgtcaattctggcttttgttaccattgcttttggtgttttagacatgaagtccttgcccatgtcctgaatggtaatgcctaggttttcttctagggcttttatggttttaggtctaacgtttaagtctttaatccatcttgaaatgatttttgtataaggtgtaaggaagggatccagtttcagctttctacatatggctagccagttttcccagcaccatttattcaatagggaatcctttccccattgcttgtttttctcaggtttgtcaatgatcagatagttgtagatatgcggcgttatttctgagggctctgttctgttccattgatctatatctctgttttggtaccagtaccatgctgttttggttactgtagccttgtagtatagtttgaagtcaggtagtgtgatgcctccaggtttgttcttttggcttaggattgacttggcgatgcaggctcttttttggttccatatgaactttaaagtagttttttccaattctgtgaagaaagtcattggtagcttgatggggatggcattgaatctgtaaattaccttgggcagtatggccattttcacaatattgattcttcctacccatgagcatggaatgttcttccatttgtttgtgtcctcttttatttcactgagcagtggttggtagttctccttgaagaggtccttcacatcccttggaagttggattcctaggtattttattctctttgaagcaattgtgaatgggagttcactcatgatttggctctctgtttgtctgttgttggtgtat

SEQ ID NO: 95798 - DNA, 18930 bp, Homo sapiens
acacaacaaaaacaaactcttcactccactggctgtaacacatttctactctgagatcttcatggcacaacttcttgaacaagtgttttcaatagtcactctcttcacatttttcttctattcctcaacatacagaagaaacgtgtgttggactttccagttgaactttcaacccaactatttgtggaaattgctattaccaaattacttatgatgttgccaaaacaaatgatcaattctcttcctgttacatttcatgcatcagaagcatccaacatagtggaccacattctttttgaaatactttcttcacttgacttttacaacgccatccgctcctaattttcctcctgccggccaccgactcctactcagtatctttagctggcccctcctcctctgttcaacctctaaatgtcgatatgtctattccaggattcagtctagaaacttttccttttatccttgaatattcttaccctagcttatttcatctagtcctgggcttttaaaaatcactttacgctactcatgtccaagttgacctctctaggactatagcacaaggggtataattattctaaagtaacccagaagtttaataagctggccaagaagagggattttctttttcccagcatgagggactctacctagtatatgtctctatagaatgggtggctttctctcctaagaaaaggaaaaccctttgcacgagccccaaaaactctaggttctgggcagttgattttcccagataatgttgtgaacagctggcacctaaatctagactgtttcacaccaaaagcctgtgtgttcctccattgataaagctgtgtcctcatgctaacatgataaaaaattatagtaagggaaactagtcttcctacactgaaacacagactcatattgtgagcccagtaatttcctgaccatttatgcatcagtgtaagataggaggatggggaaatcatgcaatctattcttttgctgattagtaatctttgtgagttttcctaatacagcatttttttttttggctgaacgcagaagaatttattgatggtacacaacaaggtggggctccctaggcctctccctcttcagagggtctgcatggaaactgtgaggaggggagattctcattgtggtggggcactgagtgtggcagggactccccagaagctgagggcctctgttttcctctcatgctctcgctggggctggtggtccagggatcttactctttgaaggccctgtgggcaatgaggtcgatcacccttttgctatagccaaattcattgtcataccagaaaatgagcttgagaaagtggtcattgagggcaatgccagtcccaggatcgaaggtggaagagtgggtgtcgcagttaaagtcagaggagacaagctggttctcagtgcagcccaagatgccctcgaaggggaactccgatgctgcttcaacactttcttgatgtcatcatttttggcaggatttacataggcaagtcaggtccacaaataacatgttggcagtgaggacatgaaacgtcatgccagtaagcctcctgttcaactcagggatgacatttcccatagccttgacagtgccaggagatgcaggaatggcattatggagagccccgcgactctcatggcatagtttcctggaggggctatccacagtcttctgggtggcagcgatgtgtggactgtcgccataagtccttccatgacaccaaagttgtcatggatgaacttggccaggggtgctaagcagttagtggtrcaggtgacattgctgatgatcttgaggttgttgtcatacttctcatggttcatgcgcgtctcagatatgggggcgtcagcagaggggcagagataatgacccttttggatccctcctgcaagcgagccccagccttctctatggtggtgaagatgtcggtggactctatgatgtactcaaggccagcatcaccctatttgattttggtgggatctagcttttggaaaatggtggttaaatttgtattcatgacaagcttcccgttttcagctttgacggtgtcatggaatttgccatggatggaatcatactggaacatgtagaccacgtagtcgaggtcaatgatggggtcattgatggcaacagtatccactttaacagagttaaaagcagccctggaggccaggcacccaatatagccaaacccattgactccaggcttcaccttcactgtggtgccttgggaatgccrctggcgctgcacaagaaaatgtggctgtctgtcgaacgggagaagcagaaatctacagcatattatttaacccataattatcatattgagaaattctttgcgaaatctggtaccaataggtggtgactcagatgggcatcacttgacatagcatgctgaccttccccgagcatcatgtggacaattcagtcgtctcagtattacttgtttaaaagactatccttttgctccaatgaattacttttgtgaaaatcaattgaccctatgattttggccgttaactaacacataagcaataatttcctcaaaatggattataggcctaaatttaaaggccaaattatacacctcttaggagaaaacatagattaacatactcatgaacttgagttcgacaaaatcccgatgtttcctggtagaagaaaaaagttgaaatattgagtcatgatcaaaactaaaactgtttgcattttaaaagacatcaataagataatggaaatataatccagagactgagaaaaaaatttcaagtcatacatttgataaaagatttgtatccaaaatataaaatacactgacaactaaatagcaaaaagataaataagccaattttaagttgggcaaaatatttgaataaccattgcaccaaaaggtgtaggaatagctaataaagcacatgaaaagatggtcagtatcatcagtcagcagggaaatgcaaatcaaaactacaatgacacaccacttcttacccactagaatgctatgataaaaatgaaggacaataacaattgaggaagtgaaataacaatgatgtggaaaaattgaaatactcatgcattgttgatgggacatgcagccatgttggaaagcagtttggcagtttcttaaaacgttgaagatacatttaccrtattacctagcactttcattccttgttgtctactccaaaggaaaaaaacctatgtccacacaacacatgaatgtgaatattagtagcagctttatccataatagtccataaagtagaaacacatcaaatatctatcagctgatgaaagaataaacaaatgggagtgatccatacaatttaatagaatttagcacctaaaaaaataaaatattgatacgtgctacaacacaggtgaaccacaaaagcacattaatctaagtgaaagaagacagatacaaaaaaccacatgttgtatgactctatttttatgatatccagaaaagacaaatctgtagtgtcagtaagtcaattaggggttgtctggagctggggagtgggaataaggggtggtattgatgagcatgagggatttcttaggaattatagaaatgttccaaaacaagattgtgatgatggtcaaacaagtctaaaattttactaaaaataattaaactgtacacttaaaataggtgaatgttatgatatgtcaattatacctcagtaaagctgtttaaaaacaaaagaatgttagcagtgtggccttattgacccctaatcagtcttgctctttgttttatttcttgctttctttagtgcttacatttattagtttcactcagagactccaagagacactggctgaaatctaccagcctccagaactctcaactgctaagggaatgagtgaccctctcctgaaggcgatggggattgttaaggtgcactccagcatctgttatagcacgtaaaggcacatgatgcacctgagtggtttcaggtagtgctccacacgtctcagcaagatccagggcctgcagctagttctcttagcttcagagaacaagctgctgcatcctgggtcacagggctaatctttcctaggcaagtgcgtttgaagcgttgatagtcagatcccaagtagaaggtgaatgtctacaacatgggaggagggcaagacctagagtggggtttcaaaccaaatcatttctggagtattacttccaacaattgcagaaagcattcttgttaagtgcttatggcatgttcaccaacatagaccatatgctgcaccataaaacaagtctcaatatatatccaaagatcaaaatcatacagagtatatgctctggccacaatagtatttgattataaaggcataacaataagatatctagaaaatccccaacttttagaaaacaagcagcatgcttctgattaacacttgggtcaaagaagaaatcacaagaaaatattttaaacatcattaactgaatgatgataacccagcattaaaatgttagatacagctaacatagtgtttagagagaaatttacaactttaattgtctatactggaaatgagcaaaggagtaaagttaattatctatgattttatcataagaatcctgaaaaagaagagtgaaataaacccaaagtcaataaatgtaagtcaattaaaaaataatgaaaatcatgaaatagaaaaatgaacaaacaatagagacaaccaatggtcaatttttctatactccatgcacaatacctatgaggtggattgggggaagggcagagagataacagagaacaggcagaaaaatctttctggagtgaaggaaatgatctatatcttcttttgggtggtacttaaatgggcatatatgactgtcaaggttcactgacactgaacactggagatctgggcattgtaatatttataaattacatctcgattttttaaaatagaggaaagtgtcttggggagcttacgatggagatatgtgggcagttctggggcataggcttcaaaagcacttacagcatctccaggaatttgctgagaattgttttgcaggcaaaaatataagataagttcaaacatctatgataaaagtcattgtggcatacaactaaaaatccctattcttgtggtacaggtcatatcattaagtggttatcactagatagctttccttcaatgatgttcttcatctaggaacacagaagtctccaggggaaaatggcgattgaagttttggatatattgagttcgaaagaaagtcacctccataaaacttagtgattggagctgtcacccttgcaaatttctaaactctgcaagatagcagcaacatttcaaatgatactctgacagaggagataatgggctaacgtagatttccctccagatgtatttattgcacaaggacaaaattcacatttcactgggagatttctcccactctagtttaagatcacaggttgcagatcccagacagctggtatcaactggccagtatcatgttaagactaaacccaagactctatcacactgcagccttaagattggatttctcctactgttcctgggaagaactagatataacctaaaggtcactattctcctgagataagggatcctgcaggaggagacagcaatgagtatgtggccagagtacaaattgatacgagctgggccagaagccacagtgcataaagcttcagacctgccacaggggatgaggtgaccagcaccctgattactcggtccaccttttaacgatctaacaaatggctagagctttttcatttttttttttcaactaccactggcagtggtggggacacagaatttttgcaaaaaaagagggtggaggaaaataagggatctgtgtgtgtatataaccatttgaccactcttcttagccctctcctgggtcaccttagaatcagatctgttccccagcatcttctgctccctggcgagggtttcctgctactttggattagccatgaygggctggaacttccttgtgacaggagcaggaatgtttctggatcagagaatcatccatctcttggtgaaggagaaggagctgaaggagatcagggctttggaaaaggccttcagaccagaattgaggaaggaattttccagtaagtaaacttgagttataggtgtttggctccatcttaaaccctccatgcatgttgggaggtggaacttgtctagcaagttatggaaagttgtagtcaaatcaaagccaataccacatccacagtaatcaaaaaagaaatattaaatagtataaaatggcatagtgggaaagatactggatgggatgtccggagactggattctggccctgacacagaacttgagaggtagccacctcagcctccatgcattttttcttctcatctaaaaaatcccacatcaattctctttcttgtctacaactcatttatgttctgaagctttttgtcttgccaattgctgtgcaacattcacagaaaacactatttatctggagacctcaccagtgagtccctgtctctctagactgccccgggctttgtttcgttttgtagcatccttagcatctttagtgaaggtaaaataaaaggaaatggaaaaaaaaagatgagtgtgtcagtgtgtgtgtgcatttgtgtgtgacagagagaaatgaggggagagagaatcacaaagagagaatgagaaagacagagtgagagagagagagagagagcatyagtgagagggagagagtgcgcactagtgcacagcacagagcagagmcagagtaagaggcagtatgaggccagacatgcctcatttagatttcacatatatgacttttttttaaccatttgtctgttatcaccacaataagttgactgcagaatttgaagtagcaactccttgtatgaatagacccatgagggagttagaagaggggtcacaggccaggtgcggtggctcatgcctctaatcccagcattttgggaagccaaggcgggcagatcacgaggtcagacgtttgagaccagcctggccaacatagtgaaaccccatctctactaaaaatacaaaaattagccagcatggtggcgtgcccctataatcccagctactcgggaggctgaggcaggagaatcacttgaacccaggaagtggaggttgcagtgggctgagatcatgccactgcactccagcctgtatgacagagcaagactccatctcaaaaaaaaaaaaaaaaaaagaagaggggtaacatccaactgaactatgaacccatcaaggtgcagaaacagagtgacttgccaagaacatctgattaatgtgtagcagagctcagaccagagcttcatccagaggcttcatcacttggcccttgagctgatgcttggcaaggtgggtcttcagtctcttcctttgcctccatgtgtgtcccaaaccaattccctgtcatcttccccaacccaaatgattggggggactgtgtgtctacatgtgggctctggctgcccagagggtcctgccctgtgcacagagaagccccccattgacagcactccgggaccacacccaacaatctagtcttcctttcactcttctctgacctcttcaaatgtcagatttcctccactctctgttttaatggtgtctttgataaacaaatattaatgcacgaccaatattaaatgtttgtaatccttgtgtctcagcaatatttgcaatctaacatctgatatcaggaaaaaagcaatgctcagcctagaggaacagttccgctatggtgaaaatgcagggggcataatggatgggcagggcctgtatgaagataaaaacagagaatcctttcagtgttctttctgtgccaggcactgtgctaaaggttttgcatgtgctgactcatttacttcccataacaaccctatgagattggtaatattattagtcttatttcttatagatgacgagacagagaggttaatcaacttgtccaaggtaccacagttagattatggcaaagctggatttgaacccagacagtgtagtgcagcttctgtgctcttaagctgtagttgtctagcagcttctctagacctccctctagctcaagtcatgccataaaagcaactgcatttagtctacataaaacacttgccaagtccacagtgccttggagaaggagggagctatggcttcatcaacaaaattcccctttcttggtccctctagatccctgaaaactcattgggggaagagtccttttctctctgctttggagttcttctgctttgacatagcaattcctttgagccagtctgtctgaagttggcagcaaagaagaagcagaggaagggagtaggaagggcagaggtggaaaaacaaccagagaaaattccactctcaggctgttagccacctcctccccaacagcctctttcctacctccccccactgcaggaccttcttagagttgcctgacaaagggaagggkctggcagtagacaaaacatggcagaggcatcaggagagcaaacggtcctgcttgtaccccaagaaggaatttctccagccttgaatttttcactctgaattttactctcactgttctttagcctttgttgccagtttcagttaaactggcttattcttaccctttctcagaaaagctgattctaaacagccagtcctgcacctggggtacagggtacaaaaatggcasgtgggatgggcaggtttgagccttcactagaagcctggccttagatctctccttaacctcttagcctcagtttcctcaccaataaagtgggactcagaatacctacctcttgagatagagatacaaggaaataagcaagctgtgagccgtatgcaaattataaagcacaaatragagtagagtatttatccgagctccatgtagcatggtgctcattttgtgggttaattccaggtgataactttactggcagcataactacctgtggatttcagagaagcctgaagacattgatgttgtaaccactgcccctggctagacagttggaatgtcagttcatcagtggctaactcattgtcagcatcgctgtctgcttttgatgctattttgataagagttttcaacgaaattcatcatttcaatgaaattcattcattcataattcatcatttcatcattttatgtacaattcctgagtcatggctccactctcctcccagttgcccaagcaggaaactgtaggggtgattttatcttctccttttcctctcagcccagctccaataggtaccaggaccttcaaggtaaggtctgaaattcaaacctggtgtatctctcccctcctctgcttccactgtttgaccctggttccagtcctcatctaaatgttggcacagacattccgattaatctcttgatcacctggctttctcatatcccctataccagtccgttttatatcctcaagccaaggttaacttcctgcatcacaactctgcttctgtttcccttttacggttttttttttctttctttctttctttttcttgaaacagcgttttgctctgctacccaggctggagtgcagagacataatcttggctcactgctaccttcacctcctgggctccatccatcctcctgcctcagcctcgcaagtagctgagactataggcactatagcctgggtaatttttatatttttagtagagacagggtttcaccacggtgtccagactggtttcaacttcctgggctcaagtgatccacccacctcaacctcccgaagtgctggctggaattacaggggtgagccaccatggccagtctgtttttgtacttcttttaaacataaataataggttttatttgacatgatgctagagacccaaaatcattattcctggttacatatagaattaaattaaaatattttcctcttatacccaactctccacaatcaccctactccccttaagaaatttggtgagattctcatggctctagcaatgcttacattctaagcacacctgacaactcactgttcagattactttcctggaatgaggtgaggtacaaacaaatatttgttctttcccaatcaaccacaacacatgctgatttctctgtctttgtttacttgttccttttatggaatgtacaccctccactctaacacccccactctaacatccttgagcacttatgaaacatcacctttatcagaaaacttcctagccagatccagaaatcattgcaatgacctgacccatgttcatgcaaagctccaaaacaagaccaagctaacagtgttggaaggagacattctgaatgagtcatgccttaaaagagcctgccaggacatcttggtcrtcatccacactgcctctatcattgacgtcttcggtgtcactcacagacagtctatcatgaaagmcaatgtgaaaggtayagtatcctggggaggagatggagcaatgtgggaaaatgagaatcagaaagaaggacaggatggaaagagaagtttctccactgaacacctgctgtactctgggccaagtgtctttgctgatcactaccaactagggagttcaagactgctaactttagttttttagatgataaaactagggctaagagatgacaagtaacttgtcctaggttcyccaggtaagtaagtaagtaggtgagttaggctttaaattcactcytgtgtgactccaaaggctgtggatgctctttctactgtggctccaataaaagataaactaaactccaacttcagactcttgatgtcaagccaccrcttgcctcccagcgcaaaaatcataccttccagatgtcaccatagtcatcattttgaaccttgtgtgcaggctgatgagaacattcagagccctcctgyccacctcaaagaagaagtcctcttgagagaactagcaaagctggttcacagaggtctgtcaggacagaattatccagcacatgycttcccacaatattttcttaaccataagattttccctgtatccagaatacaatctcttcagctcaccaccgggyctactattacagagccatttcttgccaggtgcccaaagtgcagcctcattcgatcctcatcccttaaatattgggtggtttttgcaaattgtggctttccaacctactttaaattcagacacattggcttaaagaatcttgtcatgtagtctcaccctctgattcccagagcccagtctcttcaggaccatagcacmccactgctggcctggccctccacattcagtctactctgatgccttttctaatgcaactaattgyttttgggtctccagcaccatctaaaagaaaaaaaaaaaaaaaaaaaaaaaaccttgtcagtttctacttrcccataacctgtaagtacccctacagtgcaaggagtatgctaagaaaactagtttttcattttaattcttaytctctacagctcccagcaacaggggatgtgaaatgacaggggaagtgttagaggcatctgtttcctaaaaccattatcactggcaggcttagagaatacttcacaacgttggtcatttaccccttgaaggtaaactaactccatattttctctgccactagaytaatttttgaagatgatactgtctctccagaaactcaaattgcacagagactttaaaaggagccaasagtacaaaaataagcaaataaaaatgatcytttgcccatgatttttcttcctkcttcaagggaagacgctctggatacctccatgagctttgctttcacacagctcaggggaggctgcaaggtcctccccatgcaggtgttaccagcagagggcacactccctccccagtcctccaccaggytccacaggaaacaccagtgcagggtttggaatactaagtagaaggaaggtttatttattaccaccacccccsctttacataactggrtaaacagagtcacaaccagaattggaagcagcttgcctggagaacacacaatcaggaaaagtgtgtgggtatccagaatctccccaaacayactatttgctcagtgacttcagggatttggttttgctagtcaaagttttattagtcttcaataaaatgagaaaaagttttattagtcctcaacaaaatgagaaaaataccagcaattgcatgtatatatttaagagcatatattgccttaatatacaactgtgaatgtgtgtgcgtgatgtgaattcttccacagcccttttgtgcctaaggactgggactgtccatattctcagagtgtagcttcctgattttttagattttaaataatctgtctttaatggtatcaatgraaaatcataattttccaatattcttacttgccaaaatataaagtgataaccctaggttcttttccaaaattaaagtatacacktacacacacacacacacacacacacacacacgtccacaaaacccaaaagtctagaaattcttcctctctagagcccaaatgttcatttatttttatttttatgtttttcctatggctgcagcatggcccaatctctgtcagagccacagaagaatacaacactcagttgtaacccaagtgtgttacaaccactgcacttgggagtggggagtggggcacatggatctgtgcacgtggttgcggccccatagggatatttcctgacactgacagcatactcttcgtgggcaggtacccaacttctgttgggaacctgtgtccaagctagtatgccaggcttcatccacaccagcatcatagaagtatccaggcccaactcctgcaatgagatcatccagaatggccacgaataagagcctttggaaaacatatggcctgctccatacccatagagcaaaaagcttgctgaggaggccgtgctggcagctaatgagtgaacactgaaaaatagcggtatcttgtacatttgtgccttaagactcatgtatatctatgaggaaggaagccctatactttctgccactacaaatgaggccccattacaatgggatcctgtcaagtgtcagcaagttatccacatcaacacagtctatgttggcaatgtggcctgggcccacattctggtcttgtggtccctgcaggaccccaagaaggccctaagcatccgaggacagttctactatatctcagatgacaygtcttaccaaagctatgactaccttagttacaccctgagcaaagaatttggcctctgccttgattccagatggagccttcctttagccctgatatgctggattggcttcctgytggaaatagtgagattcctgctcaggccaatttatacctgtcaactccccttcaatcgctacaggagatatcatcaagcttcatcctcctggcttcatacagaaggtgacaagggcacaagcccaggtcctgctgcctccctttcacacaatggccaacttattgtcttcctcgtgtcatcaaaacctgtgcagtcactggcccaaccagaagctttctgtgctaaccatataccaaaggacagacaatgtgatttgccgttaccaaatatcagtggctaattctgaacaatttgggatctcttttaacttgagggtctcttttgactactagagctccatttcccctcttaaatgagaaagtatttctttttttttttaatctcctatttcttcacacagttcaatgaaaagagcaataaatgctttaatgcttaactggagggaggtgtggtttctattaatacatactttcctcctttcccttcatttcaaggtatcaccatctccaatttagaagagtaccatgaaaccagggtttgaggggtgggcagagtagtgggagggtcaggaagggcggatgaagactgaataagctctagtatgtttcgggcaactacaacatgacctacatatgacatatattaccttatttaatactcatcagaaacctctgatgtgagatgactatttccattttatcaggggggaaacttgttcacggtcataccaactgattagtgactagacctgctaccagggagtcagccttgaaagtccttatctttccactgaaacactcagcctgaatttgtcttgtcagtggtacagcagagcactggagcatggggtgccattccttgagagagccccaactcccatgggttacctccttcttgcccaattccatgcaggaaactctctagaacccaagagaatccctgagggcacctgaaaaggtttgcatgccttaccaaaccgccctgagcaggggagagagaaggaaaaatgcatttagcctccaccagcttcagtgtcaatttccttgaaggtctgtagaacacacctcccatggctatatgtgtgctggtcattctggttattcataaccctgcatttcaacctttcaaatcacacaatgaagccataccataggttcctgggcaagtaaagagaacaagggtgagcttcccagaaaatttatctcctactcagctcaaaaagtagaagtctactatcccacatccccagatataactgcctctccctccttttttatccatctttccattaaatcatatcctttcttcctttattcttccaactccttagcttctccttccctacatctccccttttatcactggccctcgcattcttctcaatttccctgaggagaggaggccaataaagacaagtttggggacttcagtgatgacatagtcattaatcaaccaaagaagcaacggtcaaaagaaacactttcaggggsattagggacacagttgaactgaagcgggtgaggaggttgctgtgggtccagagtgtgggaagggaagctgtctccctctggacctgggtatatcacagccatgatgagggtcacactcaacatcaagatggcttctttcttacacagaaaatttacagatgattaacctcaaagcaccaagggacaggtgatcagcaccagcatcagggtggaatggccctaggcagtggggtaaagtgaaaaatggaacacccctcttgccccatccactgaacaaaatgcaagagccagcacctctccagctcttgtaaggcatgcccaccatccatatgtttatgacaaatagcatgggaaggataggagggtggtggaatctgggacaagagcctttccccctggtttttcagcctagtgaaaccccactcctattgaccaatgagggcaatgttcacagagaagtgatgggaaagattatacctccaatgggcagtgaggggtgatcacagaaagagaggaagaaattggatgggccagcagtctcaactggacaagcacaaaggcctcggagtgttgtggccaacaaaatgtgccatcccttcttacaactgtgggtgccaggcaggcagagctcctgcaccaagcaagcctcgctgaacctcacgccatgcaccacacggaggcagcaagtctcggagggaagagcaaggaagcctgacccagtggggatttttgggtccctttcctccatctaggtggctctgcagggtacctggcaagggaatgaatgaaaacacaggtaagttctcagccaccggcttaagggctaggtgtatatgaatacagacaatggagctgagctggtcactgggaaaagccacaggaaccagcgggacttaaatgaggccttgaattcctgggtccagacagggggcacagcatgggcagtggtgcagaggaagacgaggggcataaggaggcctcccgtctgctgggaagcatgtatggagggcagatgaggagctcaggtacttgacaaaagtttccaccacctgagagccaggctctgagggccaggatggggctgggaacccgtgatggcctgctgagaactggcaggaaagtagccagaggccaacttttatgtgaaatctcttgatttctaaatattagcaactaactctaaattttaaaaaacagctcaaagacctgctccaagagaggaatgcgtgggctagtattcaaaatgtatgtgtaatattttatttcttaaaaagtaggtggtgagatgtcagcagcaaatctgttcattcttggtgaaaagtcccaaatatacattattatatcgtattgtcaccttttctgtatatttaacataggttataattttttaataaattaaatttggtggggaaaaaacatgcaaactaacaaaacacattcacaggctggacccaggattaagagctctgattttccatttctgctcccaatctagtggtccagtgggggagataaaatacaagacatgttaggtgctgtgcatagtaaatatgcagagtgccatagaaaggaaaatgcttctgaaggatccattcccacaggggactcatggggtccttgcattttggctggatatcaaaagatgggtaggatttcaacagacaggaatgtgagtgaaattattccaggcagagacaatgcagtctgcaaagacccaggtgagaaaggggtccattttaagcagcaatgagaccagaccagaaagcccaaggccaggggagacatggaagatacacctgaaaaaaatgatgggcacaggcaggatcacctggggtcatccctggagacaccgtgcctgcttccttcattgccctcagagtaggaattctgtgccccacacccccttaaagaagacttgacattcaattacttcacatataacatggctcatcttctctcaaaaattggactctacaggaaacgaatgtctcctttagcaatgaatattgatggtgatgctaaaagctgggacatcattcactctgcaatgggcattgttcagctgtccctggaagattaccttggcagcatgttgtaggatggactgaaagagatgaagaggatacttgaagaatttaggtaagaaatgaaggcctgatttatgtgttggtaacaaaacagactacaggggcaactgcggcaggcctgagacagaatggccgctagtttagacaggactgggtgtgggcacagaattcccaagcacacactttctcaagccagaaacctggatggcagccccccactccgcccacctatcattcagtgctacgaactttacctccacaacacctcttgaatatgtcgtcttcctccctggtaacatcattcctactcgtacccccaacaggcctccttgtcttggagaatcacccatgaaacctatcctcagcagtgttgccagagttctctccaaactagtctcaccatgtcactcccttccttaaaaccaaccaatagggggagccccaggactgtcaggacgagcctgagagccttagcagaacatagagggcctctgaagccctgggccctgcctgacactccagactaattctcaccaatccctgccctgtccccagattctcctactttgtgcctcaacaattttccaaactcagcgcttcctgcatgcagcatgcttttatatccacccaggccggtgcatggtgttccttccgcttaaagggtgcccagctctcctgccagcacatccttcccagctccttatttactatccaatatgtctcattttacagcctctgtgtcttgtgcatatcgagttgcactctcactgatttttcatttatatatcctgttccgcacccctacactgccgtgtcttgaggacagtaactcaccatgtcatctctctgtccccagtgactgacacaaaatagacacatgggctgatggagggatggatggatggaaggatgaaacacaagtaaactcatctgttagaatggagagaggaagggatagacagtcagggagcagaatgctttgaatgacaaagtaagaaagaattcacagatgacttttcaaggtgtccatgaacctgaagaagctagatcatcataaagagatccaggagaaagagaaggcgcacggagtgtatggagctgagaatgaactcatttgtgtgatatgaagagtgagtggggttgtgagaggcctacaagcagggaaatggaaaggctgatgaaagtgaagcccagctgccaaggttataaagggactgggaattaaatccaaaacctgaaatggcacaaggcccagagcatttttatactataagaaaaagaaaatttgttttaaaaattaaattcagaagagaatctcacactcttaggcaactcaagtgaggatcactcaacatctctggctacatgttcttcttgagacatcaagagactctggtggcaatttggagggattttttttcctttttttttttttttttttaatcatggaccaagatgccacccaagtctaatgagcagggaatggagtcggtgatctgaggcatgaaataggttcattatgaggaagtgaagggggaaggctagatgaacagaagaaagtggcttggccactctgtccccaaaagcagggggcactggggtcagttgcagactccaaaacagtcagtaatctgttctggaaacctgaagctccctattgaacagcggactctttcctcaagaaatggaagaaccagcactagcaaagtcagccattcttcctaaacagatactggtgacagaggtgtgggcatgaggtgggctgtgggactattgtcatcctagcatgaaccctggccactgaggtaggaatacccttctcatgagcccagacctaactccttcctgcatcagctggagtctgtcaaatccctggtgtagccctgagcagagcagttccatgggcacatggcctgtgccatcacccaggccctgtgcttggcttaaggggctgccatgggaccccacatttcattttgcactgatccctgtaaaatatgcaggcagtcttgattatgagaacttctttcagcagcaggcaaaac

SEQ ID NO: 95799 - DNA, 34297 bp, Homo sapiens
  misc_feature (1)...(34297): n = A,T,C or G
tagacccaacatttccaacaacagaaagacaccttcattgaaactgacagatttcacccagaatcagattattccagttgtgcagaaacactgattgtcacactctcctttacatactttgttgtttatttttttaattttttgagtcttttaaactttttactgatttgaagtcatacaatttttatttttttacaatgttatacatactaatattaatgacttcaatatgaccagtctataatttagatatcccaaactattgtaaatacagccaatttagaaaattatggaataggacaacaatgggaaaaaacaattaatggccatatttgcaattgacgcttctaaaataaattttgattaagaatattttaatcaaaaattgccttaatataactatagataaacatctagggtaaggttgctacaactctatttatgcaaataacatgactcaacctcatcatatgaatcacttcaacctcaatagatatttgtcttttgtcagtttttaatgatatttttctttttagagatactgtaagtcaaataatgaagaaactcatacatatgaaccattaataatttttaacaaaataaatagaagtgcaacatattaagcatagaaaaccctgagaatgaaataatggctgttatggactgaatatttgtttttcttaaaatttatatgttgtaatcgtaaaccccaataagttggtattaggaggtgggacttttatgaggtaattaggtcatgaaggtggagtccttgtgaatggaattagtggacttattaaagagaccccagagctctctctctctctctcattctttctgtcaagggagaacacatcaagaggatggcagtctatgaaccaggaagcaaaccctcaccagacagacagtattgtgaccttttgattttcaacttttcagtttccagaactgtgagaaacaaatgtttgctgtctaagccactcagtttatagtatttttgtcacagcagcctgaacagactaagacaatagtatattacattaaccttaccatcaatgcaccttttgtaaccaatataagtacaggaaatgtccttgtgcgagaaaatgagatacacatattcttgggatgtaactgagagtgtttgtcatgtcaaaacccagaaaaaataatcttgcagccccactaaagttgattactctcttgtgaagcatctgagatcttctttacaatcacgggactctggctcttctgtgccaatcaaggataatgattatttgtcctctgagcatctcagaccattctgagtgtttggctgttcgatatctttaatagattttttctccttacaaagaacctgaagtgagaaaacctttaagtatgcagcataactggcagaatggattcatgataatgaatgatcctacacatagaaagtgtccatgtaggatggtcatgttattttatcctttaatttagttgacaaaataaataactgagaccataaactgtccccttaccgatcagaataatcagtgtaaattatatagtctaaccagttatgagtaattgaacaattttttccaatcattgctaacccttcatgtcatacctggattaatggcaccagtaagatggaagaatgcatgtctcaattaagaaaatacagccttaatactgtttcttcctaggatttaaaaggtggaaaaagcattgttttcaccctgatgataagacaaggctggacaaactacaaaaaccacacatgttctgaaactctttaggtataagaaggtacagggtaaccaagtttctaaatttcaaaaaaaaaagaggcaggaatttctgaaataagaaaggatacatgtactttctcaactgtggtagagtacaagaagaaggtggcttccatgcaagtaaatttttaaaattagttaaaattttattcaattgctgaaggccaaatcttagctaccatgagaatacagaacttctgggagcctcagacacaagagcaattccacctactcatgtatttttgcatggaccttccccaggtgccaacattaagtattagagacaagcagaaaaccagaaagtgcctccccttggttctggagggaatgtcatgagaaaaagacatgaagcccaactcctgcctggattctcttctcctataaagtaaaacccttagtctgctggtgaatgggccacaaaccctgccaccttcaaggcacaagtaaagacccagtattgctagagatgggtaaaatacataaaggttttctacctctataggggcaggagattgtcctcagctcaggatcctattctaacattagtaagtgtatgccaccatgggggtgtggtagtgtcttagaccatttgctttgctattaaggaatgctggaggctggataatttaggaataaaagagatttacttgtctcatggttatgcaggctgtacaagaagtatggtgccagcaccttcttctggtgagggcatcaggctacttccacacatggcataaggtgaaagggaactggtgtgtgcagagatcacatgggagtgaggaagcaagagatagagacgggggaggtgccaggctgtttttaacaatcagttctgtgggaactaatagagtgagaactcacctgttaccacaaaaatggcaccaagccattcatgaaggatctgccccaaggtcagacacctctcaccaggccccacctccaacactggggatcagatttcaatgtgagatttggagggaacaaacaaagcatatctaatccatagtattcctcctccggcctcccaagtcaaacgtccttttcacattgcaaaatataatcattccatcccaatagtttccaaaagtcctaacttgttccagaaccaactcaaaagtctaaaggtctaaagtctcatctgagattcaaggcaagctatttccacttatgaacttttgaaataaaaaacaaattatttggtccaagaggcaatggttatacaagcattgtgtaaatgggtagataacactctgttatgtgatatctgccatagagacaaggctgagattggttgtcatggggatcagaaatagggatgctgagaaagccccgcctcaagcatacagggcctgtttaaccaggacaagagagaattttcccttctgtcacaccatcagcctgaaaagcactaagtaatgcacttctcttttagatactaagttgcagtcacttccttcaacaagtcttcaagaaataatatattttgggattttttgttattttcacagtttagaactctttctctccagggtaagaggggaacaacttttgaacattttgaagtaagcctggtggggttttctcatctctggaaacttccatgttgattaccagctcatacaatagaagttcttcttttacactccaaaatcagcttctgagaagatggaggtgatttgcttcagttcctttgatcagttatcaagttatgtgttagtatttggctatgtggctatatgtttattttttatttttagagacagggtcttgctatgttgcccagcctggtctcaaactcccaggctcaagcaatccttctgcttaccatcctgagtagctgggactaacaggcatgcaccaccgtaccatgcctggctcatttgactatattttaatatagtgttatcaggtataatttctgagtaacagatgttccatatggaggcaaacctcatccgacactgtgatgcaagtatgtgtgcactaatatatagaataaactagtctaaaaagtccaaaatagatttttgacatgtaatgaattaagggagttattaagagtctttttgcaaggggcagggggcagtgtacatatatttctgcaatataaatttttctctccactgtctcatgagtcttatgaaaactgacttgacctagaaccttagggaaaaaatattcactaaatatttcatgcacgcatttgtatatgcataatgcactgtattaaataattatttactaaataaagcatttctatgtgcttaccatatatcgggaagttgtctaagcaattatgactatacatatctaaattaagaaaagacaatcttagttctgatgctacttaggatttataaggctggaaaaagcattgctcccacagtagtgatgagaaaaatctgaataaactacaaaatcagtcacgttctgaaattcattagggatctgagggcatgggcaatcaagtatcctgaattccaattaagcataggccctgcttaggtaagaaaggacacaggaggaccacttaatttttctttaagaccctgcaaagattcctaaggggaattatttaattccctttattgatacagaaatggaggcaagaaaaggtgaaatcatttgctcaaggtcacacaataggtaagtcgtacaatcaagatgtcagcctgttagtttgggggtagtcatgctgcaagccactctgctatgctacctctgtcatcattgctagcacttcaattcagaccccagagaaaaaccacttagaatactaagactgatgctggagctcccgaaccttttcccttgtatctgatcccaaaatgtgtgaggtttatgtctgttatcacatataacatagtaagaataagaaccacagagtcaaacaaaagcaagaaaaatccttggttacctagtacaacacactttttacagctagggcaacagcccagggaggttaagagactctagtcaaagatttgagggtgagagacaccactgaatcctggtctattgcctggctgtgtgagtgtaggagctaaagtgacagaataggaggggtctggtttctgggcttgggataaaggagtaccccactcttttgttgcagttagatatatcctttgtgagatatgaaccctattggagtcaagagatccaccgggttaataaatgatagaacaatctcagtggctttgaagaaagagtaatggaaggttataatgacttcaatctcaggggaaaagatggagaattaatgttctaggagtggcagggctcctagacagtacagagaaaaatatgtgaaaacttgctctgtgctgatccattaagtgaaggaacacacacacactttttgtccctctttctcaacctagcctcttgtgtccctgctcctctgattagagtgtctgttgcttcctctacaataaagatatttactaacctgggaatgaggtggtgagaacaaggacctggagagtgtcaaactccccatcttggctgttttacacagtgaaattgaggctcaaattatctttgctgtgaaccctcctttcttttctgagcaagtggaaagtatagtaattaggacttcggagtgaaaaagctctgggcttaacatctaaccagttcaaccgtgctgagatctcaatggtccttctctataaaagtgagactaagaagtgctcacattgaatcattgtcagaatgtttcactgcagcttcaaaatgggcatgggagggggcacaacttgtctttaaaaaggaagattctaacagctttcatcactccatgcaagtaatttgctattttattgcattctgcaaatcagatatcattcatatctttcccactgccttgcttctattacagatacttgaatgggaaagaggtgagggtagtgcctacataatctgaccctccttccagtatctggcctgttggtttcacacagctttggttttcatggtatttccatgacctgtgaggacaaaaagcattgtgatgttttaaaaagagaagctcaggggcatacagccagcctctcaaccatgcagagccaattacttcaacatgggcccgtgagaggcagggctgaattccactagaactgacaccagattcttttgccagcctagtacaaggtccacattacaagccaaagctcagaaatttctggaggtggtgtatcaaaatttactctgcgagactctgctgaactggctgcatcagggagaaatttcatctcccagaagggtgttgctcatcgtttcttcccggaaacatctgcagagactagcttttcaggtgaggactcattacaaagtatcagatacataggatgaacaagtctagagatctaatgtacaacatgagaactatagttaatagaattgcattgtatatgggatccatgctacatgagtggagtttagctgctctttacataaaaacaacgacaaaaaataagtaactatgtgaagtaatagatatattaatttgcttcataatggtaatgttttcactatctgtatgctctcataacatcatattgtatactttaaatatccacaataaaatttatttttttaatgtaattattgctttgtgacacctcttccacttaagtgagtcaaattaaagtgcccgtattgtgttatgctcagaatatgcagacaactatgctcaaggaaaaggagtaacttccacttaagaaacacatatctgacaactattttgtcaatggcagtttgctagctaccatgaaaatccttagaagwttgtgctctsgactaataaatgaataaagaaagatctgagagcttcttggaagcaggtggatgaatagaatactgagtgtgtggagacaccagaaaaattactatttttaatcctggtcacattataagggaggcagttttttccttacactactactaagaagtttgttgcactgaaagtgagagaggaaataagtagatcaataagacaagaatacagacaagatttattgtttatttaaattatacagaaaacaaattttactctaaagatttaatctacaacagtactaccaccatttacttatttattcctgtttgcctttgttctctcttaaatttgaactttatgtgttgtatgtgaactgttttgtgtcctatattttctcattttatttgaacactctcccatgtgtctatacatattatatattatgtctgtaggcattatgttaatgccttagggttgcatcactctgttggaacatattttatgttatcttcccctattgaggcacatagagattttgttcagacttgcttatgttcatgtgactttataaaattctgtttagagtttttgttttgttttgtatttagagacactctgttacccagactggagtgcagtggtatgaacataactcattgtaacctttaacttgctgtgggctcaagtgagtccagggttagattccactggaactgacatcagaattttttgccaacttagtacaaggtctgcattacaagctgcaactcagaaatttctggaagagttgtaacaaaactcactctgtgagactgtggtcagattatgtaggcataatcttcctctccttcccattcaagtagctgcagtaaaagcaaggtagtgggaaagatctgaatgaggtctgatttgcagaatgtattctttttttctgcttacacaaaacagcaaattacttgcatggcatgatgaaaactattagaatcgtcccaccttagcctcttgagtagctagggctacaggtgtgtgtcaccatacccaactaatttttatttttgtagagattggggtcttgctgtgttgaccaggctggtctcaagcttttgccctcaattaatcctccctccttggcctctgaaagtgctggaattacaggtgcaagccaccatgctcagcctagagttgttttcttcttttaaattgttttctttagattaatttccatttctgtaataactggaccaggatcaaagattctgaagtttatgcccgggaatgctactcattgcccagtgctgccagctaccattattgtgtcagatttcttggaagaacctcagtgtcagtagctttcagtttaccccaaccaagcatgagagccatacctctttgttagtttgtaagtacatccttagagggtggttccaaactctactcttcagaaaatatagtaatatcacaccccacagacttgacattaagctctactttaactctactttgttacttccttctgagttgcatctagagaaaagacaagattagcctttaggaatgttatacttttatcatcctaagacccttagatatgagatatggtctggagttttcttcaagatataatgtagtacaaaatagctggaaacttttctcatgtccagaatatattatgcatttaatacatatgtgtttattgaatgaatatattaatgtctctatacttttggaaagtggagtgattagacagacaattaatacaagcatttcatgtattcaatcattcgttacttatgtattgagggcctactctgtgccaaatactgtgataagaattactgataaaagaataagtaatatgagcatcctgcctcagaagaattcaacatctagaaaagaaaaygaaattcaactttaaaacatcatgttgaacagcataaatatatacgatatttatcaattgaaagaagaaaactttaacccaacataacaagttatataattaaaatatgcataaacacttatgagagcacagaaaagggagtgacttattcagacggacgtaagagacagtgaaaagagcactagggataacaggctattcgggtaaacttgaaggggtaagtggaagcctaatttagaaggcagaactgaagtaggaaatttcaaactgagaataaatgtagaaagaccagaggtgctaagcagacactgtgttgaagaaatccactgtggtcttacatggtggatggtagcaacagaagaggctagaagggtagactagactcagatggtagaggtagaatccatgggctaaggtattaaggtagtttctttttatatatgctcagatcagtaattagccagactctaggaacttccttccttcctttcttccttccttcctttcttttcttttattctctccttccttccttccttccttccttccttccttccttccttccttccttctttctttctttctttctttctttctttctttctttcytctttctttcctttttttctttttctttttctttctctctctctctctctcatctctctgtttactctctcaacgaagctccaccttggcctccttaagctccaaaacctccgtaagctcaatcagtgacagtccttgtgctctggttagattccatatccctgaacttcaacctgaaaacttccatcagtaagtaagctggtgcaattctaggactcaccttttctgttttccttttctcagagatcatagttctttctgcatatcctgatgttcaacatatgaaaattgttattgttttaggtggaaaggtaaattcaagttctgttatcctatcttggctggaagcaatattactggtagtgaattcttatgggtctgcagcaacctcaattctctccttagaagaaagaattcaactgaggggcataaggtggaaggacagaccaaggcaagttttagagccacagtgaaagttttttaaaaagctttagccaggcgcagtggctcacgcctgtaatcccagcactttgtgaggcccaggtgggcagatcacaaggtcaagkgtttgagaccagcctgacaaacatggtgaaaccccatctctactaaaaatacaaaaattacttgggtgtggtgttgcgtgcctgtaatcccagctactcaggaatctgaggcaggaaaattgcttgaacctgggaggtggaggttgcagtgagccgagattgcaccactgcactccagtgtgggtgacagagcaagactgtgactcaaaaaaaaaaaaaaaaaaaaaaaaaaagctttagagcaagaaggaaaagaactaaagtgcacttggaaacttggaagagggcaaagtgggtgacctgagagaccaagtgagtagtttgaacttttgccttggggttttatatgttggcttatttctgggctcttgtgtccattctcccttgattcttcccttgtggtgggttgtccacatgtgcagtggyctgctagaacttgagaggtgagcatgtgcagtgtgtttactggaattgtatgcatgctcacttaaggtgttcttcccttaccaatcaaatatccctagaaggtcacataccaattaaacttcacctttttgtctctgaatgcacatgcttgagcccacttgcccagctcctgagatcttatcaggaagctgctgatcaccagttttaggttctctgtctactgagagactacctgataggtggcttgtgggagtgggaaggaccttcgggtctgcactaagcagacgtaatgaactaatggccctcctgaacaggaggtttgtgagagtgatagggctaaagcctaaaactgcaatgcctgggatttcctctgctttttcaactaaaaatggctctttcacaagaagctgcaccctgtatctcctgttttctctgtgtgatctgaaattgtcttgcacacctaccaaactgtctggcttgaagacaagtctgcctcttcttttacttcacatgccatgtgacttcttaaacacacacttcctgttattcatgcacccatggctcttattgcatttgtgcagcagcaaagataagagctcccttgcagacatcccccaaaatttataggtgtttttatcctacaagcttggatgacctccaatcctgtccctatctgttggtacattgccaaaaaagacactaattgaaaccccagctctgccagtgctttatgatttaacatatgctttttgttcctgtcacaacctagggccaagtttttctggggtttttgaaacagtttgtcctcctgcatagggctatgacactttaaggatctcacctacttgcttttttcttttttttttgagtcagcacttcttaaggggaggggaaattcttcctttaccattagcaagttcttgccctaagtcccaaggcctccagaggttcctcctttatgtcgagggcaaataaacattgctctctcaaatccaagcattgctgtttttgtaagcatatgaaggcttttcatgaggtttttctcgcttcctcctacttcctcctgtagtctccatttctctaatcactcctactcccttttcaatatgctgcaagaccttcaaggtcatatttaaagggagggaagtccagcccccttatggcagttattttctttgtaatacttggcctaagaatggaatgagagaaaattacaaaagtcaatcttggaacccagtacccttatgcaggaaattctcaaattagccttctcagtcttttataatgaagaacagaataaggaggacagggctaagaaaaagtagaaatgcagggaccagaggcaggtatattgtcttctcaatactcaagagtcacccttctacaggggacccctaggctgcccatcagtgagacatgacagaattgaaatcctccccctgtcccccttgaacctggctggctactactgccctgacagctagcaagaggccaratccacagaacaaccactactacccctctgtcagcaggaagcagttatagaagactgacctttgtctatattccccaaataattggggtcttgaactcatggtgggggaaatgttacacaaggtagatagtcaggcatgagtagggcaggagaaggctccatgccccacaycccacacccagatatgtcaggcaaccatcaggtgatggtccagtggttgttaactgtctctctaaaataataattggtcacagccagtgccagccaggttcagtctccgaatacaaaaaaaaaccaaacctgaaaatggtgatcagcagcttcctgacaagacctcaggagttgggcaagcaggcttaagcatgtgcattcagaggcaaaatgacagagtttaattatgatatgaacttctagggacrtttgactggtaagggagaatgccttaarttagcatgcatacaactctatgctcacactacacatgctcacctcccacatgctagcaggctgctgaacatgtggacagcccacccccatgggaagaatcaggggagaatggacacaagaccccaaaattatgcctacatataaaactyagtcaaaaggtccaactgcacacttgatctytcaggtcrcccacttggcccccttccaaatgcactttacttcttttccctcctgctctgatgtttttaacaaacatttactgctaccccaaaacttgccttggtctctccttctgccttctgcccctcagtcaaattctttctgttgaggaggcaagaattgaggatgctacagacctgtacagatgcaccaccagtaaaggcttttcactgatgttctaaaatcacaaggttacctagttatggaatcttgcatcagaccagttttaatgcaacactctctcatagccctaccttcacttagaagttactttgctctcttccaaacatcacagttccaaaatagaacacagtgacacaacatctttcttcatttttcaggtagttgtgatgttatgaagtgtttaggtaatcccaatttgatgcagctagtcaaatatgtaaaaatgctatttttgtattacttagtaatttctacaaaatgtaccacagatcctagtataaggcttaaagatggaattagcctcaaagtgtgaggcttggtgaragtacaagttttgaatatgatgcagtaataatttttgaaaggttaattgtttatatttagaccatgtcagaatgccctttattaaaatgcctatatcaaaacatcatgcaatatataggactttggctcaagtgggggaaagaagaaaaggaagaggaggaaaagaggagtggtggtagtaatcaaataaataacaaatgttcagtgcttaatataagacctacaatctactaagcacattgcaggtattcattcctttaatccttacaaaaattctgagtgatatagtgctattatcccaactacctttgaggaaaccaaggtacrgagagactaaataactttcccaaggttacacagctcgttctcagaggagtcaggagaatcactaatagcaactaaaattcaaaagatattatgtgtatttaaaaatgtactttttaaatctaaaatgaaattaatggctggaattcatcaaagggtaagaaaaaagagctaaaaaactcagagaaagctccttgtgttttctacgagtctcattttctcttggatttgctgaggactgcagttgaaaggcactaaaaaaaaaacctggtcattaataaagaacttgctactcttgtttcagaatctcctctagcttttctcaatcctgtatgttccttggttgtctttctaggctaaggtatcctccatgatgttaccattgcaaggtgcccagatgctgcagatgctggagaaatccttgaggaagagcctcccagcatccttaaaggtgataatggaaaattctgagaggagtaaagaagacaaacttgatgtgaaagaggagggaaagggactgatatttatgatgcacctattttgagccaggcactatttcatgttttctctcatttagtatgccttacctctctacaagatgtttactgtcatgtccatgttgctgttaagaaartgaagactcagttaactgattttctcaatatatcacaaatactgagttgcaatgctatgatatgaacatagttatgccttagtctaaacactgccttttgctctgtgctaactcaaaaaattacttccttgctcctttccaagaagcattttataataacatttgaaatttgcccagagttctacaaagttggctgaggctgcatattaatgtttaacttgtttattacaaaaggacacttgccagtgagaggttaactagaatgagtcttctttgaaattaataacagatcaatttctattttartgtaaatttcccaattgctctgaattgaaggcaggtcgagttactttagggctagctcccagtatctctcttaacctggtattaataattagaggtctaagaattaaataaaacaaatataaatatatatatataaatggatatatataaatgcctacatccagaactatgcaagagcagttccaatgatagagtcagattcttgtctgtatgtatatatttagcaaccaaatggatatggctcactccaatggaacccaagtacaattgttcatgtatatgtgtgtgtgtatctctttagtggacaattatttttacatttgtattgttttagaagacattcctatatagtgcatacatttcaggtaaatacattcaaattacccattccctaaatgatttgttattcccttctttcagtataaaggagaaaatattagcattcttttatttgtgattatatagttttattttcattcatcagagatgcattgagacaacaagctttattctttatttattaacaacacagtatagcttcaagtaaactaatccaaatctaaagttacccaccttgaagctcctactaacattaatcaaaattrcctaatatttaagtggcttcacatgacaatccttaagatataaataacctcccagagagacagaacattttttttggaaggcatattagttagacactgtatgtataattagttgaggtatttttatgattagtggctactcttaaaaattctctaggctaaacattttgttcaacactctgtgatgtagaattttgtgcttcaaatttctccttattccttgtgttaagtggatcctaaacattttgagaaaactctaggtgtttcccaaggattccttcttgggacccctctatggtgagataaggaggccctcatgactcctccctttcatgaggaaatagcattcctcctcttttgttgtatactaaaagacatacattttcccctaatggaactctaaaattttttatgccagttgcttttaatggaggtgtctaacctagaattcactgttactcaacaattacttgaggcctagttaagaaaatgtccatccattcttctgagtgttagatataaaatgcataaagatgtccactacaactgattcaactgataacagctgcctcrctatgttctgttcactagtgtgaaaggaaaatatcttgggcccccaaaatcactaaagaaaactcaagctggaaactgcttagggcaaacttgcctcccattctatttattcaaagttgctaagatagatgcatatctgattgcctctttggaaaggctaatcagaaactcaaaagaatgaattgtttgtctcacatatctgtgacctgaaagctttctccctgcttcaagtcttcctgccattgcttcaaaatgtcccttcttcaatatgtcccacctttccaaaccgaaccaaagtacttcttacatatattgatcgaggcctcatatctccctaaaatatataaaaccaagtgtgccctgaccaccttgggcacatggcatcagaacttcctgaggctgtgtcagtggcacatcctcaaccttggcaaagtgaactttctaaattaactgagacctgtctctgatttttggggtttagattttggtaaccatgggagcattctgagtggagatgcccctgacctttgacaaatctcctatcggtgcttggtaccagtatggctgactttatggctcaaactaataggacaatttgctgaggtctgtgagcatcccctccagagaatccctgatctccccaaatttggtcaaattattaagtttatttattcctaattagatggggaggaaggtctctttgaagaggaacctctactttactttttacacaactaaagttagcatttaacaactacctggtgttaatttctgcttacacttacggtgctcagaaatcatgtaatttgggtgatcattgttagttttgcttaacttttttgttctttgtatttttcttggacaaattgaaaggagaactctaaattatgaggaacaagacctctgatgtgggaggaaaatggctagcaaaagagaaaaaaaaaagattttgaattttaactactaaaggggctttatttacattataaggtcacctttttgccagccagaccaaactgaaagagcaatggctgtacttctgaaaaagcagcatttggtcctaactgaaatatggtaataagatttttttaaaaaaattaaggakctcaattgttaaaagtcagcttaattaaaaggctaacatccaagatgtatgtgtgtatgtgttcatgtgtgcatgtttgtatttgaaggccttcatgtttttatttttgtttctttttctctcctaagaccttgtctattttcgagcaaaagtttttttgttttgttttgttttccttctcagttgactgaattctgttttcacctgatttttttttaactaaaatagttattgcaacaaaggctacgtggttatttaagaaaaaaaatgaagtttaattttatttttaatttggctaaaagaaaaataaaaacatctccttctatcatcaccagactttttctctctgtaccttatgttgtaaattktactatttgattttcacctgagttgtttcctttaatgtgcaaatttaaggctatttttctgacagctgcctagggttttgaaacaggttaccaagaatctgaaattctaagatagaaaaaaaaagtggggtgatctttataaatctataaaatgtacttccgttggcatgcctaattcatctttatatgtatttatgtattgtatacaaaatatttcwctactaaaaatatataaagtgttctaattaattgacttaaagaaaaaacwaaagtgcttaaatgcgatactaaaaaagaaaagactattaaaatcctttttcaagtttatgtaacttaaataaaatctttaataaataagctagctttaaaatttttggtaaagtaatagtagaaatgtcttaagaattaccagcatacattttgtttgcatttattaatcaagcaaatttcatacttatccctgccaaatactataagttgtcaatgtttggcatacaggttacataactatgaacccagccccaaacaggataatcattgcttgtgtaatttttaataaataakgcattgatatgggtttaatgaaaatagctgcatctttaatttagtaagatcaccataacttctaatcctgtgggtttaggcagtctggtccacagtcaataaggaggtttgtttggggaaaagactgttatcctctttgtttcaaagctaaactataaaccaagttcctcccaaagttagttaggcctacgtccaggaatgaatgaggacagcttggacgttaaaagccagatggagtcagttaggtcaaatccgttttcactgtctcagttataatcttgcaatgtcagttttataactttaaatcatgaatatcacagttttcataaataatccaggtaaacaattaaaataattggggtaatgtaattggataaatatttgtaggcaaattggtcataatttagagtatgaaattatattaaattaaataatagacatttcattatttgggtatcttcccataaaaatatattgtaggaaaatattcttgctaaaaaataaacmaaactgtgtgtgtgttttttaaagaggtgaacaagtttttttccaattcaaagcttatttaaaggttatgtataaaacaaggtaaaagggactaggactaaaaaaagatatgaaaaagctatttttaacaaaggtttttttaggtaaaaaagcttaaagagaaataattttatataagacagaatcttgtgtggtaaatttaatcctaaactaaaataagtggttgtttaaaaaagagggatgttcaggacaaaccagaaattccaagcatgtcatgaacagtcrgtgtaagtcacaataagaggatttctatatttaaaaagtttatatgatcaagttatcatattaagttttcatttgcttagaaaaaaactgagataaaattttttaattaagattattacatccatgtatcttcctgtatatgcttttaaagtccttctaacattgaatcacagagctttaactcctgcatctataaagcataccaagtcctgctaaattttaaacactgacagcaattaaagcctcatcttcaggccctgtagaaaatgccaatcaaaataaactgccttcctgagacacagggcaataaattaaagctactcaactcctcaaggcccagggactatcatggaggagttgggcatgtaagagtgtaatgcctgattttgaaagataaaataagtttcatttctccgtaaattaatcattaatgtcaaaggaacactgatgaaaaaccagcatatagacccctgtgkcagattaacaaggctctcttgaagcattaaccaactctttaataaaggttataagaggcttaaggacgttacattttataatatagattaaattttatagattgtttacaaattttgaaaaacaaatgtaattagcttcatgctgtttttattggggcttcttgtttagaaaattaaatttcctttctcaaaaaatgaaggttttcactgttttttgaagtctttgactttcactttagttaaataaatgactttaaaatgacctataatcctattttgtaatttcaagtgttttaaacttacatttgacaactttccaaaattgaactataaattatgtctttttctgacctgattaattctttaagacagtaggttcccctaagtacaaaaatgacacaatttggcttatttggtataaaaattatacagaaggcattgccaaatatgaattggtgtttggttttctttgggctgtctttgtataaatatgttattggtatgtgttccaaaattatgggaaactcctgtaattataatataatttagtatacattatcaataataatcatattgtgtgccacagaggtaataaattttcttgtcaattgtatcttttgacaatggctgccttaaacctttttttaatccatggaaaattattgtcttgttttggtcatctttagaaggtggttttataatcagctataaaactccaacaggtgctcttaaatgtgggtttctgatactgtgtgccacagaagtaataaattttcttgtcaattgtgtcttttgactatggctgccttaaacctttttttcatccatggaaaattgttgccttgtgttggtcctctttagaaggtggttttataatcagctataaaactccaacaggtactcttaaatgcaggtttctgataactttggagattgtgacatcagaatagagaaaaaactttcaggactcatagagagataaaatgttaatgagtatcaagcaaaataggaattaactacatggactgaaccaatctttttcacattttacttaaaatgtttgctgatcctttgattttcagtcttaaaacttttcttttgagctattgacagcttttaacaatttagtatactcctatgaacaaactttggagcatgtttgtttctctctacctcacttctccagaatttggaaattgtgagtattcttaacttatggtaatacatttatttgcataagtgcaataagaatctgttttcatttgtaacaggaaacaattggagaaactggttattttactaaggctttaactgctttcctttaagaaatcaaacttgacttctggagccaataaagcccttgaaaaaaatgtccatatattttgtgtacacagtccctgtacaggatttctgactgtggtaaataaagaatgtcactttctaacagacacagaagccccagatttaacatggaacctcaagaggagaagaaattcatccaactcataggtatttgatggcacaaattcatggctaggttttgctataaaaagtcttatctgagactcctcctatggaacaaagtttcatcaaagccaatttaaaagcctatttaaaaaataattattcttgctgcactgtatacaaataattaggccaagtataataaagcaaaccagtcctaccataatttgtttttagtaaaaatgggaaactggagagagaaaaagactatatttcaagactatagtacacctgttgttagattctagtctcgcctaatgttatttttcaatttttattattttctacaatttgaactgaattctatttttcttggctacaagtcttcaaaataatgttttaaatttatttttcttctttttttttcatttttcctaatttgaaataactgaaaactaagctgtgctttcttaaaaccctgmaaactgaagccaaacaacttaaacttcagaaaaaaataacagcaacctgtttacatacataagccactttcatacctgcctattaatgtatggattttagaataatgtggcctatatctatttttccaggattgttcttttgtttgttgttgttttttctccctttcaccctattttctcttcataggacatgagacttcacaacatgctaaaaatgagattttgggacctacccatctagaaataaactgtcctagccgtaagacattaaatgaaacctgagaccagagactcattttattgttaaatgctttctccaaaagattttacaaaaaggatggggggcatataaaaggaaaatatcttgggcccccccaaatccctaaagaaaacccaacctggaaactgctttgggtaaacttgtctcccattctattcaaagttactaagaaagatgtatatctgattgcctcctttggaaaggctaatcagaaactcaaaataacacaaccatttgtgtctcacctatctgtgacctgaaagcttcttccccacttcaagtattcatgcccttgcttcaagaagtcccacttttccaaactgaaccagtgtacttcttacatatattgattgaggtatcatatctccctaaaatgtagaaaaccaagctgtgcccagccaccttgggcatgtgtcgtcaggacttcccaaggctgtttcacgggtgtgcactcaatcttggcaaaataaactttctaaattaactgagacctgtcttagattttctgggttcacactaggtttggggtccagtaggactaaaaaggattttaataaattaggccacaacartragaaaaaataagagtttcacatattttcatytttgcaatggataatattatagtgtaaatacattttaataggccccaggtacaaatgtgtaaaaatgtaaccactatattttgccaaaactgtactaaatttctatattaagcctccactcatggctgaaaacagaattaattcagataaactcagacttagtckatttagagtttttttcaccttcattccctagtctaacatcagtatttcatgtggggtagggggcagcaggagggaaatatactggtatggttctatcatctatccttgatggaaagcattcaagtgcacagcacctttttggtgtatttccatgctgatatcagctgaaacttcatgttcacaatggtcacgagatctatgctgacatccactactgcataccacaaccccaaaatcataaggacacttactgtctgtggggtttactctcactcattctcacctcctaccctctctttcacccctctctctcattagtttgtccaacagggcaagggtggggatctaagaatggacccaggctaggggaccccaagcttattctcttgagcaataggctatagtctctgctgactgataagaattcagttaagctctccagagagttatatggaaacaatgctaaagagttttaaacatgtatatagcctttaaaccagcaattactcttctggatattgtaagaaaatggtaggtacccatgcaaagattcctgtgaaagaacattctataaagaattatttatttgagtgaaaagttgaaaacagctgagatgtcatcaactggcaagtgattaactgtgatgcatccatgtaatgaaattttattcagccattaaaagtaattgaaaattattttgtatgcttgtgaatagagaaataggtacacaatatgttcaatgatgaaaaatagcaaatatcagtaattttattattgaacaaaaatctgtttaatctaaaggctctgatggacaagtggcctgattttaatacagtggttgtctgccctctgtgtacagattaaaaaatagcacacagagattctttgacttagattctccatttggctactttgtatcataaaatgtcatgattttataraaataatttttgtcctaatcaagcaagaaactttactgtttttttcaaataaaccaaccctgtcaatttcttgggatcctgcaggtttatggaactgtctttcacataaaccatggaaatccattcaatctgaaggctgtggtggacaagtggcctgattttaatacagtggttgtctgccctcaggagcaggtaagtttccatgtgtgaatattcttctatatttatattagctgtgtgcctattacattcttagcaatatggtagagccagggcatgcagaagtaaatcatagtaatagtcaacaagtccccatcctcaagaagctcggagtctgaaagacaagatagatcaaccaataaagtgtgaagtatacaagaacagaagataaacaggatacagaaagaggccaaataaaacttgattaaactatggaagtcaaaggtggggctacccgataagttcagtatacttcttggtggagatttcatctgaactggattttgtaggaaaaatatgcttttgtcaggattacaaggaaaagtggacattctaagcagagaaaatagcaagagcacagatataaagttgtaaaaaaaaggacaatgagttagagtgactattgttttagtccgttctcatgctactaataaagacatatgtgagacagggtaatttatcaaggaaagacgtttaattgactcatagttcagcatggctgggaaggcctcgggaaacttacagtcctgacagaaggggaagcaaacacgaccttcttcacatggtggcaggagaaagaatgacagtcaarcaaatggggaagccccttataaaaccatcagatctcatgaaaacttactatcacaaagacacggtgggggaaaccaccccaatgattcaattgtctccatctggtccctctcattacacgtggggattatgagaactataattcaaggtgagatttgggtggggacacagccaaaccatatcaactatgaaaagcaaaactataatgatagaacttctatacacatttgaggaaacacttaaaattattgaaactaaacaattaacacatttcaagataaaaatgcataagcttatttcaaaacatcagaaaacacaaatatacttttaatgctaataaagttatttaaaaatcactttgttgtgagaacacttaaaatctactctctyagcaattttcaagaatacaatacattgttattaactatagtcaccgagttgtacaatatgtctcttgaacttattcctcctattataactattataactgaagtttcatatcttttgactaacaactacccaattcctctactttcccccaccttacctgctgataactaccattctactctctacttctatgagttcaccatttttacattctacatacaaaggagatcatgaggtatctgcctgtgtttggcttatttcactaagtataatgtcctccaggttcaacataggggaagcaatatgtatgctaattaccctgatttagccatttcaaaatgtatacatatttcaacacaacatattgttaataaatatatgcaatcatttatttgccaatcaaaataaaamaataaacaatatatgaaatkaataaatttatggtatgaaaactaaactgaaataaaattatttgatcttttattaaatgtggtcttaagcaacaaaatgtgtcagtggtatcattgctgacttgtgagtgggttttttgtgcaacattttccaactttttaaaaagttttttaattytataatagttgtggtaatattttcatccaccttcttcctgtaaataattgtatctgtcatttactaatttgagaagctctttccgtgtaagtggattgtttgtttctctggaactgcaactggtttaaccaacatattttttaaagaaggcattttgaattagtttttaatcttctttggtatcaatatcaagtttcatactgccatggtcatagtttgtgtattctgcaagtctttgaactgtagtaaaatttattcttgtgacataagctttcccttgtcaattgcctttctcttcttcctgttgaggatgatggtggtaagaagaatgctttctaaatggttatgtcttttatttgaaattttaacgtgatatgtggataatgaatagtattgttctggaattttccaacataaattgaatatttgatctttatctcattatttaaakaatwcagaaataattatatgcatacaaacccacagttagataaaggaaataagttctaatgtttaacataggatgactatagttaacagcaatgtattgtatatttcaaagtagattgaaggaggacttgaaatgttctcaacacatggaaataataawtattctggatgatgaaaactatgacttgatcattaaacattctatgcacataacaaaatattacacattttttacaaatattatgtatcaataaaaaagaaataattgtgatacaccaataaaactaccaatattttattacttagaaatatcacagtataaaattatatgtaatcataaaatataaggatgtgttttatttcctttttcctaatrataacaggatatgacagatgaccttgatcactataccaatacttaccaaatctactccaaagatccccaaaactgtcaggaattccttggatcaccagaactcatcaactggaaacagcatttacagattcaaagtaagtaagaggaatgggatgtgtgctgactcacttatgtgtcctgagcaagttttcatatgacttatacctccttcntccaagctccagactcccagcctgctgtcaattttgttactgtgtggtaactatatctgtaaaaggtggtggacagcgtgggaaaccctaaaatttgcaaagaatgggcttcataaagggaactatagtataattccttggtaccaaggatttatgacatattttgcagctgtatccagaccttttagggtgattggatgctgaagaagagccttccctctggacttctattcctgtaataaaaatratagcttatttggccatagaatacttcccaggtcaccaagaacaactatcatggttccaactatgctctctggagattctctaggatggcatttgcctattacttgctgtataatcttagttaagtgatttaatctctctgagattatgttcctcatayataaaaatgaggaaaataatgttacctaaaacacaaggcactgaaaagattaaatgaaagtgactaggaagtgyttagcataatacttagacatattagttaatgtttgctgcatagcaaacctaataattctgtgaatcaaccatttgggctgagctttgcaaggcagttcttccactggtcttatctgggtttactcatgtagctgtagttgatgggtggaccatggctgattgctcttacacggcctcactcacatgcctgaatgagagttctgctgttagttcatgacagctggtgactgtggtgacagcatgatggcaacatgtgtcgctagcaggctggcccaggcctatcttaatggtattggtcttaacataattggtcttaaccaggagcaaaaacaaagggaaagccccaatggggcaggcacttttaagcctstccttgcattaaatttgctctttccattgatgaaagatggtcaatgtggccaaggtaagttgcagcagaggaggggactatctggggaatggattccaggagatatgtgcaaatcatgggtcattgcctcatattattacactaggaatgtagcttagtagatgttacctaccgttttttaaatttacctactaggattatcaaaattgctacacaattaygcagcccagaaaacttggttccagtgcagatactgctgttaataacacaatcataactgaatccatccctaagcatgtttttgcttaggtaaaacagaaaaaattacacaaatccttactgtttgaaatgcttcttccccagtgctgtaaagaaatagcacttgaacataaatttaatttcctcagtaaggccatttttactttctgcagaaagggtacactcaccagcaattttgccatgagaactgaacagaggagacagggttatgtataacctgacatgtccaccctactgttgtgtctggtttccattggctggaacagggcctcacattctgcatttgtcccaactggctagcaacttaaaaccttttaaaagagataaaggcagaggagaacaaaggaaggggcaagtaacttgtggaatgctgagaaaggtaaaacatctccaagtaaggaagaggaacaggctatggcctaatgcttgcttggrccagtataagtatgccagggtaaatatttaggctaaactgtgggagctaagaacacaaagtacattgatttctttattatcttctagcagttatctaagaatgctagcacaggtctttgaataaattttgcttctagaggaagttactattgattcttaattagatggggagggaagtctttttgaagaggaatcttcactttttaaattactattgacatgggtcacacagtggtagcaccaagcccagaaccaagattttatgatactaaatcccagacacttcttactccactgcagaacttcagtctagaatatacctaaaccatttcatctctgtttattataccgtctaggttcacagcctagcctgaatgaggctatacaaaatcttgcagccattaagtccttcaaagtcaaacaaacacaacgcattctctatatggcagctgaaacagccaaggaactgactcctttcctgctgaaatcaaagattttatctcccartggtggcaaacccaaggccatgtgagtttgataaaatccagtctrtaccactcacacytctcaagtaacctcccaacttctctccctgcattcactctggctttcctacaatcaatgttgtacaaagaaatcagaattacatttttaaaaaatgtaactcagaacatgtttctctcctgcttaaaagactccaccatctcccttctcatctagaataaaccaggcctctggctaccacttggacctttattgcccttcctgctttcttcctccaacagctctgaccttcactctgttcctctttcatcacaagctcatctatattccaggacttcacatttgttatttcttctgtctactctgtctctcaagacaatagaggtcacagcaaatacaaayctttatactaatggattwwgttttcttcttggaccctccatagcaaccaagagatgttwaaactctmatccatggatgttacccatgctcacttggtgaataaattctggcattttggtggtaatgagaggagccagagattcattgagcgctgcattcagacctttcccacctgctgtctcctggggcctgaggggacccctgtgtgctgggatctaatggaccagactggagagatgagaatggcaggcaccttgccggaataccggctccatggccttgtgacgtatgtcatctattcccacgcccagaaattgggcaaacttgggtttcctgtctattctcatgtagactacagcaatgaagctatgcaaaaaatgagttacacactgcaacatgttcccattcccagaagctggaaccagtggaactgtgtacctctgtgatgccaatcctgaacataagacagtgttgggcaggtctgggcgtataatttgaggagtggatggyggatgaaaagaaataataaattgtaatcagcagtaaaggagtgggcactgtttggactctggggaagcagtgtgatgttcaacagcatcgccatggtccctgcattcacaggtttctcagtgggaagcaggcccaggtcctcttacatttgacataagcaatttacctccccacatttccaggacctctatgacacttcatcagatacatattgctccaaattacttctcctggaatccctggttcctcagttgcaagacccttgccagtttttctgggagctaggaagaggtgaattaaattttctgagcactatgacttctttctttccctttctaaagcctttcccttatgatcaacaagtggactctcctcagcaggtctttagagattatcctctcctgttattgctactttataggtacattaaatatactggacacaaatatatatgggatattaggctaaatacagtatacatgatatagcagggaatgttactagaagaaatatcaactgatgatatcctatcctctccaagctcctattccaggaaaaaagatccaatgttttttctaaagatgagcttccaaaacccacaactcctaaataatacagaaagttttgtgtttgactgtatacaatttttattgtgtttgttcaagctaagtggttcatcatggtgacagcatgaaaggaatgagtgtatgaaaaggtgaaggtgggagcaccttgacccagggatgtgatggtttattgaggagagataggagttgaagggagaggagacagcatgaacacctgcttgtccaattagcctcagcacattactaatctcagtttgttcctgctgtaacaaaatacctgagactgggtaattcataaataacagtctgaacttatttgtttatttaaaataataataaaataattaaaaatttatttatcacagttctggaggctggaagtctaaaatcatggtgccagcagatttggtgtctgtgagaatccagtccctgcttccaaggtggtgcattattgctgtgttatttgtaggggatgaacactgtgtcctcacatggcagaaagacagaagagcaaaaaggagcccagctaatttcctccagtcctttttccttcaggcacaaatcccatccataagggtggacgttcttgtggcctaattatctcttaaagactatctcttaatactgttacattgaggattaagtttcaacatgaattttggaggaaacacaaacattccaattatagcattacttcagaatgcctgaactctattaaaagtttagataattgtctcaaacaagagtcagttgagggggaacaagagagataatctttcaggttgcaacaggttaggacagctttctattttttttttctttttttgagacagagtttcgtgctgtcacccagtctggagtgcagtggcatgattttggctcactgcagcttccacctctcaggttccagcgattctcctgtttcagcctccagggtagctgggattacaggcatgtgctattgtaccgagctattttttgtatttttagtagagatggggtttaaccatgttggccagtctggtctagaactcctgtgaaaggggaacaataaatgttaatcacctacagattgtgtttgctccaggctttcggcattgtgcttgtgctgaataaaagcaagcagctccagcttctcagggctgcattctggccacttgagccaggcagttacctagctgctcttacactgcatatctgtgtctgagtactcatttcatccatcagttgtctgtcccacagacccagcattgaatgtttaacctattcccagacatcttggaggctttgttcattgttaaaaattctttgttctttgcctttgacatattgggttattcgaaagccttgtcttcaagctctgaaattctttcttctgcttgttcaattctattgctgagattttccagtgcattttgcacttctctaagtgtgtccctgatttccagaagttgtgattgttttttatttatgctatctatttcactgaagaattttcctttcatattatgtatcgtgttttttatttctttctctggtgtctccttgattagcttaattattgacctctgaattctttttctggaaattcggggattttgcctttgtttggatccattgctggtgagctggtgtaatcttttgggggtgttaaagaaccctgttttgtcatattaccagaattgtttttctggttccttctcatttgggtagactatgtcagagggaagatctgggattcaagagctgctgttcatattctttcgtcccatggggtgctcctttgatgtagcattctcccccttcccctgggaatggggtttcctgagagccaaactgtagtgattgtttttgctcttctgagtctagccacccagtggagctaccaggctccagcctggtactgaggagtgtctgcaaagagtcctctggtgtgaactgtcttccagtcttgcagctatagataccagcacctgcttcagtggaggtagcagggtagtgaagtggactctgtgagggtccttggttgtttttgtttagtgcactcattttgtgttggttggcctccagccaggaggtggcactttcaagagcacattagctgcagttctatagggaggatgcaaacttgccctagggacacctggttaagtattcaggtttctcaggtggtggtcaaggccatagagctctcaagagattatgagagctctcataatcttgtctttggctaccagtgtggttagagaaagaccaccaggtggaggcagggataggcatgtctgagctcagcctccccttgggcagggcttgctgtaactgctactagggatgaaggtgtagttctcagtccaatggagttatattaccaagaggattatggctgcctctgttgaatcatacaggtcaccagggaagaagccagcagtcataggcctcaccccactctctgcaacccacagtcccaaaggctggtctcactcccaccatgccccccaacagcaccgagtctatttccaggtagccagttaccaggactcagarcttgccccagaccacaagcctccccattgagaaagcaaacagactcactgtttttcagtgtctcagggagcctgcagaggtaatccagtttcttcaaatggtctgtggattctctcagctttcctggtatgtacccacggtagttcttggagcagaatttcaggatgtgagtcttcatacacggctctgtccatccgagtgggagctgcaagctagtcctgccccctatctgccatcttaatctcaattcctaggttgttaatttgagatcttgctaactttttgctgtaggcagtcagtgctataaactttcctcttaacactgctttggctgtatcccagaggttttggtatgttttgtctctattttcattagtttcaaagaatattttgatttctgccttaattttattgtttatccaaaattctttaggaacaacttctttcatttctgtgtatttgtgtggtttgagaattcctcttggtattgatttgtatttatattccagtgtggtccaagaagatgcttggtatgactttcagtttttttaaattcactttatgactaaacatgtggtcaatcttagagtacattccatgtgcagataaaaataatgtatattctgtggttgttgggtggagtattctgtagctgtgtattaggtccatttggtcaagtgttcaatttaagtccagaatttgttagttttctgcctcgatggtctgtctaatgctgtcagtggggtattgaagtcccctcactattattgtatggttttctcacttttttgtaggcctaatggtatttgttttataaaactggatgcactggtgttgggtgcatatatatatatatacacatatttacatatgtatatatttaatttttatcttaagttcaggggtacatgtgcaggatgttgttaaatcttgctgaagtgaaccttttatcattatgtcctttttaattattatcatccatttttattgttattggtttaaattctctttatatgttacaagaatagtgaccccagctcttttgtgttttccatttgtgtaacagatcattctccatccctatactttgagcccatgggtgtcattacatatgagatgagtttcttgaaacaggagaatgttgggtcttgttttttatccaacttgccattctgtatctcttaagtgagtgtttaggctgtttatgttcaagattaatattgatatgttaggtttttttcttgccgtgtggttattaggtatctgtgttgcatttcttgattgcatagttgctttattgagtttgtaagttttgtacttatgtgtgctttcctggtagcaagtattgttcattcatttccatgtttacaactcctttgagcatttctttgtatgtccagtctgatagtgacaaattcccttaacatttgctggtcttggaatagctttatttctctttcctttatgaggcttggtttggtggaaaatgaaaatgaaattcttatctggcatgtttttttctttaagaagactaaaaataggctcccaatctcttctggctctattgaccttggatagctttatgactatattccttggggatgattgtcttgtatagtatcttacaggagttctctgcacttcttgtatctgcatatagacctgtccagcaagattggggaaattttcctgaattaaaccctcatatatgttttccaggttgcttgttttcttctcttaggaatgtcagtaagtcataggtttggtcactttacataatatcatagatcttgaaggctttttcatttttattttttattttttgtctgactggattacttgagaacccttgtcttcaagctctgaaattctttcttctgcttggtctacattatggttaaagtatacaactgtatttggaaatttctgtagtaaatttttctattccagaagttctgtgtggttctttcctaatatatagctatgttgtctttcatgctctgaatctttcttctgtcttctctgtatttgatttcaactttctctggcagattgttgagtttccttgccatccatattctgagttctatatctgtcatctcagccatttcaatctggttaggatccagtgctaggaagtgagtgcagtccattggaggtgatggaacactcttgtctcctgtaccgctggggttcttatgctgccttcctaaccaaggaagctgatgcttcttttattgaatttgcttcatttggatggggatttttttttattttttcccttgaggatatgactctggtgtgtgttgtatataatcaattggctttgtttctgggggctttcagagggccaatattctgtacatgttcctcagtggcaaataaattcatgaggtgactatcacagatgttgtttgtaatagcaattttttttgtttgtttatgcaattcaggctacactctttaatagtaagagccagcaggtagcctggtgcccagtgtatgcaccagcactgctgagggtagcaggaagaaattgtgatgggcaagtgctgaagtctcaggggaaggggaagggagtggtcaccctctccttatcctaagccatcaggattgtgctccatttccttattacacccctgtcttgggtctcatgaccttctgtttataaaggtcatgagacttttgtaagtctcatgtgtagccgttggtcatagatctgtctctccgatggctaccactaggatgggggctggggcagagcttcttcccacagtccaggtgaggcaactccatagacttccctccattgccagcgtgctgctgctctgtacagggagaggaagctggatcctacccttcaagaatgcttgagtaggcacaggctcactttcagtgggagtagatctgccagaaaatggtgttcttcct

SEQ ID NO: 95800 - DNA, 33701 bp, Homo sapiens
  misc_feature (1)...(33701): n = A,T,C or G
tcctcactgggtcctggctctccagggtggcattcctctgctggctgctggccaatgtgatgctctccatgcctgtgctggtatatggtggctacatgctattggccacgggcatcttccagctgttggctctgctcttcttctccatggccacatcactcacctcaccctgtcccctgcacctgggcgcttctgtgctgcatactcaccatgggcctgccttctggatcacattgaccacaggtaagacccagccctaaagacaagcactagaagtctcaaggccagggagggagggcctgggggcatcatgtcggtagagttgagggtctgttcctggaggccaggatggctttgccctctttaaagtcccaccctcttgtatctcttatctcctgattttctctccccagtgccacttcccccccctcctcagagatgcccactcccttgtatcttctctgtctctgtcatcccctaactctcttcacccagctgcttctaaaatcttccaaccccctgtcccctcttgcttcctccaaatacccttctctgggtccccattcttaaacccttccctgtcctgccttacacatccctaaattgtcctgcagtcttattctcctctcctgtcccgctgtctactccctcatgtgcctcctcatgcctcctctgtgccctgcccttccccagggtttttttcttttctctccctattttcagagttctccctctccccctttctctctctctctctcccgggatataacagaaggagcactgggcttggagtctggaaacttaggacaacagagccacaccagccacatgcccctcagccagtcacctctctgagcccaagttgccctgaagcaggggctctaggcttcccttagagttgttctgacactcccaggggaagatatcctcggcaggtgttactagcactaaggtgggacaattgttgccctcatctccaggactgctgtgtgtgctgctgggcctggctatggcggtggcccacaggatgcagcctcacaggctgaaggctttcttcaaccagagtgtggatgaagaccccatgctggagtggagtcctgaggaaggtggactcctgagcccccgctaccggtccatggctgacagtcccaagtcccaggacattcccctgtcagaggcttcctccaccaaggcatactgtaaggaggcacaccccaaagatcctgattgtgctttataacattcctccccgtggaggccacctggacttccagtctggctccaaacctcattggcgccccataaaaccagcagaactgccctcagggtggctgttaccagacacccagcaccaatctacagacggagtagaaaaaggaggctctatatactgatgttaaaaaacaaaacaaaacaaaaagccctaagggactgaagagatgctgggcctgtccataaagcctgttgccatgataaggccaagcaggggctagcttatctgcacagcaacccagcctttccgtgctgccttgcctcttcaagatgctattcactgaaacctaacttcacccccataacaccagcagggtgggggttacatatgattctcctatggtttcctctcatccctcggcacctcttgttttcctttttcctgggttccttttgttcttcctttacttctccagcttgtgtggccttttggtacaatgaaagacagcactggaaaggaggggaaaccaaacttctcatcctaggtctaacattaaccaactatgccacattctctttgagcttcagttcccaaatttgctacataagattgcaagacttgccaagaatcttgggatttatctttctatgccttgctgacacctaccttggccctcaaacaccacctcacaagaagccaggtgggaagttagggaatcaactccaaaacgctattccttcccaccccactcagctgggctagctgagtggcatccaggacgggggagtgggtgacctgcctcatcactgccacctaacgtccccctggggtggttcagaaagatgctagctctggtagggtccctccggcctcactagagggcgcccctattactctggagtcgacgcagagaatcaggtttcacagcactgcggagagtgtactaggctgtctccagcccagcgaagctcatgaggacgtgcgaccccggcgcggagaagccatgaaaattaatgggaaaaacagtttttaaaaaacaaaagaaaaaaaggtttatttacagatcgccccaggagactttccctggtgcctgcggatgtccgaggcctcgcgccagcagcgctcagtgcccttcctggagctctcctggcccaggcctggcgggcactgcttcccggcctgcgatgtcccaaggcggggaaggagtccagattgggtccccctcacaggttagtggtgatacattttaagtctgggagagcggcctgcttgtgcagtgggtcgccgaggataagaggtgagccccctctctcctggctgcagtccttggcgctttggtccagaagggtgcgaagagcgctgggccgaacatactggagactcaccacggcccctccgaggaagaggcacaggacgcctgtggcggtggggatcgaaagaaaggagggcatgtggagtcagggctatgttgcccaggctggtctcgaactctggcctcaaacgaccttcctgcctcgacctcccaaagtgctgggattacaggcgtgatgcccgggccttcttccatcttttggagcctaccccttgtgttacctcccgccacacacctctaatctgaattacatgaaacacggcaagacaccaaacccttctgagccccccacttttcatctgtaaaatggtcataacagtgcctgtttctgcgaactattgagaggggcaaatagggtaatagatgtgaattcattctgtaaactggaaagtgcacacccggtgtgaatcctgtctccacccttagcccccggggcccattctctcggtcctcaccggttgccagcgtgacccagaaggcggcgccgtactgagtggtgagcgcggaggagcctakgcggagcgggcagagcggcacgctagagatggaggccaaggcgaagaccccgaagagcgcgaaggctccggtggtcagcagtgccaggcctccgtagagcggggccggcgtggagagcagcacgttggagaggagccagaagcagaacgccaccctgccggggagtgggggracccgctgtgagcgggcttctcccagcccaccggggttcccacagctgcgctcttctttatccctaccccagcgycaaagccagggactgggatggcagcggtgcaggggaattccccgggggagaagcgggctcctgaggtccaggcggtggctggagtctctccggattccgtctgtgcagatctcgtggatcttctaacccgcgaggctgtcatgcccaccccgagcgcgtcgggtctggctgcagctgctcagtgcctccgaggcctgcatcctcccgctcatacggcccagctcctggcacacacacacgtgcacacagccttccctccagcrcttaccatagcgtggccgaggcgtagtgtcccgccaggtgrtactggtggtacaggccgcaagggctactcggtgtgaacttctccgccaggtagagcactgggtccggcagccccttctccagtgcgttcgcgtactccgcggcgtaattctctttcagacgccaggtgaactgctcgttgtagtcaatggtctcgttcagctgatgcactggggtccctgyggggtgaggcrggctcatcgggctgcccgcggtcggagacctcgcaactaagcggattcagacaggaaagtgggggtgtggcgctctcggcgggagaaatgggttcggtggtggttggagaaaacgcaaatccacgaggaccacaagctatttgagcttgtgggatgtgagaggccctccagctatccctgacacactcacctaaccggggatctcccagctccaggagttcatttagccccagccccctcacctgtgagtgtaatattaatgccctccaggcccacgagcagacsgacacgggctgtaacgcgcgctgcgctgaaggctttgtaggatgtgttggtgttcactgtacccacgaaccattctgcactgaagtgcacagctgtagggaaaggcacacggtgggggtgggatgagggtgggaaaatggaattagagagtggtatgggaggtgggacactgcagagagatggggacttagaggtccaatgtggttgcatggtaagggccaaaaagtgggccctagaaggagctggagagtgggaagagggagcagaaaaccaaccccagttccctattgtcccaggtgccctctgcccacctccttcctcaccccgtcctctccccatgggctgcaccacacactcacccacaatttctgcgcctatgaacagactgagaagaactctcaccaaccaaaaccagcgctgcaggaataggcacccgggtcaggcctgagccctgccaaaccagagtccccaagaccacccttgaccccacttcacctggatctttagttatatccagacttttgagactaatgttaggcacgcttttcctgcaagtccctctgggctactggcatttctgatattttgtgaccacgcactttcacctccctagccccatttcccatctaccctaacagcacctcccctccacccccacttcctggcactcttccaccaccttcactcccctagctgtctggcgcctggtcctggttctgcctcctggtccagtcactgcttggtgaggctcagtgagtccagaagtgctaggcacgcaggggtcacctccctcagaagagggaggccccagcctgatctccgaggggaggaggtgggaatgcagatactcctaggtgcaccagttccagggaaagcaacacagattaagatgcagaaaagctgggtcctcccagaactgaaaaatgcacaacctaggttctgggagagggggaaagtctaagacaatgcacccagttggctccaacttctaatccaatgtgggagtctcagtcctgaggatgaggcacccatacacatgtgtctcaacccagtgcaaaggggaacactgcagtctgagctgctggcatctgtccttttggcctgaaggtcatcacccaccggatgggatgagagtgcagctttagtcctgggagaggtgggaggccctccagcacaagaagcctagactgttcctcaggattactggactgggtgcccattctctgcagcagccttcccaaggacccagctggggtccttctccaggatatcctggatggggagctctccctatccttggaaaggggtgcttgctgcaccagactcctgacttcactccacctgagcctcaattcgactattcatggaggctcttgtacagtcttacctgtcctgggtccctcaggagacaatctgcccatgagccttcccccactctacctgcactatgaggacacccttaccgagtggccacggatccccggcaagatgagcaggaagcttgctgctagagccaaaaacactagaataacgatgagcagtggaacgctgaagcctgcrgcatgccggggctgggggtaaaaaggcagtacgccgttccacagggtcatgctgcacgccggccgagtgctgcacgcaggcgggcaggcaagccagcaagctggggctgcctggacgcgggagagcgcgtccttgrcgtctctttgcgtacaaggctgggaccgagtgggctggtgaagtctgagtcctgcacctctccgttaaggaagcgtggaggtgggctgctctcaacgctctggggttggtaccgacagagtttttctagccggcgagcgaaactatttctcactgtctgtagccgttactttcctggttctgcgggttggcgctgagtttggaagtcgcgcgggaccccttttatagcagcgtgggcgacgtgccacacgggtgtcccagcccaggggctggtctgagctggaagaggttrtgcaaataagggccccacctccacggcaggagggtgrgccctaggtccagatgctcacactggcgcaggtctgtcctgagccgacacctgcacagtggcgagaccaaggacccagagagaaaggtgagagtgcagccggggaggctgaggatcggcggagctggaagagtgagggtgaaggcaagaagtagagcacagaagcaaagattttaagaggaaagaagacatctgaacccaacaccaccctaaaccacaggttagaccagagtttgggatctgaccctagccctcgcccatcatgcacaggcgttcattgcagaaggggagtttattggggaaggggggattcattgtggaagggtgctgcagtccctcactcccaggtcagtaacctttttcccttccctgcctcctggaggagaagcggagcctgacggatngggggcgggtggaggtgaaacattggagacattgggcacaccctgggaggcttgaccagtcctgccctggactgacatgccccagaagactcctgcccagtgggttcctatggtcgggggttaactctctgatggggtggcggatggggaacagtgtcaatgcctccagagctgccaattgtcctggaaagagtggcgtttggatgaaggtcctcggtgatgcttctaacagctaccttccagaagtggaaacagctggtgctcctcctccagtactagctgtaggaacaagaggggaggcatagaggacgccctaacagtggctttcgcataccacctaccacccccaccctcaccccgcaggctgcagggttggcatgctccgtgcaagaccagaggcactgatgctcctgggagctcttctgactggatccctgggtccatcgggcaagtatcaggctcctctagcggcggggtgttccccaggatccctgggaggtggggcggggagaggtgcggcaagmggctccctgagactggaaggtcatttcgccgtgcagctcagcgggatgggaaacttcccagtgcggcccgacacttgggtccggttaggggcgctccgcgagctggggaaggactggccaaggccttcgttgctcgggaggggtagctgggagcgtagtgctgaggaggcccttctctgtgcccacaggcagtcaggacgcactctcactgccctgggaagtgcagcgctatgacggctggtttaacaacctgaggcaccacgagcgtggtgctgttggtgcgttctgggggcccgggcgtgctggggccgtggctcgcgaagggccggggcgcgaaaggccctgagcggggaatctgcggggaacacgcgcccagcagctccgctgcctacacagcgcaatcttatgcgctcccggggccaagagacccttgagggaaggttctgtcagtgaagtgggatgggggttgagggaggcttagggmgaggtttgggggatcctaggggatggagtgcttagacagagccccgctccctgcctccgcaggctgccggttgcagcgccgcgtaccagccaattacgccgacggtgtgtatcaggctctggaggagccgcagctgcccaacccgcgccggctcagcaacgcagccacgcggggcatagccggcctgccgtcgctccacaaccgcaccgtactgggggtcttctttggtgagggcaaagggggagaccagtggggttgatctggcgctctgctcagcctgggggargggccagatcccgtctgcgagtccacaggagacccatccgactcccaaccacttcctctctacgcagcacttcgagactgccttcatctcggagagattttgggatgttgatacagagatatttgctctgtatctaacctttctcttacgccttattccaacctaggggtgtcactggacccccattatagctcttgggaactgagctccccagccaccgctctcctcaccgtgtgtttgtaaccattttacctccccctagcccagagggaggaggactgacttggggtacccctacataaattatatcattttgattctcacaacagctttatgaattgagtaggaagggaactcactatagtcttactttgcagattagaaaattgaggctacctggggctaacgtgcagagctggtggcggagctggcactgggacctctgtcttttggctcctgaggacacttggaggccgccctggccgtggggagggcgcaatacggacggtttgtcacgtattggcgccccatgcccgcaggctaccatgttctttccgacgtggtgagcgtggaaacgcccggttgccccgccgagttcctcaacatccgcatcccacctggagaccycgtgttcgaccccgaccagcgcggggacgtggtgctgcccttccagaggagccgctgggaccccgagaccggacggagtcccagcaacccccgggacctggtgaggcggggaaggcggcgggaagggaccgcaccccagccaggtggggcctgggcttcgggcctggcagggcctggaggggagaggcgcccactccccagccgcggacacccgccgggccccggccttccctrgcycgccgccgccymtcgacccgggctcacccgccgcgtgccccgcaggccaaccaggtgacgggctggctggacggcagcgccatctatggytcctcgcaytcctggagcgacgcgctgcggagcttctcsrggggacagctggcgtcggggcccgaccccgctttyccccgagactcgcagaaccccctgctcatgtgggcggcgcccgaccccgccaccgggcagaacgggccccgggggctgtacggtgaggccacaggggcgggacggggccggctgggggtctgcgagtgtgggctcccccgatcacgctaccgctcgtctcctcccctgcgcccccacgtcggatgcagccttcggggcagagagagggaaccgggaacccttcctgcaggcgctgggcctgctctggttccgctaccacaacctgtgggcgcagaggctggcccgccagcacccagactgggaggacgaggagctgttccagcacgcacgcaagagggtcatcgccacctaccaggtcagccgtccgcgccccgcgacgtcctcccttccgcgtgcaagcccacgggagactccgctgccccatggagctccccatctgtggacaaccgccacccagaaacccctccccagacagccgaggtcyagggaagcccctgtaaatgatagggaggcacgcgctgtttataggagaaatctggctggtgatgattatttatcacctccccamcccccactccctcaaatcccctggttccttrtggggacaggcctcacactgctcctgtytgagttgcttctcccatgaytgaccctkcctggtctcatctccacacggaagccgtccttgggctcagacccttccaggccccacmccatccaactygtgcctcccctcgcccctctctgcccctcagaacatcgctgtgtatgagtggctgcccagcttcctgcagaaaacactcccggagtatacaggtgagggagcggggaaggaggacacctgtgcggagaatcctgaggggaaggagacaggtgcctgtgatgggaggatgtggaggcaagaagcctgtctccccatcatcaccgtctccttcctgcaggataccgtcctttcctagaccccagcatctccccggaatttgtggtggcctctgagcagttcttctctaccatggtgccccctggtgtctacatgaggtgagggaggggttggcagagaggggcaccacactaagaaaggtgcagaatgagctgccttgggggctggggcctttcacactccttcgcagtttcactagagaaggggaagcaaaaatttggggccctgaaacagaaccctggggtaagatgtgtaggcttagtagggaaatctctccagctctcctaagggctgaaatttggtggctgggtgtaggatttgtctagcagctgggtcattcccttccctcctctccccaccctacctggactaggagcgcactctatcttcagtaaacgcacatcaccaaatctctgccgtgttcaaggaagttcctgggccactgctcaatcctagtgaacccccactgagtccctcagcccactcaaccccatctttgattcttctccaaattccctcaccacatcctttgttctcaatttcagaaatgccagctgtcatttccggaaggtcctgaacaagggttttcaaagctcccaagctctcagggtctgcaacaactactggattcgggaggtcagactggggtcagggtcaggggaagatgggtcaaggtsagtctcttcacacaggctgggaaaagcaacaatcccagttcttgagtgttgctgccccaggttcatgggagatgaagggtagaggaaattatccggggacaacagttcaagagagtctgggactggccaagggccctttgtcctggggtactaaagtggtccaggctgagagagaccgagttttgggtagaggcctatcttgagtgcattgtttacttccagaaccccaatctgaacagtacccaggaggtgaatgagctgctgctgggaatggcctcccagatttcggagttggaggacaacatagtggttgaagatctgaggggtgagctcagagccagaaggggtggatggtaagggaccaggaagcctgaggatccctctgggttcatcartagcagacctagggcrctcacgatgcaggaacacagatacaaacacagacttcaaggagccataagaagaaaatgaactttgaactttttttttttttttgcttaatttacacttttgtgttgcttttattttaaattaactatgtctgagtattggggaggggtggtaccacaatctctttggtgcttaattaggtctctaaaggttttcattcagccctgtcttgaaactagggaggcataggacagggaatttactgcttggtgactagaacagtcttgagtcttagaggaagggtcttactggaaaaactggctctgatcacccatggtgacattggccttgcagcaaggcaaggtcagcatgggcacagatctcatgtggatcactgggggtagccaggagggaagaaccgtagtgccaatagtcagatacaaggctgcagggcaaaaaaggatggagaggacaaagcccatagtctagtcttctctcctcttcagattactggcctggccctggcaaattctcccgtacagactatgtggccagcagcatccaacgtggcygagatatggggctgcccagctatagccaggccctgctggcctttgggctggacatcccaaggaactggagtgatctcaaccctaatgtggacccccaggtcaggaatagtaatgataataatggcagctaaagctttcctatggcaatactgttccaaaccctttacatatgttgactcatttaatctacataataatattgtaaggtatgtataatcattttccccattttactgatgacatagttggtaaatcatagaggagggacttaaattcagccatctgattccagaatatattcctaaccactgcattgtaccattcctgcagggtggcttctgggttgggtgccattgtcctgttgctgcagggtcccaccccaagggctgtgtgcccctgaagctgctaatcattgaggtcaggcaggctggtgatggtcacaggatatggtcctagggcacctgaccgtggtsttaccrtgggtagggacacactgatccttccaccagacttgycctgcctgagggggcttgcctaagaagaggaaatcaggcctgagcagcagccaggcagcggctgaggttctgtgcccgagggatggggcaacagtggctgccctccgcagcaaacatacrctcaccccttatctcctgtggtgccccaggtgctggaggccacagctgccctgtacaaccaggacctatcccagctagagctgctccttggsgggctcctggagagccatggggaccctggacccctgttcagtgccattgtcctcgaccagtttgtacggctgcgggatggtgaccgctactggtttgagaacaccaggaatgggtaaggcttgcstgggcccccacctcagactgctcctcagcctgagccccagaccctctgtctagccttagacagcccctrtgagcccttgattcccagtcagcccaccacacccttcccaacccctctgggtctctctttttttcttctcttctcttttctttttctttttctttttctttttttttttttttttttttttgaggcagagtctagctttgtcacccaggctggagtgcagtggcgtgatcttggctcratgcaccctctacctcccaggttcaagtgattctcctgcatcagcctcccaagtagctgggattacaggcatgcaccaacatgcccggctaatttttttaaaaaatatttttagtagagatggggtttcactatgctggtcaggctggtctcgaactcctgacctcaagtgatccactcgccttggcctcccaaagtgttgggattacaggcatgagccactgcacccagcccctctgggtctcttttctcacctgggtccttgggcctggggttgctggaggcctgcatccccttcccatcccagtgacttctacttcctccaacttaggctgttctccaagaaggagattgaagacatccgaaataccaccctgcgggacgtgctggtcgctgttatcaacattgaccccagtgccctgcagcccaatgtctttgtctggcataaaggtgagtgccrtgggagaacacaagtgagtgacagtggccagagaaggatcaagattgagggtgcgggggaatcacytggtgctgtccagggagccaggcaccttctgtgttgggctaggaggcctgcatttggctggctcccacagcagggacctcaactagcacacaagctacaccctacagtcaagaaggggtggrtggggtagatgccaagagacaggaaatgaatggggactttttgagggagacagtttcagggagrtgggcctggggaagacagatgataccttggtcctttataggatagaggggaaagaggtctggccacatagcgggatcctcagactttgaggtcttccctgccctctccctcaggtgcaccctgccctcaacctaagcagctcacaactgacggcctgccccagtgtgcacccctgactgtgcttgacttctttgaaggcagcagccctggttttgccatcaccatcattgctctctgctgccttcccttaggtgagctcttaggcagcctctctgcagactggccctgcccctcatttcctgctggcctgaggggntggctatttggtaccgtttgagaccaggctcaaggaacctctggaagggaggggccatagcctaagccacagtggagctctaggtgaggggctccctcctcactgttccttctgatccacttcagtgagtctgcttctctctggagtggtggcctatttccggggccgagaacacaagaagctacaaaagaaactcaaagagagcgtgaagaaggaagcagccaaagatggagtgccaggtgagcaggggctgggcagaggagggaggagggacggaggaggggagagacaggagtctgggagaaagaaccaagttacagagtgagaggaaagccaaggcacctttagggcgcctgctcagactcacagaggaattgacctgaaggcggggacctggggacatctgctgaactacccggcccaattatcccttccccagcgatggagtggccaggccccaaggagaggagcagtcccatcatcatccagctgctgtcagacaggtgtctgcaggtcctgaacaggcatctcactgtgctccgtgtggtcyagctgcagcctctgcagcaggtcaacctcatcctgtccaacaacygaggatgccgcaccctgctgctcaagatccctaaggagtatgacctggtatggctcgtcctgcctccccagcctgggctgccctcacacgactccattatcacaagcgaggccaccctatcctcagctacagagctcaactatgacagctgatgctggggagaggggctcctttcagaggcccccagacacaacctgacccccttcgtccacacacctggccccagcctggatggatggggaggagttttctctcctcccctcaacccaagatccattgaggggaggctgaagcagaaggtccagcgagctccctgcgtcagtgccgccttcctcccacccaggtgctgctgtttagttctgaagaggaacggggcgcctttgtgcagcagctatgggacttctgcgtgcgctgggctctgggcctccatgtggctgagatgagcgagaaggagctatttaggaaggctgtgacaaagcagcagcgggaacgcatcctggagatcttcttcagacacctttttgctcaggtgccatgayctgtgccttttggagatgggtccagccccagaaatggaggaaacctgggctgcatagaacgcccctgtgggtgaactaagcttccgctctatggcctggagagaaatagccttgtttgaatcctggcattgccactttacttagctctgtgaccttaggcaagtcacattatcactgttctgtatctctgtttcctcatctataaaacagtgatgaaaactgtatccatcccattgcattgttgtgaggattcggtgagatcgtstacatgagtggtacacagaggttggcctctggacccgagagcatcagcctcacctgggaacatgttagaaatgcacctacccagttagactgaaccaggaactctgtgggtggggcctggcaatctgtgttttaacaagctccccagatgattcagatacactctaatgtttgaaaaacattgttttatgtacagtgcttattggcccaagtgccaggtatgttgcaggcatttaacaaacggttgtggccaggcgcagtggctcatgcctataatcccagcactttgggaggctgaggcgggcagatcacctaaggtcaggagttcgagactagcatggccaacatggtgaaaccccatctctactaaaaatacaaaaattagctggacgtggtggctcacacctgtaatcccagctacttgggaggctgaggcaggagaatcgcttgaacccgggtggcggaggttgcagtgagccaagatcatgccactgcactccagcctgggtgacagagcaagactccatctcaaaaaaacaaacaaaaaacaataaatggttgttacatgcgacttttaaactttttgtgcaatgggcaaatcataggcacatggcagccttatctgaattggcaagagagcacagccccagccccttcctgcctgtctaccaccatgtctctacatcttctgtccccagtataggctctctcactttccattccccttaacttcgcccttccccttccctaccccagcaccatgcccactgcatgaagttcccggttcttgggcccagggagaaatgggcaggctgctagagatttgattcccccgtctataggacaacagaggccccagtcagtatatctaaggatcaggagaaccatcagagtttagcctttctgatttggactttggggagatatgaagggtcactgaactgcttccagcatrggcttcacctccttctctttccctccctctgctgctgcccgagtgcaggtgctggacatcaaccaggccgacgcagggaccctgcccctggactcctcccagaaggtrcgggaggccctgacctgcgagctgagcarggccgagtttgccgagtccctgggcctcaagccccaggacatgtttgtggagtccatgttctctctggctgacaaggatggcaatggctacctgtccttccgagagttcctggacatcctggtggtcttcatgaaaggtagggggctgggaggtggcaggctatccaagaatccaggggtctttcrgcaaggagatgacctgcattcccttttttcttcccaggctccccagaggataagtcccgtctaatgtttaccatgtatgacctggatgagaatggcttcctctccaaggacgaattcttcaccatgatgcggtatggggtgtgcctttctaatcctgagacttcctggtgtgtttcaaacaggaaaacaggtccagtcagaggagggctggcaaagaggctctgtggtcatctgtgctgagaggtggcctaaacactacatcctaaactctcagagcatccaccttcaaatatttacctgactggctcctgcctctgggagagtctctgtctggactgtcaacaccagccagaaaagcctccctagttaaaaaacgaaaaaaaaaaacccaacaccaatatggccaacgacaaaaatccactaatcccttttggatgcccttggatctttgtgaactattttacggcacgcccaacaccgtgctctacccagtgaaacagtgaatggatgaccttggttgctgctccgmtattcatcaccatgatagtcaggaagagaaacgtggaaggcttctccatattccaaccattctttcttcctgcatcttaagccctttctggttttgttgtgccggtaaaaaaaaacagctttgtgcttctcattcctgaagacaatgaatgcgtcagtaacacagctcccctccatgccataagggcagggcttgttccctgttgaatccagcttctctacactgtgattggcacagggcaggcatttcatacataactaactgagtaagacaaaatgaaataagtgagcaaatgaatacaaagtatagatgtaacagcccacattatttcaatttttctatcctgttaagccttaacattgctttaagcattccccttaactgctacattcctcatatggtccagataccccaactggacaagggcttctgaaagggcaaagctattgcagtctgtacctcactgggtatgtcactgcaggcccagcccgaggtgaggctcaagggaatctaggagagggtccctgcctccaagggctgagttcccaccttctttttttggtttgtttgtttgtttgttttgagacggagtcactctgtcacccaggctggagtgcagtgccacgatctcggctcactgcaacctccactgcccaggttcaagtgattctcctgcctcagcctcccaagtagctggaattacaggcatgtgccaccacgtccagctaatttttgtatttttagtagagatggggtttcaccatgttggccaggctagtctcgaactcctgacctcaggggatcagcccgcctcagcctcctaaagtgctagggttacaggcgtgagccaccacacctggtgaattcccaccttcttgtcctgtaactcagcgtgtatcttgcttactgtcggtgggacgatgtttttaatgtgatggttgtgcttgctgtgttttatgggcccagcatggcacagcattgctgccggacctacacaaacttgcatagtctgtcttttctgtcccgaggcacaacctatgaatagagcttggctactgcaggtgccactgtgggtgctatcaggttgggcatggagacgctcccgcctgtgccccggggtgttggcacaaggaagcagcagcattgcagctagttcccctccctggcacctggctgcctggtgcccccactggactatgaaagggggaayccaggggtgatgtgggaggcatcaacagaagagagtggacagagagcctgccacgagagagggccatgcacaccctggacacccctgcactcagtggactatcttctcagttgtagatgccccctgtttgagggctgctttctytgattggtcaaggtcactttcaattctgttctgccttttgagtccatggctaccccacccagcttagtgtcagcggcaggctggatgagcaccttctcagtgccatttcccgggtcactggtaaccacattagataatctggggcctgccccaccctgcacctacccaagcctgaccttgctgggtgacaggctgctgtgtctctggtcctcctccagatccttcatcgagatctccaacaactgcctgtccaaggcccagctggccgaggtggtggagtctatgttccgggagtcgggattccaggacaaggaggagctgacatgggaggattttcacttcatgctgcgggaccatgacagcgagctccgcttcacgcagctctgtgtcaaaggtggaggtggaggtggaaatggtgagtgtgtgaggaatggttggcgtcagggagggggggcgtgtcctcaaaatgagagttcctggtgggcaggacccaggtcttactcttttctgagtccttggtacctagtatagaaccaagcacatgtaattgggatggcacatgtaggtgtgcaagttgcctaatgcacaatgatacccactgaggtcaaggagcaggttgaaatctatcctacacactgctcaaagccaccggcattgctctaagatrtatctggccagaggaagaggcattgtttcttttacacaaaggacctgcagggttgcatccacctaagaggangtcccctttcttgtgcaaagttgccacattgtctgccctgtgtacagtgagtgcttagtctagggaatgagggaaacaggactcgagtcagagatctggacatgactttcccagaagggaggagggcacagtctcccatcctaccccactgcccttgtggggaagccagtcctgcctcttgttcttttctctaggtattagagatatctttaaacaaaacatcagctgtcgagtctcgttcatcactcggacacctggggagcggtgagcaggaatggggctctggcaggttggcctggctgagccccctgcagagaaatgaagggagtaggactggctgatcagcccctggtaaaatcaggcatttgccctttgaaagtagctcatggtagcacaaacattccagctgcctctctcaccctatgctgctcggatgcttggctctctccctgctgctccaggccagaatcattctacaaaacaaatcatgagatcctattaattcattttgtgccttgccccctgcctggtaccaggagccactccctacctctaccccatgctctgcccagggagttgttctcctggctgcaaagacaaggggagaacagccccatttctttttctcagctcccacccccagggactggggscccctgccccagaagccccagagctgggaggccctggactgaagaagaggtttggcaaaaagtgagtgtctcccaaatccctgggcccaaagagacatggagagaagtcttarggtccctaggccccacccacatatccttgacatataagcgaccatcctgagtctcattccatttgttcctgacctgactgagaggttayagtgttgaatgacttttcatcctcttccagcctctgcaccccattcttcaggcaagggtcctggctcaacaggatgatagtaaggggtctcctggctcctgcctgctttgggcacagccttgaggcctgtgctgggatcaggaagaaagaaggataaaacagacaggaggagggggagtagcagggagacagtgagtgggtggatggagcaaagacagaagtaaagggttggaggaggaagaagcccccagattgcttttttccattcatctgttgtggcccatcctgatgcctgccagatccccaggtcacctttcatggagtggcattaagggaaggccagagggcccttaccacactgctgccctgcctccccttgctatagggcagcagtgcccactccccrgctgtacacagaggcgctgcaagagaagatgcagcgaggcttcctagcccaaaagctgcagcagtacaagcgcttcgtggagaactaccggaggcacatcgtgtgtgtggcaatcttctcggccatctgtgttggcgtgtttgcagatcgtgcttactgtaagagttccaggctgtgggcagtgggtagggagcaggctctgacccttggagaggagtggaaagccctctgatcctaagagtctgcatgggagagcccagggctcgggaccttggccacctgtgccaagctgatgtaacctcactccggccccagactatggctttgcctygccaccctcggacattgcacagaccaccctcgtgggcatcatcctgtcacgaggcacggcggccagcgtctccttcatgttctcttatatcttgctcaccatgtgccgcaacctcataaccttcctgcgagagactttcctcaaccgctatgtgccttttgatgccgcagtggacttccaccgctggatcgccatggctgctgttgtcctggccagtacgtgactcccaggcttcttcctctttgctgcagcaccctgggtctagttgggggaaacagtggggagatggaactccttatacctccatctctcctccctatgcctcctctctccctcaggatcggaggtagagtctgtcctggttggcatctctaacagggtctgtctcttccagttttgcacagtgctggccacgcagtcaatgtctacatcttctcagtcagcccactcagcctgctggcctgcatattccccaacgtctttgtgaatgatgggtcagttctggggawggtttctcctgggactcatagggtgggcccaagggtataatagaaaaagaaataggcaggccgggcgcggtggctcacgcctgtaatcccagcactttgggaggccgaggtgggcggatcacgaggtcaggagatcgagaccatcctggctaacacggtgaaaccccgtctctactaaaaatacaaaaaattagccgggcgtggtggtgggcgcctgtaatcccagctactcgggaggctgaggcaggagaatggcatgaacccaagaggcggagcttgcagtgagccgggatagcgccactgcagtccagcttgggcgaaagagtgagactccgtctcaaaaaaaaaaaaaaagaaagaaataggcagggcacaatggctcacacctgtaagcccaacactttggaagtctgaggcaggaggattgcttgaggccaggagttccagacaagcctgaacaacaaagtgagactccatctgtacaaaaagtaaaaagattagcggggcattgtggtacacatctgtagtcccagctattcaggaggctgaggcaggaggattgcttgagcccaggagttttaggttgcagtgagccatgatcagtaccactgcattccagcctgggcgacagagcaagactctgtcttgaaaaaaaaaaaaaggaaagaaatagacagtcccagacactcagcaagaagctcagtgctaagctagtcccctgggggaagctgaaaggtaaatttcttgccttcaagaaggaagctggctgtgattggccaggaaaggtgtttgggagatgaagtcagagactctttctcatagatacctgacacacagcttgccatctctgccttctatccattcactggacagacatttatgcagcatgtcccatgtgtctacccagatgccagagtagggatgtcaagatacatgcagtcattcaacaactacttaccgagatttgctgtgtgccttgtattgttctaagcctagggatagagcagtgaatgaaacaaaaatccctgccctcatggagcttacagaataatgaaccagggactcaaggaagcaggggtcaaccacagtaagagagttcaggataacacagaaggaaaaattgctgagtacagagggtggaaccatggaagcctgggtgccaagttccttggagggatccctggccaactgggtggaggccccataccctcagcagtcagggccagcaggaaaggagtcatgctgtgttgtgacagtgctggagcccctcctgccccagtcagaggctcaaggtgcctttgccccccaggtccaagcttccccagaagttctattggtggttcttccagaccgtcccaggtaggaaacgtgggacctgggggttctgtctgaggacttctgcttttgtctccatctctctgtgaatactcacttgtctatactggccatggggtctgtttctagccttcaggacaagccccagctcaaatccctccaggcaggcttttctgggggccccggagggatgagagaggaaggagggaaggataggggaatgtgctgttgtcttttcagcccaagctgaagtcctgagactactcactggccctgtcttcctgcccccaggtatgacaggtgtgcttctgctcctggtcctggccatcatgtatgtcttcgcctcccaccacttccgccgccgcagcttccggggcttctggctgacccaccacctctacatcctgctctatgccctggtgagggacttccctgggccagcccatggagcagggagctcaggatgggacaggaaggtgaaagagggagaattggatccaagatctcagaatgagactttgagatttaagaccccagacctcagccctatctccccggcacaggcctagtgcctgggcaagaggggatgccgggcaggggcctggctgggcctgagttgtactaactggccgtgtctccagctcatcatccatggcagctatgctctgatccagctgcccactttccacatctacttcctggtcccggcaatcatctatggaggtgacaagctggtgagcctgagccggaagaaggtggagatcagcgtggtgaaggcggagctgctgccctcaggtatcaggcccagcctgacctgggtcgggagcgacagaggccaaatcttcagacatggggagacagttcaccaggtctcctgaccccatcactgcctctgactctgtctccaaaaacaacaacaacaaaaaaccactctcgggggttcctgaaggtttcctgatagaagtagacccagaaagggctgtgcttagctcccaggagacttgcagatggtgagaagtgacctgagaagaggtggctgaacgtgcatacagaggggtttgaggatgggaaagggccccacatgtgtggcctgggtgcaggggaagtgcagggcaggaagccacatatgcctgtcccattccttctctcagagacaggcaaatgcccagattgccagtctgggttgttgagagtcagtgctggccaaagtcgggattggtatcatcatagagggtggcaaaagatgattttatgtatctcaggactgtctaaccttcaggactcatgttgtaaaaaaattaatctcattgcaatgttatttcaattgagattacttaaggacaaaatctcagagtggtgttagtatgcctttctactctccagcacttgctgatctcctttttcaatgaagagatcaggcctgaggctcagctatggtacaaacagtatccagctaaaatttggtaacaaaatatgttgtcttctatgtaggacacatgatactggttttccacttaccttagcaataaagttccctgccaagattaattgaattggaaaagttagtcaatttaaagaaaagtgttagataaatgatagtgcaggaggtgtgtagaaaggtaaccctcaaatggaggtctggtagccactgagatggtccctggtgagcctgagtccctttacccagcaggttggtattcaaggcagtggtatgaggcctgggccttccatgggaagagggagtagagaggaggagaggggctggaacaggggagcagagaaacccagctcttgcattacctgggaaacagagaaggggaccctcctactcccagccccaggagccccrcttgctcagaccatgtgactactccccaggcctcaggggtgtgaagaggacaggtgcctatcagtcctcaggtaccaggagcaggccttctcatctgtgcttttccctgtctatgacctccaggagtgacctacctgcaattccagaggccccaaggctttgagtacaagtcaggacagtgggtgcggatcgcctgcctggctctggggaccaccgagtaccaccccttcacactgacctcygcgccccatgaggacacactcagcctgcacatccgggcagtggggccctggaccactcgcctcagggagatctactcatccccaaagggcaatggctgtgctggatacccaaaggtgcccgtcactgggaaccctgcttccgggcctctggcactggcagaggatctctgcccttccctatcctgagactagaagctccagccgtcccaaagccagcctgggagaggaccggggtgcctcrgaaaagactaggatgttctgtatcctccctctgcctgtgtctccgtttctggtctcagagctggggcagggtcaggctcatttcatctcccccctctcttggcagctgtaccttgatggaccgtttggagagggccatcaggagtggcataaatttgaggtgtcagtgttggtgggagggggcattggggtcaccccctttgcctccatcctcaaagacctggtcttcaagtcatccttgggcagccaaatgctgtgtaagaaggtgagcatccctccctcattcatcaaatggggcataggtggccgaattgtgacccgcatcaagtggtggagcatgagagaaagcycctggctccaggaactgagtctgaaggggtcattcttacccagtggttgagatgccaaacttggagggaggttggtggtatagccagaagggcctctgctgggacctgtcagttggaagcctgggatcaggctggtgggtcctgccacagctttggtgtctgcaggtggtctggggcttcccagcctctcaggtgaaggcacctgggatctagggaggctgaactgagctgggtcctgatctccagccctgtgtccccagatctacttcatctgggtgacacggacccagcgtcagtttgagtggctggctgacatcatccaagaggtggaggagaacgaccaccaggacctggtgtctgtgcacatttatgtcacccagctggctgagaagttcgacctcaggaccaccatgctagtrtgtcagggcccgccaggcagggcaacttggcgggcagatggattggcagcgtaaggcaggatggccagggcaggtgggtggacggccaggctgagctggcaggaggcacagagctgatggcctgatcctcagcctccagctccctcccctccccattctctgtctcttgggctatgtgggctggctcgggctgagtgctggccctgactgtctttggtctgacctgcccctgtgcccccagtacatctgcgagcggcacttccagaaagtgctgaaccggagtctgttcacgggcctgcgctccatcacccactttggccgtccccccttcgagcccttcttcaactccctgcaggaggtccacccacaggtcagtcccactccctcccaccctgggactctggccttctcctgccaggacatcctggccctgaagcaccctgccactctgttctgagcagagaactccacccgattgcctggccccaggatgaggtcagctgttaaagggggacttccaccccctccacgttaagcctcctcctcaaggcctgggcttgaagccttagtcattccagccaggctcaggaagcagcttttcccaaggagagtgagcacctttaggctgcaggcccctctctctctccaatctcctgacaggtgcgcaagatcggggtgttcagctgcggccctccaggaatgaccaagaatgtagagaaggcctgtcagctcgtcaacaggcaggaccgagcccacttcatgcaccactatgagaacttctgagcctgtcctccctggctgctgcttccagtatcctgccttctcttctgtgcacctaagttgcccagccctgctggcaatctctccatcagaatccaccttaggcctcagctggagggctgcagagcccctcccaatattgggagaatattgacccagacaattatacaaatgagaaaaggcaggagactatgttctacaattgcagtgcatgatgattataagtccacctgtttatcaacggcaccattcctgcagccctccagacttcctgcccttagcaagtgcgcaaccagtcaggatctcccaaagaagataaagaccactcctcaccccagctcaagccatggcaggcgtggcaagcaaagtggggaggagacagtccctgcttgtgacaagtgtggaggtgaaaaggtacaatagtgcttgtctccgatagctccccacatctctaaytgacttccacaaaatcgatgcgttgctttggtatttgcttggactgacatttgagggaggaggaggctgggatcctctggctgagaatctcctcagagcccagtgcagaagctgtgatgcttagaacctggacagcccgactgcctcaactctgtctccaggtctattccctccagctccaaaaggagcagccctacttctaccccttcccrtccccaaagtgtcagcaactttgaggagggcaccaggaaacaaagatgcctccccagccctgatattcttgatgtcaccagtgatacccactgccctgacccctgggcaggcccctctctgcatctactggagtggtccctgggctctggggctgaaggattccagcctctctgccagatattcagwactcgatctcaattcccctcttccacaagagttgggtgaccagctgtcctagtttgcccaggactctccctgttttagcactgaaagtctcttgccccaggaaaccccatcagtcccaggcagattgggacagctggtcaccttacgcaagagccaggctgaaacatcccctccatactcagctctttaacttttcttttcctttttcatcgggctctttcctaaaaagctgagctgtaaaatattttacatcgaggtataataaataatcatgtacatgttttaccaccacccaggtcaagacatagaatgtttcaacatttccatcaccccagaaactccccttgtacccccttccacttcgtctcccctagctcctagaagcaaccactgatgtgatttctaccaaatccagttttggtcctactaaatatactcttttgagactggcctcttttactcaccataatgcctttgtaattcatccatgctgttgtgtgtatcagcagtttgttccttttcattgctgagtagtattctattgtagagatgtaccacagtttgtttattcttctgttgatggacgtttgggttgtttctaattttgaatgattataaataaaaattctgtgagtgttcttgtacctatgttttggtggccatcatgcactcatttctcttgagtatgtatctatgagtggaattgctgggtcatacagttatccagccagtaggacctgtggagggagagtttcagaccaggtttgtcttctcactggccccaccctacctcttcagccaggccaaatgcctctggttcccaaccccctctgttgaaggtatctctctgacaaggctggaagagcaccaatcagaagtcaagagacctggattctagtgcccactttatctgcaaatagctatggagggaaatcccttaactcctctgggcctcttcctcatttattcaaatgtctgtgagagtattgggaagtcaaataacaatattggcccagacaattacacagatgagaaaaggcaggagactgtgttccatagttgcggtgcgtgatgattatgagttcacctatttatcaacagcatcattcctgcagtcctccagccttcctgcccttagtaagtgcacaaccagtcagtaatcccaaactccagccccttcagtctcagccttagctttactcccaaatctgaccctgcagttcctccctatgcctttctaaaaactgtgcaaagtatttattcattccatcctaattcacccatccttgctagactggagaatggcattaacatggctatcaagattatccataaaactctctgcttagccctgacttccctgccatgctggggcctaagtgaggatctcccaaagactttgtcatcactgaagatgtatccccagccaactcttgcccaaacaccgggcaatgccaagtgtatgtccagctggatagagggacatgctgccattatcttgagtcacttcagatggcactcagcctgcctggcctcagtcctgactccacacgccagtcaggctgtagatgtcagccctaagcatgtattcatgtgatctggctgctctgtctaaccctgcacagagtcccagaaagmcactgaatgacagggataaaagtcaaggacttgcagagaggttaaaagtgtcttcagcctcaacacttgcctagatactaacctggtcctacccttcctggggctttatgaccaactctttgagaagtgggctagaaggcaggatcaggcagctattgggtgataccttgggttcagaaagcgaggtcattgcataagtgtgtgtcggggagggattagactgaaaaatgtgcaaacragggaggctacaaaaatgtcccagagaaagatggaagatgactcagagggaattcgtggaaatgatcacataaaccgtgtaaaggaaagcaaatcttccccgctctgggttacagagatgtttgtctcaggctttgggacaaagcccaacccaaaccctgcctcccaggaatagggatgaggatgagaatgaaacagggatggacaaggaatcgggtgggattggatggtaatgggactgtggatggagaagaggaagacaagcatgagattggatggaagggctttggggccagggggaaaaggagtggatgaggacaggaggggctgaagctgagctctgtaggagaggaatgaaggctggatctttgcccctttttccaactttccagccccaacttctgcctcaagtgaaagaggagaacattgctaagatgtggcataattcctgtctacttactaagaattttcattttgtttggttttgtttatacatgtatacacatactgtatttacgtacacattatgactgaatcatagttcatatactgtcctgacattaacttttttgcttagaaataggtctaaatatattttctttttttgaaggggagagtatccatcacctcaaacattcatcctttgtgttacaaacaatccaattatactttttaagttatttttaaacgtacaattaaattattttttactatagtctctctgctgtggtagcaaatactatgtcttattcattctttcatttttgtacccatgaacaacccccacttctcccaacaccctcaactctggtaaccattgttctattctctatctctatgagtccagttgttttgatttttagatcccacaaataagtgagaacacgcaacgtttggctttctgtgcttggcttatttcactgaacacagtactctccaggtccatccatattgttgcaaatgacaggatctcattcttttttatgacttaatagctctccactgtgatatgtaccattttttctttatccactcatctgtttatggacatttagcttgcttccaaatcttggctattgtgaacagtgctgcaataaacatgggagtgcagatatctccttatttattaagaatttttgagtaagaggagtcaatccagcatagtacttaagagtgagggctcttaagtcaaattgggtttgagtcctagctgggtgaccttgagaaaacaaagaaaactctcagggcctcagtttgctccttcataaaatggggataacatgattacctgctccatagggtttgggaagatctaataatataattcaattcaacaaatatgtgttgagcatctattatgtcccgggcacaggcacagcttctagggaacttaaatgttagtggaaggaaacagacaatgaacaagatagaaggaagaggaagagaagaaggaggtcacagatcacaagtgctttgaagataataaaactatgaaatgatagtgactgactaaggggaactctttagataggatgattaaagaaagccctctaagatgacgacaacaaaactatgatgattaatgcatacagagcttgctgtgtgcccagtgctatcataagtacttgaaatgcattaactcacttaatccttagaacagccacaatccccattttacagataagggacactgaagcacgaagaggcttaaacaacttgctcaaagttatctagaatgtaagtgagaagacagactaggtttttctttttatagagacagggtctcgctctgccacctaggctggagcgcagtggtatgatcatagctcactgtaaccttgaacttctgagctccagcaatcctcctgcgtcagtctccccagtagctgggactacaggcatgcactaccatacctagttaattttaaagttttttgtagagacatgttgcccagactcgtctcgaactgctgggctcaagcagatcttcccactttgggaggagactagatttgaacccagaaagtttaaccagatatcatgcccttaactaccactttatcctgtcactcaaaagcaggctgcaagcgttcaggtgaagctaatgtatggagagcccttaattgtgcctggcacctagtaatattgttacgagcatcacctattagtaagagaagccgaagctctgacagcagagctccatagtctgaggagtttgcggtttgtggggcctgagtaatggtgagtgacttgtttctaatccagatttatcccctatctcatcatccctccttctcatttccccagcttcccgctcactttcttgtgtcccaccaggttctggttctgtgaagccaggaggaggcctgctctaacctccagggacacactacccagccaccctgatcatgtgaaagtcaatccatcctgaccttgcatggagtggaaaattactaagtgaccacctccctgtcttgtctccagggagctgtaaatttcctgggaagtctctccctgatttcacaggaacccttatcttccctggccagtgacctcagatgagctgtaacatgaaggctctagcttttctgagagtgagaggctggcagtgagaatttaggaaaggctgcccaaaatgcactggatgctggaatcaggggacctgagttttgtttccagcattactgctcaaatcaccaagtaacctgagggaagtcacctgagttttatgggcttctatttgtcttaccaagaaaataaaagaattaggctggccgggcacggtggctcacgtctgtaatcccagcactttgggaggccaaggcaggtggatcacttgaggccaggagttcgagatcagcctggtcaacatggggaaacccatgtttccccatggggaaaatacaaaaatgctaaaaatacaaaaatacaaaaattagccagatgtggtggcgggtgcctgtaatcccagctactcaggtggtggaggcacaagaatctcttgaacctgggaggtagaggttgcagtgagctgagattgccactgcactccagcctgagtgacagagtgagaacctgtctcacaaaaaaaaaaaaaaaaaggattaggctaagaccccttctagacctgcaacttcactcttcccttctgcactcggtgtctcaaatggatagaagaaaacagtttccttggcctctcaaccaaggttaaatagtctggggaaagggaactaatatttacaggtttactttgtgttgggtcctgtaacacatttacataaattgcctcacttaatcctcacaataactctctggagaaggtattactgcctccattgtatagacgaggcatgtgggactcagagtacatcacccacgggcatccagctagtaacaggcaaagtgagggtttgaatcctatgatatctcagagtctctgctctttgcatcctgatgcctctaaaggtataagcaatcaaggtttttcataatatattttccattgttaattgttctgatggtattcattgaacaactgctgtgaacacagatcatactagatcccacagggtccaaaagaaaagcaagacatacttcctgccctccaggagccaaaaaccaatccagctctagggagaaagtacagtaactcatcacaccagcaagcacaatgcttgctcaatgttcctctttccttctctgctataagccccctagagggcaggacctatgcctatagttcactgtcatttttcccctgcctagtaaagtgccagacagagagcacattctcatgggatatttcgtgaatacattacactatgtgataagcaactgattaaatgctaagatgagtggattcagaaagggaattcagaaaaggtccttgcaagagggggattttgagcttaaccttgaaggataaagaaggtccatgtacacattcatcactgggctggagtactcaccctgctgactggactacgttcctcttccacagccagaccctaaagatggcatcttttgaaggaaagagcatctttggattcctcttacctttggatctgccaacacccagtgtgatatggaaacaacacccactgtcgttctggaaaacaagagccgcacctcatcaggactcagaagaggctgacatctttggaaggcataagctttggggaatgtgctggagtggccccagatggggaagggaggcatttagggctgagttctctggcggacaggaagcccattacctggagtggttgaagcagggggtaggcaaaggaatagtaatgaagatttcctctgtgtcagacccaaggtctggtttcctaatagctctctcgtgtaattctctcggcaaccccaggaagccataattgtctggatgtccaacaatcagagaatgattaagtaaactatacaaccaaatggaatattatataaccatgtgcgatgaaaattattagatgagcaatcttacattcaggaagtttggcaaaatatctcaagaatcttaaaaggtttgttccactaattcctcttgtaggaaactgtcctaggaaaataaccagaaatccagacaaatatttacttttatagacgaaaatgcaccaaaatggtaagagtgagtatttctaggtgatgatatatttgattttattttcctttttatacttttatacattgttcaaaaatataaaatattcataataagaaataaaaaatatacacgaaaaatttgttttaagagctgggtattgtgactc

SEQ ID NO: 95801 - DNA, 141476 bp, Homo sapiens
  misc_feature (1)...(141476): n = A,T,C or G
aacaccatgttggccaggatggtcttgaactcctgacctcaggtgatccacctgcctcagcctcccaaagtgctgggattacaggcacgagccaccgcgcccagcgtaaatctgcttttaaatagcgctgtactgcttcattactttataataataaaatattcctaatttttgtctcataccccttgtgttattgctatcattcatttcacttatacatagatttgataattaaacacattgttgctattactattttgagcatgctgttataggttaggtcaataaatgataagaagaataaaagttcctttttcttttctttctttctttctttctttctttttttttttgtagagacagggtcttgttttgttgcctaggttggtctcaaactcctggcttcaaatgatcctcctgctttggcctcccgaagtgttggggttacaggcatgaaccagcatgccttggcaaaaataagagtttttgtttgaccttcacttattccttctctaatgctcttcttttcttcatgtggatctgattttctaattttctatattatttttcttctcttggaagaacttcttttaacattcttctcaaggcagatctactggcaataaattatttaaatttttgtttgtctgagaaagtctttaattctccttcacttttgagaaataattctgcagagcacagaattgtaggttggtgcactttttccttgcaagtctttaaatatcttactctactctcatcttgtttgcatggcttctgaggagaagttggatataattcttatctttgctcctctataggtaagttgcttttttccctctggcctctttcaagatttttttaaatctttgatttgaatatgatatgcccaggtgtagttttttgggcacttatcctgctgatgtacctggaacttcctggatctgtgactttgtgtctgacattaattttggggaaattctcagtcattattacttcaaatgtgtcttctgttcctttctgtcttctccttctagtagtctctattcatgtatattatattgtaaaccaaaaataaaattcttagccatgcaattgactgatggaccctcccctcagccaagggcattccaaagttaacctgaaaagctagttcaggccctgatggaagtgggggtcagacatgcctcattatacccctcttcctttggaattcaggcatacctgccagcattaacattaaaacagagaacttaagactcatagaaaactctttaagtcagataagaaacagtcccttctattgattctgtctgcataatgagaaccttggtctccacaacctcttatcttaacccagacattaccctttattaattatagatttttagacaataacttaactccttcaaccgattgctgatgaacaaaattcttgaatccatctatgacctggaagcccccacttcaaattttcttacctttctggaccaaaccaatgtacatcttacatgtattgattgatgtcttatgtctccctaaaataaataaaaccaagctgtgtagccttgggcaaccttgggcacatgctctcaggatctcctggggctgtgtctcaggccattggtcattcatatttggctcagaataaatctcttcaaatatttatagagtttgactcttttcattgacaatatcttttgtagttgtcccccagttcttggatattctgttcatttcttgcatacatttttctctgctttttggttttgaaagtttctgttgacataccctcaagctcagagattcttttctcagccgtgttccatctactaatacgccattcttcatttctgttatggtgcttttcatctctagcattttttattattttttagaatttccatgtctctgcttacgttacccatctgtttttgtatgttgtgtaaattttccattagagctctcagcatattaatcatagttattttaaattcctggactgataattctgacattcctcccatatgtgagtttggttttggcatttgctttgtctttccaagttgtatctttggctttgtaaatttttgttgaaagccatacatgacatcctgggtgaaaggaattgccataaataggccttcagtgatgtgttgggaaggtgttgggagagggaaaatggtctattttcctctgattaggtctcagtcatctagtgagcccagtcccctggactgtgaacttcacagtgcttctcagctatgtttcacccccttagatggggcagaatgtctatggggggctggagttgggtattttccttctcccaggctggcgagactctgataaaaccccagttggttcagctctggtaaaattgtttcttttgagagtgggtcttgttaagaagcacagaatctctggcacattcagaatagttactttcctcctcccttgcaggaaacacgagaggatttttcttcaatcttcactatgagagctttgtggagctcctggaggcaaacttacaaaagcacagctgctcccctaagactgggcccccttggagtttttaactctcaaatttgtgcatattggtcctccagtaatttgtcaattatagtccaggtcttcctactctgtactggttcccactgagatttcagctatgggacaayggttgtggggtagtgtgtgtggtctactcagttaagttgtaattgcctgtatctacctgtctacatctctaattttgggggcagcagtctgccctgtgacctcacttctttgactcatctaagaagagttgtctattttcaatttgtgcagctttttacttgctttttaggatagagtgatgacttccaaggtccttacatgccaggccagaaattggaaatctattattgttttgacccatgcattatttaggaatataatatattatattcctaattatataattatattatataatataattatattatatatttttatatatttatattattatataaattatatatatttaaaatatatatttgtatatgtatgtatatatgtatatatacagtatatgtatgtatgtatatatacagtatatgtatatatatacgtatatgtatatatgtatatatacagtatatgtatatatatacacagtttgctgacataggccatgtgtcctctagttgacttcttggactctcttgggtagaatcccattatactggctcaagcctggttacttcctacggtgtcctcttggtttataggaaactcatgcatatgcatccttgacacaccaaattctagtggtgtacatagtttccactaccttctctctttgttctaacatttggggcttcaaactctggggaagtatgtcaaacctttgggcaggatacttatgggctattatccccagtcctggggtttaatcagacactatgagtctaaaggcaaatgtccactccacatctgattactctttcattttctttcccttattataacttctgtaatatatcatgggattggaatatcattggccttggtatataccatggtgttctaatgagtttaccaattttatatatttagatatgaaggaaatgttgtcatatagcaaagggcctaactacttccattggtctgttgtgacaggatactgaccctacacatcatttaatcaccgtgggcattatttatctttttaaaccagggaacgatcacttgttctaaataattcaagttttgggaagcatcaaatgaaatgatcaaaatgaaatctgtttatacagtgtaagttaaagatacccataactattttaaacattgcatttggtatcatgactttaaattacataagttgagaagttttatgttatctctaaataaggtttatttaccagaaaatcatggacaaaaattatcctataacaaaatgaaaacatcatgtcatctgtgccaattgcaattttaggaagagtacttattagggctttgattattctttgatgttctctgttgtcaaagtgaagtaacctaaatgatgttatgcttgcatcctggaatgaaaggaggaatgagaatcttctattattgtttttctaaaaattatatttcttaataaacagaatatatccatatgtatcatcaaggatgaattttcctctgatttggcttaatgaaatctctgggaattatgaaaaaattcctttgccgctcttgttgccataaaccttgtgttatcagtgttgcacagaccatggctagccatttaatgccgtgaattatggcatataatttgaattgagagctttgtttctatcaaaggtaaaaatgcttctggagtgagtgaggaaggctttgaagcagtgagagcgtttcccctatagcatcattgggctctgacagtaggaccttgaagaggagggttctaatcctgtctgccactatgtgacaggcaagtcacctgatcttttttttttttttttttttagagtctttctctatagcccaggctggagtgcagtagtgccatctcggcttactgcaacctctgcttcctgggttcaagcggttctcctgcctcagtttcccgagcacctgcgactacaggcacgtgccaccacgcgcccagctaatttttgtatttttaatagagacagggtttcaccatgttggccaggctggcctcgaactcctgacctcaagtgatccacccgcctcggcctcccagaagtgctgggattacagacgtgagccaccgcgcctggccccgatctctttgaactcagttccctcatctgtaaagccagcggcttgggttggataatccatactgtcctttaagccaagatattcagggcttgtaaataatgctgactttgcaaagtaagatattgcccggtgtctgcagaatcaggcaattccaaggccattgtaaggcgaaacaaagctcagatttgatgagagaaaatttcttttcaaggacttcttccgaagcataaatatacggcagatagcgtcaacacaggagaaaggcagtctattttatgcaatgtaaaattccgtcttaacttctaggattactgttacatcctattgcaaaaatgggactcaggtagaccatttgactacaagacccgaaataagtcagtggtatttcttgggtactctggcattgttagggacgatcacatatgtttactcattttatacttataacaccttgaaaacttcaagaaacggagatggagattttgcggcttgcccaggtcccacagctagtgagtgcagaggattttaaactcagctgcgcgcctagtgcaggttccagaacctcagaaacctccgtggggctttatgaaacataaggacgcaggccgctagtaacaatagctaacgtgaatgccttctctgggccaggctccatgctgcatgctatagtcgcattttcttggttagccctcagaacaaccttctgatggagatactgctagtacttgtttactctttgaagggcggggtaggctctgagacccgcgagttgagctgcagcggggtgagtgttacgctaccaggtagacgagggtctgtgtaaatttggcggaagggaagtggtgggttgtctcccagtttgggttctctgaaggagtgaggggactctccagctatggtctccacgtacagtcggtctctgatctcccgaggctttgtgccactgcgcgcccagggatctttctgtcccaattaccgtgcaagattcttgcctccagttgtatgtactgaggcggcgggaagaagcgccgagggaaggctcagaccgcaatgccccccagcctgtagctattctcgggggctgcagctcccgcacccgcgacgcccggctttcagcgggtgcaggcgcagcctcctcgttcccctcccgcccgcggctgcgcccggagagcgctcagctgacctaggggcggggccggggcggggacctaaagcctcggctacttccgagggggtgagtggcttcaccgccggtcccttgcagcgctgcctttcgatctctccacatctcggtggcgcgggatctcaagatgcgcctccacctgctcctgctgctcgcgctgtgcggtgcaggcaccaccgccgcggagctcagttacagcttgcgtggcaactggagcatctgcaatgggaacggctcgctggagctgcccggggcggtccctggctgcgtgcacagcgccttgttccagcagggcctgatccaggtatggcgtgcggccgacccgcggcgagcctgcgcccgccttcttctggtgctgagaggggcccaggaaccgcctggcagcccccagctctgggccattctcgtcggtttggtagtaacttcccctttgcatcttgtgatctgcggggggaaatgcccaagctatggggtacgggcttgacggagactgagcgaccgacccatgttgggacatcagtaactctggaaaggggaagtttagataggggaacagtgttgctactagcagtttacttactgcagtcgttctctactgaagcgtgtatacaaagggcatgccgtcactgacaagcataaggtcgggaattactgtctctactgtctgcacgccacaggggacaacagcgttttgttaagtaagggttaactctattgagtaatgtctcggttttttattttcgctgttaagcgtcagggagtcagatttgggattgacgcagcacagacgttgtggagaatgacctacaagagtaaagttgggtttgtcagtgctagtgtggctaacaacgggtaaataatttttaaggctaacttggtgatgaagaaaggtgctatttcctctcagggcgtgtgtgtgtgtgtgtgtgtgtatcccaatggagtctccaatttacagactacttgtggggaacgttttcgtgtttggctgcctgtgcgcataggtttgcaaactgacttccatcctccaactgcttttgctgttccctcttgcacagcgttcccacgtgttgtctttacttggggcaaaatgtacttgtaattgatctacttgtgggatgcatacattgtccaatcctcataacaactctgtatagtaagtgttcatatctgaattttatggataatatggaaytatggaacacagagaaattaggaaggtgacagcaactaaatggaaagaaatggaattctaacccaggtggtctcaactccatagcctggtctctatactatgtggtatgcttagtttggtgttttaaaaaatcatgtgtttttgaagcactgtggctgactttcaggagcaccattctaagtttatttgcatgacaaggtggtcatctagggttgtgccaaatttctgacctggtacttagtagtttttttttttttttcctgagatgtgtatcagaaaggaggtgaatgttgtaaatgacattgaccattgtccgatgtatttttagagtagatcattcccaaactttagtactttattttaagttgacaaactacttgtgatagagaacacagctgaccacagtatactctgagttttcacttatatctgctttgagaatgcctgtgtttattttgtagggttcctccttgcctgattttactgaaataattaagccaatgggtgctggtacgtgagagctttgggaggccaaggtaggaggatcccttgagtccaggagttcaagaccagcatggccaacatagaaagagtctatgaggccgaggtgggaaaatttcttgaggccaagagttcaagaccagcatggccaacatagagagattctatctctaaaaaaaaaaaaaaaagaaagaaagaattaagccaatgggaaataatgagtggcttcagtaagtcagattattgtgccatattacagagctaagaagctaagaaacaacgtttggttacaacagatacttaatgaaaatgaatttgctcatagtatgaaataacttcctcataggaacaatttgaagagatttcttaactctcttcataaattcttagcaaaaccttgaggtttcaatcaggtggccatgggtctcaaatggcagtggaatgagaaatgggaaggcttttggggcttaggaaacacaaggcctgttgaaaataatcatcaggctgggcacagtggctcatgcctataatcccagcacttgggaggcagaggtaggtggagtttagaccagtctgggcaactggcgagaccctgtctctacaaaaaattaaaaaattaactgggcgtggtggcgtacacctgtggtcctagctacgagggaggctgaggtgggaggatcgtttgagcccaggaggttgaggctgcagtgagccgtgatctgtactccaacctgggcaacagagtgacaccctctctcaaaaaaaaaaaaaaaagaaaaaaagtaaagaagcaatcatcaacatcagatcagtatcgttattcagtaatgtgagactgttgtccgacctgctttattataacatccctttttggtgttgacttgaggaaatattctaccgtttatagtagacactgggccaaatattgtgtttgtgtaagaacttgaaacatatcttggtgatatcattcatttatttatctattcacctagttaattatctcatatttattttgtacctctaatgtggcaggcactattctaagtacttgaaatcgagtggtaaagaaaacaaagtcctttccctaatggacattctaatggaggagatagacatatataccaaattaataaataatgtaaggcaggtggcacactgaagaaaaattgagcaggttaaaggaagagacagtgaaggctggttggaaagcattgctattttttaaaaagtggttcaagataggtattttgataaggtgacttctaaacaaaaagacctgtttgaaaaggtcacttttaaggagaagtgcatttccagcaaagaggaaaaacacaggagtggggaggatagaggccctgaggcaggmacgagcttgacaagtttcaggaatagtcagcaggccagtgtggctggagacctgggaaccagagggtaggagaggagttcaaagtctagggcacatcatgaaaggctgtgagccataggaaacactttggcttttattctacatgtgatgggaagttattggaggctttgagcttagagtagcatgattagatttgcctttttaaaggtcactctgttgtgtgaaggctacagtgcaggagagtggaagcctggagaccaaccaggggactattgctggtctatgtatgggcaagagatgacttctggcttggacaagcatggtggcagtgaaatggtgagaatggttgtgagaacacrttttacatgtagaaacaagaggatttcttcagttggatttgttaatggattgggagacagaagggggaggtgcaggaaaataccaggattttttttatctgagctggttaaatgaaatttgtatttagtgagagattctgtggctagtcttggctatttcctaggtgattctctgggttttctgtacagaatctaaacctttggtttcttagagagtcttttgggttctctgtgaaaagttattccttcagcctgctatttttttttttttgagacggagtttcgctcttgttgcccaggctggaatgcaatggtactatctcggctcaccgcaacctctgcctcctgggttcaagagattctcctgcctcagtctcccaggtagctgggattacaggcatgtgccaccatgcctggctaattttgtacttttagtagagacaagctttctccatgttggtcaggctggtcttgaactcccaacctcaggccatccacctgcctcggccttccaaagtgctggaattacaggcatgagccaccgtgcctggccctcagcctgctattatgccacacagtgtaataggcattaggaataaaaaaagaaattgagagtgagactatagttcctattttgtgggaggccactttagtgaggcagaaaactaaataatttccatatgttatgttaagtgcatacataaagggacccttgttaggaatgttctcagcttttctgtggaatttctcactggtgtaagttttgaagcaactgcttctttttttttttttttttttttttttagatagtctctgtatgccaacattaaaatatatagataagtaagaagaaggttggaaacatcactcccagagataaccactattttttttgacagctgttcatgtgactaatgcccccaacagttttatatatttatttatttttattttttattttttccctttttttgttatactttaagttctagggtacatgtgcacaacgtgcaggtttgttacatatgtatacatgtgccatgttggtgtgctgcacccgttgacccgttaacctcatttacattaggtatatctcctaatgctatccctcccccagcccccaacctcatgacaggtcccagtgtgtgatgttccccatcctgtgcccaagtgttctcattgttcaattcccactatgaatgagagcatgtggtgtttggttttctgtccttgtgatagtttgctcagaatgatggtttgcagcttcatccatgtccctacaaaggacatgaactcatccttttttatggctgcaaggtattccatggtgtatatgtgccacattttcttaatccagtctatcattgttggacatttgggttggttacaagtctttgctattgtgaatagtgctgcagtaaacatacatgtgcatgtgtctttatagtagcatgatttataatactttgggtrtatacccagtgatgggatggctgggtcaaatggtatttctagttctaaatccttgaggaattgccacactgtcttccacaatggttgaaatagtttatagtcccaccaacagtgtaaaagtgttcctatttctccacatcctctccagcacctgttgtttactgactttttaatgatcaccattctaactggtgtgagatggtatctcattgtggttttgatttgcatttctctgatggccagtgatgatgagcattttttcatgtgtcttttggctgcataaatgtcttcttttgagaagtgtctgttcatatcctttgcccactttttgatggggttgtttgattttttcttgtaaatttgttgaagttctttgtagattgtggattaattagccctttgtcagatggatagattgtaaaaattttctcctattctgtaggttgcctgttcactctgatggtagtttcttttgctgtgcagaagctctctagtttaattagatcccatttgtcaagtttggcttttgttgccattgcttttggtgttttagtcatgaagtccttgcccatgcctatgtcctgaatggtattgcctaggttttcttctagggtttttatggttttaggtctaacatttaagtctttaatccatcttgaattaatttttgtataaggtataaggaaggaatccagtttcagctttctacatttggctagccagttttcccagcaccatttattaaatagggaatcctttccctatttcttgtttttgtcagctttgtcaaagatcagatggttgtagatgtgtggtattatttctgagggctctgttctgttccattggtctatatctctattttggtaccagtaccatgctgttttggttactgtagccttgtagtatagtttgaagtcaggtaacgtgatgcctccagctttgttcttttggcttaggagtgtcttggcaatgtgggctttttttgggttccatatgaactttaaagtagttttttccaattctgtgaagaaagtcattggtagcttgatggggatggcgttgaatctataaatcaccttgggcagtatggccattttcatgatattaattcttcctatccatgagcatggaatgttcttgcatttgtttgtgttctcttttatttcattgagcaggataaccactattaaagtaaaaattcagtgcatccattctaatttttttaatgcatacacttttataagtattaaatatacagcttaacaactcttgggcaggcacagtggctcacgcctgtaattccagcactttgggaggccaaggcggcagatcacgaggtcgggagatcgagaccatcctggctaatacggtgaaaccccgtctctactaaaaatacaaaaaattagtccggcgtggtggccagcacctgtagtcccagctactcgggaggctgaggcagaagaatggcatgaacccgggaggtggagcttgcaatgagccaagatcacgccactgcactccagcctgggtgacagagcaagactacatctcaaaaaaaaaaataaataaataaaataaaataaataacaactctttcacatttaatgtattgtgatgctcttacctgcattaaacaggtttctataaaccatgtttagtggctttttaaaaattatgttatatacaattaccatcagttataatctgttacttattgttggatagttagattggactccatttttttctatttttctgatgaggatccttttaactaaattttactgtacatctttattttcttagacaaatatttaaaagttaaatagctgattcataggatatgtacttttattagtcatttagtacgtgcttctaagttgcttttcataaacattgtaccagttgtacactgccaccattattttatcagagtgcttatcttaggtgctagatttgaatattatttaagaaacaaaacaaaatcaatttattttctagtaaggtcaaatacctttatacgtttatttcataagtttattggtgacatgggcatttctaattcatcttcttttggctatttatctttaatggtgattttttttttcttttttttttttttgagacagagtctcactctgtcgcccaggttggagtgaagtggcatcatcttsctcactgcattctctgcctcccaggttcaagcgattctcatggtctcaccgtgttgctcaagctggtctcgatctcctgagctcaggcaatccgcccacctcggcctgtcaaagtgctgggattacaggtgtgagccaccatgggtggcctctttaatatagatttataaggcccctttgttatatattttcaaaaattcaaattaaaactaaatccccaaatgtcccatttattaatgaagtattttgtcatatggatgttttaaagctgtgtatgttgaaatcttttgttttccttttatgattgtttctgtctttggtagtttgcttaaaaataattcctctcagctatctttatagttcctatatttaaaattttgattcatttgaggtttcttccaaatagttaattggttgcctataactcatgatttgaagaatttctcttttgtccgctgatatattacttttatcatgcactaaattcgcatatactgatataatattgttattccttctcttttaatcttyagaaaggttacatgattaaaattcttttaaaaatacgtatttatgtagtgttcattggataaaagaaatacagaaaatataaagaaggaagaaaaaccaataaaacacataatataaagcagaaaaagaccactgtaaaaaagtgtttatctttccacatttttttctaagtatatagagacaaatataacataaaaatgaaatcatcccctaaggtggttttattagctactttaacatttaaaacatatcatgaatatatttgtctgtgtctgtaaatatagatccaggattattgcaaatagcttcatacaccccattataaagatgtgttcttattcaaaatctacacttgaaaataaaaattataagtatataaatatacacatatactaaaaagtggtaggcaacagatacttagtactttttccgtaaattttattattaccttatattcttcacatgcaattgggacaaatggccagagaaagatatattttagatgtgtaagttaattaactataaactgtaagagtacatcatagtagctatacatgtgattaacaagctagtcacaatcattctttttattttataaacacaaactattataaatacaaaataagaaaaagatagttaaatgttagctgttatgaagagtgaaaacatkatataaatttcaaacggctgctttctgcatctgcatcagtataatttcatgattttctaccaagttcatttgtataaagaatctctatgatcaatttatcattcactttcatgcccccacatggaaagtggtaggtgaatatctgtaggaatacaatttattgtctgcttgtccactgaaaagtagccctgtgtccctatccagtctacactcagaactttgtcttcatgagcagccagatcatacaacttcttgtatcccacaacttgacaatgttatctaaagatcctgaaatcagttgctgttcatgggtaggagaccattttactaatgtcacgcaacctgtatttgaagttagggacagtgacaccaaagaatggtctttagttcggggatcccacagtctggtatgcctatctgtgcttccagatgctaaacgtttacaaagttggagaatgggaaatacaattaagcactttatttcctgtcaaagcttgccttcagactgtcagactcaacatcctacactctaattgtatggtcccaagatgcactgcagatttcttcagcatctgaccacagaactgaggaaattgcttccttgtgaccagagagggtcactatgggagtcatagctgctctgtgttctctgtcgatttgtggattcctccatttcatcttcttcttctgtagggactgtagaccagatctttagcatcttatcccaggagccactacaaaatttagttcctgagctatcaacagctatagactctgcacttccagcatgacctctgcagcacggtcgggctttcactttgtttctctctattccactcccataagagaatagttggatccatagaggcactcacaaataagcaagacaaactatctttttttttggcccaggccacatcttttaagacatccctatgtccaacaattgtcattattgactttctttccaaggaccggatttgagaggtcttatcataagaaccagtcaagatccattcctttgcccctttaactgaaaggatccagtcatcatggaacatgcattgctctggctggggtgctgtgtacttcacatattctatttccacaactacttctgatgacatgttctccagttccatgtgtttgaccaaggacattcgcagaaactggcccttaatarggaaataaaactccatatgtttgtggaactcatttttgtcctttagtaatttattgatgatgttactaaggtcagcaaattcagaggcggcagggattgagaaggaaacatcatttacagcatatttcttgttatcggtgtagaaatgtgtttggagctgagccaaggcaaggagtacacacaagacttttgggttagtagagagagaatgggagctcctgtctcttaactacaaagaggccgctcaaaattagactgcacaggtaagcgagaagctgcagtctaagcctggactctgcttttcctccttgggtctgctccacccacaatcattctttctaaggagccatgagtytgtctatggagtctccaatctgcaggttatcactcataagtacattctaacaatatatgtgcatcagtgtacattctacttttgtattctttaagtagcaaataagcagtttctatgtgaattttgttaaactttgggtgaatttcaaacaaatagtaaaatagagatacttgcaaaatgaaatttcatgtatccatcacctggcttcaacatgatcaattcgtggctaattttgtttcttctctatccactatgccatcccttattattttgttttgttatcattttttttgttttttgagatagggtattactctgtcacccaggctgaagtgcagtggcgtggtcatggctcactgcaggcttaacctcctggactcaagctatcctcccacctcagcctcccaagtagctaggactacaggtacacaccaccatacccagctaatttgtttcttttttgtagagacagagtctccctatgttgcacaggctggtctcaaactcccaggctcaagcgatattcccacctcggcctcccaaagtgtagggattacaggtgtgaaccgctgctcctggcgcccttagtattataaagtaatcccagttatcacattatttcatccacaaacatttcagtatgggtctttaaaagatagggagttcctttttcttcaacataaccacagaaccattatgacttgtgaaatatttttgatgtgtttcagagaagagagtcccattattataatccaaaatgactaaacatacattttttctcaaaacagaaggttttctggttgttatactaaccttccacagagatcttaagacttgtaaggatgaaatatttgtttgaatactgagaatgataaaaaatgttttttaaataaaaaaaaaactaaggaaatatttggctttacgtgatcattttatgatgtgaaatgatctcaaaagctttttaggaaatgaccctttaaagatatgtatgtcttcttctaaaagtttgactgacttaaagtaaaattaaaaaaaaaagtttgactgcttctatcaggtgtgacattaaggagataaaatagctaatgactctgcatttgaaatttaatttaaacagaaatagtcatcaattaataatgttgctcaatttctgggaagagagaagtccaaggtttttaagccctcatttaaaaaaaacagatagtttaaaaaatcctgatccttaaacctggacatatactttcttgtttgatgccacatgaggtgtatttagggtatgggaggatttgctttgcgtggccccgaactgaaaatcaaaggaccacctgagagctaaatttttaggtaagcgttggctggtccttatcatgtataagtattaatgcatgtagtcagcctatacaattcattttcatgtaacatttattttatgtcttccacgtgtgatgcacttttcttggccctttcatgtgcacttgttcatataatttcagcaacaaccctctggaaaaggtataataattcacagtgactgaggctcagcaaagttattgcctaagatgatgcatataatggatggtggagcaaggattcaaaccccgatgttcttttcaccattgcacgctgcctattggcagaaacagtaaatagtaaacaaatggaacagttattttaatttaaatgtgtctgatgaaaatagagacatgagtacaatatacttttgttcaaaatatgccactaaaagcaccccatttgctaaaagctctcaaaaaatgtaaacattttctcagggttaattcatatatcacttctttctgtattctccgtctcttggaattctctttgtttcagccatcacttctgtgccacaattgctgaaatgcttgtgtctaaccaccacatctcacttgatttccagctagaaattctgttcaactctcctacctgaatgtcttcatggcatatgaaactccatatatccaaatatttcttctctcaattctcccaacccttactttctcttattttacctatttataataaaagcataagtattttctcaggaaactaagcctagaatcttggttacagttttttgtttttttttctcacgtctgttgttaggtactggatcttttaagtcccatctatactgtcttataaccattccttaacatttctaccgctatcaacctagctcattgttttcttttttttaaaaaaagagataaattaatcttaatgacatttagaaacaggtaaaggatataaatagcaaatgggtttttttttttctttttagatggagtcttgctttgtcacccaggctggagtgcaatggcacgatctcgcctcactgcaacctctgcttcctgggttcaagtgattctcctgcctcagcctcccgagtagccgggattacaggcgcctgccaccacacctggctaatttttgtatttttattagagatggtgtttcatcatgttggccaggctggtctcgaactcctgaccttgtgatccgcccacctcggccccccaaagtgttgggattacaggcatgagccaccttgcctggccaatagtaaacagttttaaaggtaggctatgttatgaaaagcatccctgtcttctaggtccagttcccttctatagaaacaaccatgattaaccggtttcttgtgtattcttccatagatgttataaacatatacagacagatatcatatatagatacatgtattttccccccacagatgattgcattctatatatatatatagttttatattgacctttttctttaacttaatatatcttagacatcatttcagatcagtacatgtaatagaaaagatagctatcatttttgagtgcacactatgtaccaagaactgttctaagcactcttcataattgtctcatgcactccttgtactgatcctgtgaggcatgtaggtatgattactatctccattcaagaactgagaaaacaggtgtacagagatgttttttgagcttcacaaagactcacaggtattaggattaagctggggatcaaacccatgcagaaaaggtttcaccaactgcctcttccacatgtcagctccagtcacctcctggcttcatctcagaggcagtggaaccatgtagctgcccagcctcactccctgagcaagtgtgatctcctctgactcttcctatcagctaggaatctgtctgcaggcatttattctaacctttcatgaggtccagtcctgggaaccccaccgctacacttcagtcaggtgtcacttgtctctgtgtctccttgaaaaccttgcataatgcctgggacttgtagtgggccaagcaaatagtttgtcttgttttcccttttaagttttagtctctttggtcagaaaattaggactctccttaaactgcaacttttttcacttagagctatgttagatgggaagcaatatttaytaatttaaggattttagaaaaagataatgttaaggctgaccaaaacatgttgccagactcgtgggctggggatctcttgtacctgtgtaccctttgaagtaagaatcatagctgaagatcctatttgacagaggagaaactgaagtttggagactatagcttctgaatgaaacattgtgatggttaatactgagtgtcaacttgattggattgaaagatacgaagtactaatcctgggtgtgtctgtgagggtgttgtcaaaggagattaacatttgactcagtggactgggaaaggcagacctgcctttaatctggatgggcacaatctaatcagctgccagcaaagccagaataaaaagcaggcagaagaacatgaaaagactatagtggcttatcctcccagcctctatctttctcccatgatggatgcttcctaccctcaaacatcagactccaagttcttcacctttaggaatcagactggcttccttgcttctcagcttgcagatggcgtgttatgggaccttgtgatcatgtgagttaatactccttmgtaaactcccctttatatatatatatatcccattagttctgtccctctagagaaccctgactaatacagattttggtaccagaagtggttctagaggaacagaatattaaggatggagttcttttattggttttggggtttctggagttggctgcttaatgtgattagaccaaaaaatgctaaaggttctttttctttcttttttttttttttttgagatggagtctcgctctgtcacccacgctggagtgcagtggcgcgatctctgctcactgcaagctctgactcctgggttcacggcattctgccacctcagcctcccaagtatctgggactacaggcgaccgccaccacgcccagctaattttttgtatttttagtagagacggggtttcaccatgttagccaggatggtctcgatctcctgacctcatgaccctcccgccttggcctgccaaagtgctgggatgacagtcgtgagccacagtgcccggcctaagaattctatttctaatagtatggagaacacccatagtccttggcatgaactgtttagagagttatgcaaaataaatgcatctgatactcctgattcactgctcgtgagaggcaaggagtttagtgacttgaaacataatacctttgaccatatgtggagaaccaaggaacataataaagctggttggttgctcctacgttcactggacaaagtgatgaaagaaaaatgatgagctcagggattcattttcagcttcagaagtagtactgagcctcacacctgctagattaccctgtgtaagagtcttatctcctatagagaaagagctgaaattgtggaaaaatagacacaagctcttatcatgtgagtggctgacctgcaacgaaaggtgcatgcacagcctttccaggtgtctactgttaaagtgaggggattgactggaaaagaatgggaccctgcaacttggaatggggatgtgtggtggagggcctaatgaagctggggacactgagcttgttaactctgatgaaccttttttgccagaagaaacagcttcttcatccccagtagtggcaacatcccctccccaacacatgctgccatcagcctttccacctttgtctgaggagataaaccatgcgctgcctggaggcaacagtgatggcctcctctgaggcagttgccaggcaaaataacgttgattctcctcaggagccacccccaacacccctgtttgcttctagacctatacctagactaaagtcccagcagacccctagaggtgaggttcagagtgacccttgaggagatgtgctacactagaaaagaactgcttgagttttctaatttatataagcagaaatctggagaagagtcatargaatggatattaagggtgtgagataatggcggaaggaatatagagttggatcaggctggacttattgatttgaacccactaagtagagattctgcttttgatgttgcagctcagggagttaaaaaaggttttaatggttctaatagtttatttgcttggttagctgaaatatggataaaagatggcccactgtgagcaagctggaaatgcctgatctctctcagtttaatgtagaggaagggatccaaaagtttagggagattggatgctggagtggattggtcactttggacctacccatcccagctgggrgggtccagaagatacacccttgaccaacgctttgcgaaatggatttgtgatggcggcaactgcatctctgaagagtcctgtaattgctcttctctgtatgtcagatctaacggtgggaacaacagtcactccaccacaaaatttataggcccagaaacccttgaatgaaggggaggctgggtccccttgaaaaggaccccactatgctagtgactatttatgctgttaatatttctcccatccttccccaaggagacccccagtctattaccagggtaactgcattgaagaaagggaaatgatcagacattttggggactactggacactggctctgagctgacattgataccaagggacccaaaatgtcattgtggtcctccagttgaagtagaggcttatggagatcaggtaattaatggagttttagctcaggtctgacttacaggtctgacttccttccttggaaggaaatccagggacccaccctgtggtcatttcccagtgccagaatgcataattgccatagacatacgtagcaggtagccaaacccccacactggctccctgacttgtagggtgagagttattatgatgggaaaggccaaatggaaaccattagagctrcccctacctagaaaaatagcaaatcaaaaacaatatcacatccatggagggattgtggagattagtgccaccatcaaggacctgaaagtctcaagggtggtgattcccatcacatccctgttcaagtctcctatttgacctgtgcagaagacagaaggatcttggagaatgacagtggattgttgtaaacttaaccaagtggtgactccaattgcagctgctgtaccacatgtggtttcattgcttgagcaaattaacacatctcctggtacctggtatgcagccattgatttggcaaatgtctttttccccattcctgtccataaggcccaccagaagmaatttgccttcagctagcaaggccagcartatacctttgctgtcctacctcagggacatatcaactctctggttttatgtcataatcttgttcgaagagactttgatctctttcgcttccacaaggtatcacactggtccattacattgatgacattatgctgattggatccagtgagcaagaagtaccaaacacactggacttattggtgagacatgtgcatccaaccaaaattcagggaacttctacctcagtaaaatttctaggggtccagtggtatggggcctattgagatattccttctaaggtgaaggataagttgctgcatttggccccttctacaaccaagaaagaggcacaacgtcctgtgggcctatttggattttggaggcaacacattccacatttggttgtgttactctgacacatttagcaagtgactcaaaaggctgccagttttgagtgggatccagaacaggagaaggttctgcaacaggtccaggctgctgtgcaagctgctctgccacttggaccatatgacccagcagatccaattgtgcttgaggtatcagtggcagatagagatggtgtttggagcctctgggaggccctcatagctgaatcatggcagaggctgctaggattttggagcaaagccctgccatcttctgcagataactactctccttttgagagacagctcttggcctgttactgggctttggtggaaaccaaacctttgactacgggtcatcaagtcactgtgtgacctgaactgcctatcatgaagtgggtgctttctgacccatctagccataaagtaggttgtgtacagcagcattccctcatcaaatggaagtggtatatacatgattgggctcgagcaggtcctgaaggcacagttaagttacatgaggaagtggctcaaaggcagaagtggctcacttctgccaccctgccgtctctcccccagcctgcactaatggcctcatggggagttccctattatcagttgacagaggaagagaagactagggcctggtttatagatggttctgcacgatatgcaggcaccacccgaaagtggatagctgcagcactacagcccctttctaggacatccctgaaggatagcagtgaagggaaatcttctcagtgggtgggacttcaagcagtgcacctggttgtgcactttacatggaaagaaaaatggccagatgtgcagttatatactgattcatgggctgtagccaatggtttggctgggtggtcagtgacttggaagaagcatgattggaaaattgtgacaaagaaatttggggaagaggtacgtgggtggacctctctgaatggtcaaaaactatgaagatatttgtatcccatgtgagtactcaccaacaggtggccttggcagaggaggattttaataatcaagtgaataggatgactcgttctgtggacaacactcagcctctttccccagccatccctgtcattgcccaatgggyccatgaacaaagtggccatggtggcagggatgggggttacacatggactcagcaacatggatttccactcagcaaggctgacctggccacggccactgctgagtgtccaatttgccagcagcagagaccgacactgagcccacgatatggcaccattcctgggggtgatcagccagctacctggtggcaggttgattatattgaactgcttctatcgtggaaagggcagaggtttgttctcactggaatggacacttactctggatatgggtttgcctatcctgcacgcaatgcttctgccaagactaccattcatggactgacataatgccttatccaccatcatggtaatccacacagcattgcctctgaccaaggccctcactttacagctaaagaagtgtggcagtgggctcgtgctcatggaattcactggtcttaccatgttccttatcatcctgaagcagctggattgatagaatggtggaatggccttctgtagtcacaattacaatgccaactgggtgacaatacttttcagggctgcggcaaagttctccagaagaccatgtatgctctgaatcagcattcaatatatggtactgtttctcccatagccaagattcataggtccaggaagcaagggatggaagtggaagtggtaccactcaccatcacccctagtgatccactagcaaaatttttgcttcctgttcctgcgacattacgttctgctggtctagaagtcttagttccagagggagaaacgctgccaccaggagacacaatgattccattaaactagaagttaagattgccacctggacacttcgggctcctcctaagtttaagtcagtgggctaagaagggagttacagtgttggctagggtgattgacccagactatcaagacaaaatcagtctactgctccacaatggagataaggaagagtatgcgtggaatacaggagatcccttggggtgtctcatagtattaccatgccctgagattaaggtcaatgggaaattacaacagcccaatctgggcaggactacaaatggcccagacccttcaggaatgaaggtttgggtcactttaccaggaaaaaaaccatgacctcctgaggtgctgtttggtaacatgaagttcttcagtggtgatttctgagattttgttgcacccatcacccaagcagtatacagtgcacccaatgtgtagtcttttatccctcaccttcccatccttccctgcaagtctccagagtccactatatcattcttaagccttttgcatcctcatagcttaggtcccacttataagtgagaacatacaatgcttggctttccattcctgagttacttcacttagaatagtggtctccaactctactttattttgttcctttttgtggctgagtagtattccatattatgtataacatataccacatttaaaaaatctacttgttggttgatgggcatttaggctggtttcatatttttgcaattgcgaattgtggtgctataaacatgtgtatccaagtgtctttttcatattatcacttcttttcctctgagtaggtacccagtagtgggattgctggatcaatggtagttctacgtttagttctttaaggaatctccatactgttttccttagttgtactagtttacattccatccagcagtgtaaaattggtcctttttcaccatatccatgccaacatctattattttttgtttttttaattatggccattcttgcaggagtaaaggagtatctcattgtggttttgatttccatttccctgatagtgatgttaaacatttttaaattttttctgctatttgtatatcttcttttgagaattgtctattcatgtccttagcccactttttgatgggattatttgatttttcttgctaatttgtttgagttccttgtagattctggatattagtcctttgtcggctgcatagtttgtgaagattttctcccactctgtgtgttgtctgtttactctgctgattatttctttttctgtgcagaagctttttaggttagttaggtcccatctatttatcttcgtttttgttgcatttgcttttgggttcttaggaagtctttgcctaaaccaatgtctagaagagtttttctgatgttatcttctagatttttttttaatggtttcaggtcttagatttaagactttgatctatcaagttgatatttatttatataaggtgagagatgaggatccagtttcattcttctacatgtgtcttgccaattatcccagcatcatttgttgaatagggtgtcctttcctcactttatttttttctttcatttgtcaaagatcagttggctgtaagtatttgactttatttctgggctctctattctgttccactggtctatgttcctgtttttgtacttgtagcatgctgtttttgtgactatatccttatagtatagtttgaagtcaggtaatgtgatatctcaggatttgttctttttgcatagtcttgctttggctatgcaggctccttttgagttttatatgaattttaggtttgcttttgctagttctgtgaagaatgatgatggtattttgatgggaattgagttgaatttgtagattgcttttggcagtatggtcattttcacaatattgattttatccattcatgagcatgggatgtgtttccatttgttagtgttatctatgacttcttttagcagtgtttcatggttttccttgtagaggtctttcatgtccttggttaggtatattcctaagtattttattttattttttgcagctattgtaaaaggggttgagttcttgatttgattatcagcttggtcgctgttggtgtataggagtgctactgatttgtgtacgttgatttggtatcccaaaactttgctgaatttatttatcaggttaagaactctttggatgagtctttagggtttcctatgtatatgatcatatcatcagtgaacagcaacggttttacttcctctttactgatttggatgccctttatttctttctcttgtctgattgctctggccatgtcttccagtcctatgtcaaagagaagttgtgaaagtgggcatccttgtcttgttccagttctcagggggaatactttcaacttttccctgttcagtacaatgttggctgtggatctgttgcagatgacttttatttcctgaaggtatgtcccttctatgccaattttgctgaggattttaatcataaaggatgctagactctgtcaaatgctttttctgcatctgctgagttgataatatgatttttgtttttaattcttttttatgtggtgtatcacatttattgacttgcatatgtacctgcatccctggtatgaaacccacttgatcatggtgtattatctttttggtatcctgttggatttggttagctagtgttttgttgaggctctttgcagctatgctcatcagggatattggtctgtagtttttgtatgttatgtccttttctggttttggtaggtgatagtactggcttcatataattatttagggaggattccctctttctctattttttggagtattttcagtaggattggtaccaatctttctttgaatgtctgatagaattcagctgtgaatccatctggtcctggacttttttttggtcagcaatttttaaattactctttcaacaccactacttgttattggtctgttgagagtttctatttcttcctgtttcaatctgagaagattgtatatttgcaggaatttatccatttcctctaggtttcctagtttgtgcacataaagatgttcatagtagccatgaatgatcttttgtatttctgtggtatcaattgtaatatctcccatttcatttctaattgagcttatttgtatcttctctcttcttgattaatctcactagtggtctatcaatttcatttatcttttcaccgagccagtttttgtttcatttatcttttttcttcccttgttcgattctattgttgaaactttccagtgtattttgcatttctctaagtatgtctttcattttcagaagttgtgattgttttttctttatgatatctgtttctctggagaccttttcattcatatcctttattgttttttaaatttctttaagttggttttcacctttctctggtgcctccttgagtaacccgataatcaaccttctgaattgtttatttggcagttcagagatttcttcttggttcgatccattgctggagagctagtgtgatcttttgggggtgttatagaaccttgttttgtcatattaccagaattactttaactggttccttctcatttgggtagactgtttcagtggaaagatttggaactcaagggttactgtttagattgttttgtcccatggggtattcccttgatgagatgctctcccccttcccctagggacggggatttctgagagccagactgcagtgattgttattgcccttgtgagtctagccacccagcggagctactggcctgcaggctgatgctggggactgtctgccaagagtcctgtgatgtgatccacgttcaggtctcctagccatggataccagcacctgctccagtggaggtggcaggggagtaaagtgggagtccttggttgtagcttcatttagtgcactggctttctcaaatgctggttatgctagcagtgaagttgtcatgtgaacagactcagtacttctggttaaccaggatattgcaggcagtggaattagttgttttcttctttaggcagtggaattagttgttttcttctttagagcagggttgttcttttatcagtttgagttgattggtctccagccaggaggtggccctgtcaagaaagcactagctgcagtagcagaaggggggatataatattgccctacattggccaggatgagtacttgggtttctcaggtgatgggcaggaccatagaggtcccaagggtttatgtcatttgtctttggcgaccaggtctggtagagaaaatccatcaggtgaggacagggttagggtctgagctcagactctttttgggtggggcctgccatggccactatggggttctcaggctaatggaattatgttgccagggggattatgattgcctctgctgcatcatacagttcgctagggaaaagccagcactgacaggccttacccggccgggcgcagtcgctcatgcctgtcatcccagcagtttgggaggccgaggcgggcggatcacgaggtcaggagatcgagaccatcctggctaacacgatgaaaccctgtctctactaaaaatacaaaaaattagccaggcgtggtggcgggcgcctgtggtcccagctactcaggaggctgaggcaggagaatggtgtgaacccgggaggcggagcttgcagtgagcagagatcgtgccactgcactccagtctgggtgacagagcgagactccatttcaaaaaamaaacaaacaaacaaaaaaaacaccacaggccttacccatcttccatgaagccagcaaggccagtctcactcctactgtgcccccccaacagcactgactttatatcagttcctatccaggcagccggtgagcaggactgagatcttgccccaggctataagcctccctgctgagaaagcaaacatggctctcaggcctcacccctccccacctgctcacacctttggctgtgctcatatctgttcttcctgttcaccacccccaagctcctggattctgctcaggaaaattcatgcttgtcgaaaatattacaaagttcagccgggagcttccttcaccctgtgactcccctccagttctgctgggtgccttcccttccccaaagacctytgtgagataggccaggaatggcttccctggactcaagctggggactcgctctttccggtgcttcttttctcggtactattatattttgcttggctcctgaaatccatttcagctctaggtaaggttaaatccttctcccgtgatctgaattttcaggttcccagaggggatgtgtgtttggaggcagacatttttccctctcacactttgggaactcacagtttttggctgtttcacagaatttgcagtggcaaaccacttgtttcaaagggtcttgaattcttttggttttcccggtatgttcctgtggtggttcttggagcaaaaattcacagtgtgagtctccacatgctgttctgttcatccaagtgggagctgcatgttagtcctgtctcctatctgccgttttatctcagtttgccagataattatgtatcctaatccacattttgcttgtttttgataagtgttttcttaacatctatttatttatttttgcccaagtgtctaagaaaacaacgcctgtaaacaagatagttgaaaaaactttctccatttaattctattcgaagtaattgtatctggggtaaagtctgacattggtctgaagcagaactggggagtggaaaagctatacctggttaagtagtctctgtatctataatcaggtataatgatggagtccagaagcttactgagaaaatgagactgatgatattgtcatttgcatgctctgatgacacatggtttgttgatgtacagtaaacatagtaaatatggtaagtatcaattataaatcactagccgaggcacacacggcatgtttatttcatggctgctgctttataagcactgacattgtaactattggtggtgttgwgatgttaatggtagtactaggtaatgactaagtatatggaccctggagccatctttcctggttctgagtcagtcctccaccacttaatagccatttgagttgagctttagagtctttgttggtaaatgggtatgataatagtacctaccccactagggtcacaggcagtaacttttaactattattattgttgttgcagttaccagctggtataaacgtgtaagtatatgtagcatgaggcattgtagtatagtccaaaaaattcagaccttggtgttagactagattggtttctttcctcagtgtacatacttctgcttagttgtggcacctcaggaaagctacttcactttttggagctttagtttcttcctctattaaatggtatttactgtacgtgtttattatgaagataagagtgtatgagtgcctactttagaggctgatgtatagtaaatggttgacaaatgatacttttatttgttttagggttcatgggtttgcttaacaactcaggctgacatgggtccttagtcatgagaggtaaccctgagctgctgtttgctataaataaggctcagaatttcagtatgatcaaatagggtcagaccaacctggaaccaaattaggttggttgattggcctttggaatagttattttaaatgtaatttaagcctctataactttttttttttttttttggtattttctcttagtaagagaaaaatttttagtagacttttctttcttttttttttttttcagcatgcatgcagtttattcgccacatttcccccaggaactctctctggttagggaatgaaagaattgaaggaatgggggatgtacaggtggaagtaaaaggcacaccttgaacgtgctatgatgggttgaagggttgaaaagaggttggtctgaaattgatgagcctcccatttcagaagctcaggaagtttgtgtccaggaaatatgcatgccttcagccaaatcccttgcacctgayagagcagaagcaggcactgcctaccctggcctgggctgtctgctggctctcatgtcaggcattttctgggcctggctgtcgcagctagtgggatcactaacattgcatggccatggcgttttggcctaaacaaacaggtgaggcctggctctgtctacacagcagcaaaaaaggtgactgattagcaggagatctgtagtgcacaaataatgggagagggtgggcttgtcagcattagataatkactccaaaatgtaatgtaaactcacaaggagggggtgactcaaggctggacacatgactaagtaagaaaatgtgactctgtgagctgacccaacttctaaacaaacctcctaatacagtcacagtgtgtttcagtccccttgactctaaaccatcacagaagcagaaggaagaggaagtggtggactgcacagctggagcctggggactgtcatgactgtctagatctctgaggtcagagggtgtcacagcctcctcagaccctgaacctgggatggagagggggaacaggatatagattcccaggagggctgtccccaaggccctctccctgcctgtctggctcctcgggcctcctcttctaccgcttcttcttggtctctttcttgggcctcttgttcacagaaggaacagtagccttgggcttcctcgtcacctcagcacttctgagctcagatggttcagcctccacctcgtggaacttgggaatgggtatgatgatggccagcacacagatgagctggaagatggctcccaggaagagtccgtaccatagcaggttctccaggaaagtgggctcaggcacctccagaggtgagaagtctaggtcagaggccatggcccaagtcgcttgctgcctgaggtctcttctgactcaccactcttcagagccaactctcacgctgctgcccttctcccccggaagagtagactttgtaggtttacagcaaaattgaacagaaagtacagagggttctcacataacctcctacctccttgcatgcacagcatcccattcttcaacattccccaccagagtggtacatttgttagaatcaatgaacagacattgacacatctttatcagtcaaagtccacactttacattagggttcattcttggttgtacatgctgtgggtttggacaaatgtataatgacttgtattcaccattgcaatattgtaaagaataatttccgtgccataaacattctctgtgctctgtttattcattcttctcctctgcttaacctatggtaaccactgatcctttcactgtctccatagttttttcttttccatgtcaaaagacaaaattacaacaaatgtagttaaagatcaaattgttttttatttgtgattcatgaatcaggaaagcatccattctacaaaatacagtgagcactttcatggggccatggaagaatagtgggttttgtaaggaacaaagaaacagaacagtaggaaaaaaactgattgattaacatcagattacttcaggttacttttctagaaagggtaaaagcagagagaaccggccagtgtggtggcttacgcctgtaatctcagcattttgggaggccaaggtaggaggattgctagagctaaggattttgagaccagccttggcaacatagtaagatctccatctctacaaaaaaataaaaataaaaaattagctgggagtggtggcatacatctgtagccccagctcctcaggaggctgagctgggagggttgcttgagccccggaggttgaggctgtagtgaaccatggttgtgccactgcactccagcctgggtgacagagcagagcaagacctgtttcaaaaaaaaaaaaaaaaaatgcagagaggacttccttactcaggtgaacaggaatctcaagttttcaggaaaaactgccctgtttgyggatctacctccttcgttaaagtttcagtttgattaagtggtacttagcatgagtgactgttttggtttgatctggtctgctgaggcctagtataggagctcagtcaacaacggcctcctgtaatttttatttaacatccagaatgacatatagttgaaatcatacattatttaggtttttcagattggcctctttaagataaaattttaacctataaattatgtttgtgtcgaaaaaatatatctgggaagattgccctcttgaaccaacttgcagattccttcagggagctgggagaaaggaaggggacttgtgccccgtcaaccagatcatcagccagcccccgggcttagtgtgttgatgtgttgtggctgaattgctctcacaccttccttctcatgatatttttaactgtattggactaagtccacagtgtagagttataaataggtcttgggggartgacatggtcatgctaataattaggtgcctcttcaaccctgtgtctgtaaatatgtgttccatgtttgttcattggagaggccgagtcctgtgtgggagataagttggctgggcttggcacacggcatttaacagaacaaaaccttaccattaaccagaccttaaaagccagtttggtgattacgtgttgttttaaatctcatcagtcactctctcctctagtagcttatcaaaatatttcttccagtttggatcagtttctggcagatacctatcttgatcttgatacactcccactgatgttgtagtgcttcttacagatttgccctgggcaactgcctaactggccattgccagcctaacgtgttcatctggctcttacctgtgtggaacttagacagagttggcttttccttcttgacttggagttacggtccctaaggaaataacttggatctgtccctgacaaaggaggggaagcccctccatgcctgcacaattcccttctatatattgttcatggatagatgaactgaaaagatttgtttgccactttctgttctgcctcctgtcttgagtattcctctgggagataaagagtggaaagagtccagatgcggtggctcatgtctgtaatcccagcactttgggaggctgagacaggcagatcacctgaggtcaggagttcgagaccagcctgaccaacatggtgaaaacccatgtctactaaaaacacacaaaaaattagccaggtgtggtggtgcatgcctgtaatcccagctacttgggaagctgaggcaggagaatcgcttgaacctgggaggctgaagttgcagtgagctgggattgcgccattacactccagcctgggcaacaagagtgaaactccatctcaaaaaaaaaaagtgtaaaaagagtggaaagggggtaggagaagaaagacttaaggatttatgaagaggcagacttgggtctagacactcagatggagcaacatctatgaacatctaggaggccagtcatcttgggcaggggttagcaaacacgttcagtaaatagctaaatactaaatattttagacctcgagggccagatggtctccatcatgtctactcaactctgccactatagcaccaaagcagccatatgtaaattgcaaaggaaagggcatggctgtgctctagtaaaactttatttatgggcacatgtccattcttacttagcttgctagccacacagagacatgtagtgagctgaatgtggcctgtgggtggcagtttgctgacctgaggtaggataatataagaaacctgatgttaataagttttgaagtatctctgctgcctgtgtattctctgtagagatccttttcatgctcacttagctaagtgaaaaataactggaaatgctaagtgaatccaatgagcggaagggagttgtgctgacttttgggcagtagagaagtattccccctggaggctggctgggatagtggcgcaaacagcacagtgagaaccacagggcaatgagagactgctggctacacaccacagattcagtctttcattctctgctgatactggtggttttgtgtttggttttaaaaggggaagccaatcttttttttttttttaattctttcagcaaggcaatttacttctgcagaagggtgccacttgcgtcaatcaagatcgcaagagcacagagaacaaaggagaccagggggtttttatcctcaacgcagtccctatctctgtgctactcccccttgggctggggttggactgcacagtttgagctgacccaattggctacttgtacatatttttttaaatatagaaggggagggggacagaggtggagcgtgtgagatgtgcagtttcaggggaacatggggtgcaggtaaccaagggaacagatgtgagttattgattagagctgacgggaagcgggtaggctgtttatggtaactaggcgcaaggaagaacaagatagttgagtttgaggacaaagkataaggaaattaacaagctaaaccctataagagaaactcagaaagacttattgtgtcttacctgacagttgaagaagcatctatctgtagggaatccagaaggagcgttcatgaaggtattacaagcccggaagaagcacacgagcactgagctgactactgagctggaggcggcctcagacagcaatggcatcaacttgtcaggctttgggagtgagcagctagacatcaatgacgcactaaattacgtcttgccttatttctcatagaaaaatctataagatgtagaatcaatgttgttactgttagggacgagctgccccaggaaccgcccccgcagtgcagctgacccttaccccgaatactctgcagctgcattcctgaacccttatctaggtgccacagcaaggttgccgacttgctacactaagcaaaccctgcttacagccctccaggtggcacagggaaggtcatgagaaatgtggataaatctaagttataccctcttgtaaattcctccggtcatgagacgatatgtggtaaagttaactgaaaagaccaagaagcagcttctccactccttctgggatctctatctggttcggccttcctgcccccactcctgcctccaccatgtccatcagggtgacccagaagtcctacaaggtgtccacctctgggccccgggccttcagcagccactcctacacaagtgggcccagtgtccagataagctcctcaggcttctccctagtgggcagcagcagcttccaaggttgtctgggcggaggctatggtgagggcagcagcgtgggtggcatcaccaccatcacagtcaaccagagcctgctgagcccccttaacctggaggtggaccccaacatccaggctgtgcgcacccaggagaagcagcagatcaagaccctcaacaacaagtttgcctccttcatagacaaggtatggttcctggagcagtagaacaagatgctggagactaagtggagcctcctgcagcagcagaagatggctcagagcaacatggacaacatgttccagagctacatcaacaaccttaggcagcagctgaagactctgggccaggagaagctgaagctggaggcggagcttggcaacatgcccgggctggtggaggacttcaagaacaagtatgaggatgagatcaataagtgtacagaggtggagaatgaatttgtcctcatcaagaggatgtggatgaaggttacatgaacaaggtagagctggagtctcacctggaagggctgactgacgagatcaatttcctcaagcagctgtatgaagaggagatccaggagctgcagtcccagatctcggacacatctgtggtgctgcccatggacaacagccgctccctgggcatgaacagcatcatcgctgaggtcaaggcaccatacgaggagatcgccaactgcagccaggccaaggctgagagcatgtaccagatcaaggatgaggagctgcagatgctggctgggaagcacgaggatgacctgcagtgtacaaagactgagatttctgagatgaaccggaacatcagccagctccaggctgagactgagggcctcaaaggccagagggcttccctggagggcaccatcacagatgtctgcagcacagggggctggctgttaaggatgccaacgccaagctgtccaagctggaggccgccctgcagcaggccaagcaggacatggcatggcaactgcttgagtaccaggaactgatgaacatcaagctggccctggacatcgagatagccacctacaggaagctgctggagggcgaggagagccagctggactctgggatgcagaacatgagtatccatacaaagaccaccagtggttatgcaggtgatctgagctcggcctgtgggggcctcccaagccccagctttggctctggtgtgggctccagctccttcagccgcaccagcaccaccagggcagtggttgtgaagaagatcgagacccatgatgggaggctggtgtcctagtcctctgacgtcctgcccaagtgaacagctgcggcagcccctcccagcctgcccctcctgcgactctcccagagagcagaagggagcacagggaacgtgagacccacctgaggcccagccctagccctcaacccacccacagggtagtttactacctggggaccccccatgcctatgccttcagctacaaaacaattcaattgctttttttttttggtccaaaataaaacctctgctagctctgccaacagctaaccttatagttacctgtttttttcaaatgtgaaagatgggtattccgaaaaaccatacaaagagtccctctcttcaatctgcatccaaaaactcatgaaattagaaactgtccaaccacaggaaaacagcctggctaagattcaaagtgtaggcaaaagcctgcagagagtgaacagaatcctcatgggcccaaggagcatccagaaaagtcacttcaaagaggtgggaaagcagagcaacaggaaggaacagggtgcctgggcatttgtggagaatgctgccaaagaaaaaaggctcaggagtccagccccaagggagctggaacagcctcacatagagcaggggcatgagaagttagcaggaaacgccatctataccaagccttcgttcaaccaagagcataaggcagcagtcttctctttgctgaaacccttctccatgggcgtgccttctatctccacccctgcaaaagccctacctgtggtcagaaacagattgaaagacttacccattttggttttagaaaatgcaaagttgagttaaaaccaatcgtacattccagaaaagttctctcagtagactttgcttgcaaagaggcctccattctctgcagtgaaaagcctcataaatgccccttcacaaggggctttttcatctttaggagacctgagtcttcaggaaaatccttttccggaagtatttctccatcagaatgttttaaaagcaccactgcaagaaatgcctttgaacaaaacatttttatggaaaacactactatgccagaaggcaccatctctgaaaacacaacctacaaccatcctcctgagggagattctgctgagactgcgttcaacttagagaagactgtgaaacacaatgggaatacaacaacatgggcactggcctgtctcccgagcccaaaagcttcaattacccattgctctcgtccccaggtgatcagtttgaaattcagctaaaccagcagctacggcccctcatccccaataatgatgtgagaagactcatttctcatgttatctggaccttgaagatggagtgctctgagacccatgtgcaattggcctataccaagctcatctccaggacaggcctcctgattcatcagtgagcagcaagaagtaaagatgtccaaggcagaatgggatacagaccaatggaaaactgagaactatatcaatgagagcacggaagcccagagcaaacagaaagagcagaagtcaagtgaggtgaggaccacacagaaacatgaaacccagattttcctatcatttagcatcttccaggaaagtgcccacacaggagaacctgggactcccagaccatagtttgtcttggccatgtaacttcagccgtgacagtgatctcccactttgctcatttagagagtgaaacaggttagtacacaagataaactgtaggccggacatgatggctcatgcctgtaatcctagcactttgggaggctgaggtaggtggatcacttgaggtcaggagtttgagaccagcttggccaacatggtgaaaccctgtctccaaggggaagccaatcttaatgcccaccaattttctttgataatgaagctgtattatttatatctcagaggattatttcatttcaggtaatttgttggaattttcccttcacatttttcagtattaacgatctgtcccctctttgtactactaggctaaaagttcgttaatttttaggtgataaatagctgttgttaataatttattttatgtttgttttattaatttatttgtgcatatttaaccatctaccataatttttaccttgtatcaacaggattcttactacagatttaatgaccttaactacagatgggtctctttggataactggacctatagcaaagaatttaaaatcccctttgaaattaggtatgtatgtttgtgggtgtatttttattattatttgaacttttcttctttttctatctgggcaaaaatgttgtgttttgtttgttttttttttgttttgtatgttttgttttgttttgtttgtttaggttacatatctgagagttaagtaagatgaaagccttgtactataaaagtgaatatattatttatgttttgttttgtatatgaggatggtgctactaatcaacagtcaccaaattgtgtcttatggagtcatttttccagtggttatgccctatgtagtgctaaccagccattgagactatgaccttgacctatactatgtggtgaagccaggaggtgaagcacagatactgttttcagtaatgttctgttattataagcaaatatttccatatgaggtagaaygttacccaaaggtaccaccactactgctaaatgaaaaaaaaaatccttctgtcccttttatgtgattttttttttttggtaattatttactagtcttttaaaggggggaaaaggccagaatattgttatcaatatcatggagttactgctgtgctccaggcttttatttacagataatatttagaatatctttcgtaatggttctatttcaccttgaactcaacatatccaattgattttcccccttaaaactaactttatattctaacagcttcattgtttttcttratgtaacaccattttccagtctatgtctaaggtgctttgggcttattacatcttttcttcatcttcctgtgttcagtctgttctgggtgggtcttgcaaatttttgtttaacatttctcttggtttggccccttccatctcatttccatctttccatctttgcctagaagagtgccaggaaagaggccaaagctgcctaatcaaatttcttgctttgttcttttattctccaatcttttcaatttagaaacattagattaatcatcacagaatattgattgtgccaagataggtattcgttcaagaatagcaagtgtctattttacttggcaaatcaagtataaacttctcacttgtctgtgaaaatacagctgaaagatgtctgtccctgtaacactgcccgcacctctctgccccttggatttgtccagctttttcctccttagctccccagcccaaattacacatatgagtcgattacctaaaagtaattcatgctgtcagcacttccttgttttggttttgctctttgcaggggtaaggggttcctgcaaagagcaaagggtataaggggagtagaaatgcctccacccagtcatttctacctagttttaaaaaaaatactttattgatatataattaacatattgtacaattcagtcatttaaggtatataattcaatggtttttagtatacttacagttacaaaaccatcaccacaatcaattttagaacattttcctcatccccccacaaaaagttacacccattagcagtcatttcccattgcccactcctcctgcccctgaattcttaccccagccctaggaaccactaatttactttctgtccctctggatttccttgttctggatacctcatataaatggaatcatacaatatgtgggcctttgtgaccgcctctttcacttagcataataatgttttcaaagttcatccatgttgtagcatgtatcagtacttcattcctttttattgttgaatagtattttattgtatgaatacaacacattttatttattcttctcttcattaagttcttgtttccattttgaaatcttttcttatgagataaactctgatagcacttgtagttgttcaacaatattgccagccagccaccaaatgccaaccagattgcagactccttaagtacaggcactgttatagtttcctgtaaggcttagcagagtgctgggtgcataatattcacttatagatgatagttttctaacgtgttctcttagacagggtcagtaaatgtagtttgtgagaacattttatgtctattatttaacttggttctcatttttttttttttttttgagacggaatcttgcaagtgcagtggtgggatatccactcactgcaacctccgcctcctgggttcaagtgtttctcctgcctcagcctccctagtagcttggattacaggcacccgccaccacgcctggctagttttttgtaattttagtagagacagggtttcgccatgttggccaggatggtctcgaactcctgacctcaggtgatctgcctgcctaggcttcccaaagtgctgggattacaggcgtgagccactgctcctggcctaacttggttctcataatagctttctgaagtattaactagaaaaagtcaatatatttggaaattataagttgtgctcttggttttatggtgatttattgatacattatagagaaagataagctggatcactcaaaggacgtaagtatgttttaaagcagtacttctgaaaatgtcactggaaactgccttttaagaacatatattttttgtggaatatttatttctttaggccttaaataataaaaaagagacttatctaagttaatgctttacacatcttgttttaaaaatcttttcttttttttagcaaatggcaaaaagtaaatttgattcttgagggagtggatacrgtttcaaaaatcctgttcaatgaagtcactattggggaaacagacaatatgttcaatagatatgtaagtatataatgacattaggttaaaaaaaatttatgtgtgtttatgttaattgcttttgtgagtagagaaaagtaaatgcataattggccatgtgacaaatatgagctcattaaagcactggatgagttacttgatttctcagttgccacatttgtggaataatggaaaccttacaaaccccatggggttagtgtggggatttagtaagctaattgtataaaatgttggcaagttcttggcacataggaagtgttcaaaacatgccaatccctcctctgctgatacagtttcattggacaaatgattttaaaataaaatgtcatttcctttctggaatagttatattaagagattatatgctgatcttcctttcctttcaaaggtagacttttcaaaacaaaaataactcattacttagaaatgcatgctgttcataccggagaggcaggttgtcatgaagtgtctaggaaacccttggcagttcaaggccacatataagtagacagagcagacattccagagctaaagttattttttgctctatccatttccctaggaccatcattttgccaggaaaaatagaaggagaagcctagaaacttggattgggtaggaaaatatgcttagttttaactaaaagtgggcaactaagtgatagatactacagtgtttcagagaagtgttccctcctgcaaggaggctaaacctagatcggcattatattatgtgtctttcatacaaaatgcctttatctaaaattttacacacaagactacttccacatcatgggtttgtctgattgttccctttaacttagagctttgatattaccaacgtggtcagggacgtgaactccattgagctgcgtttccagtcagcggtgttgtatgcagcacagcagagcaaagctcacactcgctaccaggttcccccagactgccctccacttgtgcagaagggtgaatgccatgtcaactttgttcggaaggtaatggtctctcaaacaggtcgggttttatttttgaggacggggtgtgctggcatatgaaatgcttatttgaagactcccatggcatttcagaagttaggaatctctttcctgatcccttagtggggtttgaaaatttgaaataagaaccaaaagattatttgaaatattgtggagaatctttatctttttctaagttttcttcctgaagcgtgttcagaacttaggtaacagaaaaagaaaggaaaaatatgtggctgataatggaactttacaaattatttttttaacatttaagtttatcaaacttttcaccagattgtgaaaatgtattagtgattcttgtttctaggaagccctctgcaaatattagtatatttgatgatatgttcttgcatcttactgtcaggttctcataaaatctaacaaaaagataacaaagtccacaaaagtaattatttttcttagagtatgattccagtctaagaggacttggatctattttactacatgattgaatcagtattctatgtgacatttggttttttaatgtttatttcattttacttcatattttaaaaattttaattgtataaactgtacataaaatttatcactttaataatttttaagtgtacagtttagtagtgttaagtatatttacattaagtaaccacagagctttctcaccttgcaaaactgaaactctacccattacccattatattatattatacccattattgtttaaacaatagctctccatttccttctccccagccccttgcaaccagcattctactcttttcttttctttctcttttttttttttttttttttgagactgggtcacactctgtcgcccaggctggagtacagtggtgcgatcacaactcacygcagcctccaccttctgggctcaagcgatgctcccacctaggtctcttgagtagctaggactacaggcgaacaccaccatgcccagataatttttgtattttttttgtagagacaggattttgccatgttgcccaggctggtctctaactctaaggctcaagcaatctgcccactttggcctcccaaagtgccgggattacaggtgtgagccaccatgcttggcccattctactcttttctatgtgtttgattcccctagaaatgttatataagtggaatcatacagtatttgtctttttgtgactgacttatttcacttagcataatttcctcatgattcatccatgttgtagcatgtgagagaatttctttacattttaaggctgaataacataccattctatgcatataccacattttgtttatccattcatctgttgacggacgtttaggttgcttccaccttttgactattgtgaataatgctgctatgaacatgggtgtacaaatatctttacatgacccttctttcagttcttttggatatattcccagaaatagtatggttggatcatatggtaattctatttttaattttttgatggattgaatttatttatttatttatttatttatttawgtatttgagatggagtcttgctctgttgctcaagctagagtgcagtagcgagatctcggctcactgcaacctccgcctcccgtgttaaaacaattctcttgcctcagccccctgagtagctgggattccacgcatgcactgccacacttggctaattttttaatttttagtagagacggagtttcgccatgttggccaggctgctcttgaactcctgacctcaggtgatccacccgcctcggcctcccaaagtgttgggattacaggcgtgagccatgaaatttagttttaacaacaaatgtaatgattgggctcattgtgaagatactaaacatattttcccaatactctttaggtagaactgttacattagctaatatgttctgattaaattaaatggctctttttcagctggattgatttactattaaattatgtttccttaatataagtactaggattaaaattatacctcctcctgtttgattcaacctacctaaacttgtgtcaatgacccattgaccatttgttcaaattactgtaataacagccttagagtattgctttgacaattttcagtagtcaagtattccatggaatatttgtctgcttataagtctggataagatttatcttttgattcttttgcctttggcttccaatgacacagtggtttaaatgctagaggttgtactttttccctctccccttccttttttttttttgagatgaagtctgactctgttgcccaggctggagtgcagtggcatgacctcggctcactgcaacctctgcctcccgggttcaagtgattctcctgcctcagcctcccgagtagctgggattacaggcgcctgccaccatgcccggctaatttttgtatttttttttttttgagactgagtcttgctctgttgcccaggctggagtgcagtggcacaatctcagctcactgcaagctccgcctcctgggttcacgccattcttttgcctcagcctcccaagtagctaggactacaggcgcctgccaccatgcccggctaatttttgtagttttagtagagatggggtttcaccatgttggccaggctgctcatgaactcctgacctcaggtgatccacccaccttggcctcccaaagtgctgggattacaggcgtgagctactgtgctggcttccccttccatttttaacctttatcaaaactgaaactatcctggatcctaatgtgaaaagttacttttcaagtcatcaataaagataatataaatgttatacatatatccatatgctattttgctccaccctctattcaatttgtggcatttaaaacatactctcaagttatctagatagaacatagccctttgtcactaacatcaggaatcagatccagttttctgctatcacaatgttttggacactaacctctgggtaggcttccagaacaattgcaagttgcatctaggtatttctgactagattgacatggtccagtgggaagacacctgagttggagaccaagtgaagagtcttgggtctgaattctggctttgtgaacatagaataacttgaggtatgcccgtcatttgtacatggagctaatccctgatatgaagatatagtgaaataacaatgtaaatgcactttgcatgttgtaaagtgctatacaaccattcaaaaagtagagtggtgatatctattttggaggcttattactataattacrggtaatgaacaagatgctcagcttaggttatatgaagttagtggggtctttactttaatctcttaatcctgttatcttcataaactgagactgtacatcacctcaggaccactattgtacaaattgattgtagaacatgtgtgtttgaacaatatgaaatctgattgtaaaatgtgtgtttgaacaatatgatcagtgcaccctgaaaaagaacagaataacggcgattttcagggaagaagggaagataaccataacatctgactgcctgtggggtcaggcagaatagagccatatttatcttcttgcagaaagcctataaacggatgtgcaagtaggagaaatatcgctgaattcttttcccagcaaggagtaaccctggggaaggaatgcattcctgggggtaggtctgtagacggccaccctgggagtgtctgtcttatgcggttgagataaggactgaaatacaccctggtctcctgcagtaccctcaggcttactaggattgggaaattccagcctggtaaattctagtcagactgattctctgctctcgaaccctgtttcctgttaagatgcttatcaagacaatgtttgcacagcgggacatagacygtcatcagtaattctaattttgccttgccttgtgatctttattgccctttgaagcatgtgatctttgtgacttactccctgtttgtacaccccctcccctgttaaaatccctaataaaaacttgctggttttgtggcttggggtcgtcatcacggtcctaccaatatgtgatgtcatccccagaggcccagctgtaaaatttctctctttgtactctttctgtttatttctcagactggctgacacttagggaaaatagaaaagaacctatgttgaaatattgggggctggttcccctgatattctctttcaccagttctttgaacctccactttccctgtagcaacctaagtcccctattgtctctgcttccttttctgtccagaatggatagtgggactcatcacttctgctaccctcttaccagtgtttgatgccatcttccttgttttccgtttacatctctggccgttccttgtaagtctctttatccacatccttgttctcctaaaagttatattatagggcctttctctgttctagactcttttctcattttataccctctctaggctatctcatttttcatttcttccataacaaatctatttgccattgtctcccaatattgtgtcttccgtccaacttgtcttcaattccagaccttacattcagatgcttatttagcatcatcacttgtctgattcacagggacctaaagctcagtatgcgccacaccgcacttgtgatttaagtccttctcccagggttctgtctcttgctgaatggaatactatccacaacaggtgctcaagccagaaacttgagtttttcttgacacctttctctcctttttctctcttccaatctattgcttagtcctcttgatgatgtgaatagtacctcttcaatagctcttcagtctgttcacatttcatttctgccactgtgtcttgagttcagtcatgccttgcatgaaatattgccctggttgcctaactggcatccctgaaacttcacttgccttcctctagttaatcatttacagagcagctagaatggtcttttcagaaaaaaatgatcacagcactgcttttcttcaaactcttcaacagcttctcattgcctttaggccagtgtccatgggtcttagctctgtctggcccatgctcacttctccagtcatctccctgcctcttcccattgttctctcttcagcttctggaatgcatcagactgtcctgcacctccagacctttgcacatgctgttccttctgaaaggaatgcttctgggccggcacagtgactcatgactgtaatcccagcactttggcaggccaaggcaggtggatcacttgagttcaggagcttaagatcagcttggacaacatgacaaaaccccaagtctaaaaaaaaatacaaaaattagcctgtagtccctgccactcaggaggctgaggtgggaggagcctggaggttgaggctgcagtgagccaagattgtgtcactatactccagcctgggtgacagagtgagacatctcaaaaaaaaaaaaaaaaagttcctgcctgctcacagtggataaacggtactcacccttcagggtcttttttttttttttcaggaaaactcatcttgatacccatcctcctcaacctctcactgtatgttccctgcctatttccattgtaaaactcattatacttgtaattatttattcaatgcttgaatttcgtgcttgactgtgagcattataagcagaagagctgtgtctgttgtgtatattgaagtactcccagcctgaaacatagaaggcacttaataaatacttcttgaagaggttaagagtgatttgtagctcttaatggggaaaatagtctccctcataagatgttgattattttgctctccttcttttccctatctccaatgaaaaaattacaaatagatactaaaattctcccataaatgtccccaagatggttttcattctgaatatgagaatctggtgcttaagtggtaaatttagacagatgtggatgctataaagtaactttagttctttgtttttctccatagtaaaaacaaatttgtctctatcttaggtgagtacagagctaaggaaataatacccaaatgacaacagtttggccaaatcttcaggttctatttcacaaatgactccatctagaaggattttagtatttcctctggtgcttgttactttttttccccccataaaatgtatgacccaaacttattcctttttaaaagctgaacttatagctttacacattttaattaactgttctgaaaatatttttttcttttaagaagtagaaattagaaaacattctgtgtgaaagggatttattttacagaattatttcttatttttgaatttgaactctgtaacttaatatggaagttgagtgtcatcaagggagagacaggtacccaggtcaaataagattggataaaatgtctgccttggccacctgtttcaggggctaaagatcgaactgattgcttttgggcttcacgttcagaaacaaggacttytgaattcatacctgaggttggcaagtttagccagagctttttaaaacctatttataagtgtttgtctttcaatatgtttcctcattcttttttttttttttttttttttttttgagactgagtttcactcttgttgcccaggctggagtgcagtggtgcgatctcaactcactataacctccgcctcccgggttcaagcgattctcctgcctgagcctcttgagtagctgggattacaggcatataccaccacacccaactaattttgtatttttagtagagacggggtttctccatgttggtcaggctggccttgaactcccaacctcagatgatccacccgcctcggcctcccaaagtgttgatattacatgcgtgagccactgcgcccggcctcctcattctttttaattattacatgtaagcacaatattctttgtaactattagatttaaatacaatggttaggttcagagatattatagagaaatttaaagaggaactattgagttgcttcaatgtagtaagcatttgaagaataaatgtacaactcttcatagattttatgttcttagaacatttctgccaaatttatctgtttcataggttacgtgcaacatagatatattggatatattggatattgtatcagttatctattgtgatgtaacaaattatgccaaaacttatcagcttaaaacaacatttattgatgagaacacatggacacatagaggggaacaacacaccctggggcctgccagaaggtggagggtgggaggagagagaagatcaggaaaaataactaatgggtactaggcttaatagctggatgatgaaataatctctatgacaaacccccatgacacaagtttacctatataacaaacctgcacttgtacccctgaacttaaaagttaaaaaaagaaaatatgtggactataggttttctgatttctaaaaaataatataaacaaaacatttattatgatagcttctgttagttaggaatctgagttgagtgtggctcagctgggtgcctctggcttaaggtctcatggctgcagttgtctcaaggcttggctcaagttgactcaaggctgaagagtctgtttctgagctcacttgtagttattggcagacctcagattgcccatatgggtctctccgcagagctgccccatgacacagaggctggcttccctcttggccaagagagggcatgagagagtacccaaaattcaaggcttagtctcttataacctaattaataaaatcacatcatttttgctatatgctggtggttagaagtgattcactaggtcacttcaaaggggggatcattgtgggccacctcagaggctgtgtatggtggttggggggcacacacagttttgcactaacttgtggtccccccaaattcatatgttgaagtcctaacctctggtatctcagaatgtaatcatatttggagaaggtctttaaggggtgattaagataaaatgaggcagttagtgtgggccctattccaatacaactagtgtccttttaagaaggggacatttggacaatggagagagacaccagggatgcctagcacagaaaaagaccatgtgaggacacagtgcaaacagaggagatcggcttcaggaggaaccaaacctgctgatagcttgatcttggacttcactgtgagaaaatacatttccattgtttaaaccacttagtttgtgatactttgttatggctgccatagcaaacttatatacacatatgtaacatttttaaagaaaatgtttttcataatgtttaaatttcaccataatcagaatatatcttctttttctccttgaaattgcaggagcaatgttcctttagttgggactgggggccttcctttcctacccagggaatctggaaagatgttagaattgaagcctataatatttgtcacctgaactacttcacattttccccaatatatggtaagctgaaagatgtgatttttttttctttttgagtcttcttgttataaaaattgggtttataattgaaatacagaggtatgtttttcagagatttagaatttttaaaaactttgtggtacaatcaatttataaaagtaaaaaataggtacaaactgattttacatgaaaattgacaatataaagcagatatgtaggtaggtatcttttagcatattttacagaaaaaggaaaaaataaaatggaagagcagcgccaagttttcctgagataagtattctttcttgaaagaactgggcctgctggctgtgctcctttttgctgcctctgtagtcacttttagtgtcaaattcttgctttgctcacaccgttagactggctttctgtctctgtacattttcttcataacccrgagcactactctgagggccctgacacaagggccctgacacaacagccttgtgaagagttaaaaataaactggaaggtaaacagggcaaaagaaagatttcttttcttttctttttttttttttttttttgagatggagtttcactcttgttgcccagcctggagtgcagtggcacaatcttggctcactgcagcctctgcctcccgggttcaagcgattctcctgcctcagcctcctgagtagctgtgattacaggcatgtgccaccacgcccagctaattttgtatttttagtagagatggggtttctccatattggccagtctcgaactcctgacctcaggtgatctgcccgcctcagcctcccaaagtgctgggattacaggcgtaagccactgcgcctggccaaaagaaatatttctaaggtgaaaaatagtactttttaagttgaagcaactattcaatatcaaggagcattgaaatagaacctcagaaatctcacagatgtcagtggataagttaaaagctggttaaatatttgttgctttctttgctcagcgctgtgtttatttgataaaagaaatagagtaggtacactgatcccttcatgtgtggggaggggagatacaaacaattaccaaacaaaacaaataaccttccaagataagagccagaaaatcaaagatcagtgaggatttgagaagttagggaaatgaaggatgaagatggaggcaagtgagatcttaaatgagagcgtgcaatgctcagtgtaatcacacggaggcctaactagatgaaatcagtaagaaagaatgtggtgtgtcagttcaagagttctgttatcttgagagccctggtgaccttagcttgctattcaattgagccaaatctgtattttctgaaggcagaagatgaaagcaaatgatagatgcttagatttgaggaggttatttggtgctgttgrtatttttaaactttaaaaaggcattaaaagatctaatttaaattgcacatgtaaatgtggctgtgcttataattctctagtttagtgcttcccaaactattcttctgaggtgtaatccaactaaagattttcgctactaaaatcaaataatggtttaatctcccttcatcccatgctaccacccatacgttttctcaggtataaataacagaatctggtgtgagaagtggtctgagctgagcgcagtggctcatgcctgtaattccagcactttgggaggccaaagtgggtggattccctgagcctaagagttagagaccgacctrgacaacatggcaaaatcctatctctgacaaaaaatacaaaaaatacaaaaattagccaggcctggtggcgttcacctgyagtcccagctactcgagaggctgaggtggcaggatcgcttgagctcaggaggtagagctgctgtgagttgtgattgtaccactgcactccagcctgggtgatggagcgagatgctgttwaaaaaaaaaaaaaagtggtccgatttagcaaaaagttatttatttattttgaagcttaatcagtattttgggtggtctgcaaaatgcattataagctctgggtaccctgatgcctgaaaaaaatttgaataatactgctctggtttaatttacaatttgaatatgaaactaaacatttcttcctgagttattagagttcactttattagtcactagtgactgagtgaattttatatgaattaatttaaatgatgcttaaaattcaatttagattcagtgtaaacagttcctcctctcaactacattggtgaaggttaaatacattttttaaattgacacgtaatatttgtacatatttatggggtatgtgtggtattttgttacatgcatagaatgtgtaatgatcaagtcaaggtaattcgggtatctatcacctctagtatttatcatttctctatgttgggaatatttcaagtcctctcttctagctattttgaaatataccatacatgttgttaagtatagtcacactattatgctgtcaaacattagaacttattccttctatttaaatgcatgcttgtacccattcatcagcctttcttcattcctctctgccactcatatacccctcctagcctctcgtctctattatttcactctctacctccatgagatcaacatttytacctctgacatgtgagtggcaagatgcaaaatttgtctttctctrtctaatttcacttaacataatgacctccagttccatccatgttgctgtggaagacatgattttattcttttttagccattcatctgttgatggacacttaggttgattctatatctttgctattgtgaatagtgctgcagtaaacatggggtgcaagtatctttttgttatactgatttctttttctgtggatagttacctattagtgggattcttggattgtatggtaatgrctctactattagtttcttgagaaatatagtatttccattgtggctgtactcactcatattcccacaaccgtgtataaatgtttcctcttctctgcatcctctccagcatctattattttttgtcttttcagtaatagtcattctaactggagtaagatagtatttgtggttttgatttacakttccctgatgattagtgatgttgaccatttgtgcatatacctgttggccatttgtatgtcttctttagagaaatgtctattcatgtcctttgcccacttttaaatggggttatttgcttttttactgttcagttgagttccttgtgtattccagatattagtaccttgtcaaatgaatagtctgcaaatattttctcccattcaacaagttgtctctacattctgttgaatgcttcctttgctgtgaagaagctttttagtttaatatagtactatttgtctatgtttatgtttgttatctttgcttttgaggtcttagctataaaaatctttgtctagatcgatgtcttgaaatgcttctcgtatgttttcttctagtagttttatygtttcaggtcttatgtttaagtctttaatccatcttgagtttatttttatttatggtgagagataagagtccagtttcatttttctgcttatggatatccaattttccccgcaccatttattgaagaggattgaagagggtattctttctccaatgcatgttctctgaccaagatgcctttgtgaaaaatcagttagttattaataagttggtttatttctggggtttacactctgttcctttggtttatgtgtctgttttcaggtagtgtgatgccttcttttgactcaggattgctttggttgtttgagctcttttttggttccatatgaactgtaggattttttttctatttctgtacaaagtgactttggtattttgatagtgattgcattgactctgtagattgctttgggtagtatggtggtcattttaatgatattaattcttccaacccatgagcatgggatgtttttcgatttgtttgtgtgacctcttcaatttatttcatcagacgtttatagttttccttgtagaggtctttcacctttttggttacatttattcctaggtattttattttttgtagctattgtaaatgggattgccttcttgatttctttctcagctagttcatcattgatgtgtagaaacactactaatttttgtatgttgactttgtgtcctacaaatttgctgaatttatttatcagatctaagaatttttttatgaatcttccaagtttttgcagatgtaagagcatgtcatctgcaaagaggaataattttacttcctcttttccaatttggtaccttttatgtttttctcttgctttattgccctggataggacttccagcattttattggataggagtggtgaacgtgggcatctttttcccattctagttcttagaggaaagactttcagctcctcctcatttggtgtgatgttagctctgggtttttatatatggcttttattatgttgaggtatgctccttctatgactaatttgttgatagtttttatcatgaagggatattgaattttattaaatgctttttctgcatctgttgagatgatcatctgttttctgtctttcattctgttgatgtgatgtatcacgtttattgatttgtacaaatgtaagatccttgcatccctgggataaattctgcttgctcatggtatattatctttttgatatactgttggagttggtttgctaggattttgttgaggatctttggatccatgctaatcagggataatgagctatagttttcttttctttccttttatttatttcttgttgcctctctgtgtggttttgatatgagcgtgatgctgacctctrgaatgagttagagagaattatctcctcttcaatttttggaatagtttgtgtggaattggtattagttcttcgttgtaactttggtaaaatttggcagtgaaggcatccagtcctggatttttttctgttggaagattttattgctgattcagtcttgctacttattattagtcgttcaggttcactatttccttccttccttccttcctttctctctctctctttctctttctttctttcttttttttctttctttctttcttccttccttcctttctttttcttttcttttcttccttccttccttccttccttcctttctttttcttttcttttcttccttccttccttccttcctttctttcttttctttctctctctctctttctttctttcttcctttcttttttcctttcctttccttttctgccttgccttgccttttcctttttcctccctctctccctcctttcctttcttttcctttccttcctgacggggccttgctatgttgcccaggctggtttccaactcctgttctcaagcaatcctcctgccttggcctcccaaagtgttggaattacatgagccactgcgcctggcctctatttttttgtcagtcagtattggcaggttgtatgtgtccaggaatttacctattttctctatgtttttcagtttgttagcgtatagtcgttcataatagtctctggtgatctgttgtgtttctgtagtatcagttgtaatgtatcctttctcatttctcatatatatattttgtatataataatatacaaaatattagtatattttgtaaacgtgtattaggttcatttggtctaaagtacaactttctgattttgtttatttgggtcttctccttgattagtctacataggggtttatcaatcttgttttcaaaaaacaaacttttcatttcattgatcctttgctgttttttttgtctctatttcattgagttctgctctgatcattattatcacttttcttcttctaattttggattgagtttgttcttgtttttctagttccttgaggagcattgttaggttgtttatttgaaatctttctactttttggatgtaagtatctgttgctataaacttccctcttagcactgcttttgctgtattccataggttttaatatgttgtgcttcaatttttatctgtttcaagactttttttattacctccttaatttctttcttgacccaattgtcatttcagagcatgttgtttaatttccatgtgcttgtgcaggtttcaaagttcctcttgttattgatttctagttttattccgttgtggtctgaaaagatacttgatatgattttaatttttaaaaacttgttgagtcatttttttgcctaacatattatctattcttgagaatatgctatgtgctaatgagaagaatgtgcattttgtagctataatatattttttaaatgtgtattagtttcatttggtctaaagtacagcttaaatacagtgtttctttgttaattttttgtctagatgatctgtgtaatgctgagagtaagatgttgaaatcccccactattattgtattggaatctatctgtctttagatttggtaatatttgcttcatgaatctgggttctccaagttgggtgcagatatatgtagaattattatattctcttgtggatttgatcattttatcatgatatagtgaccttttttgtctgtttttactgttttttgacttaaactttgttttatttgatgttgatatagctatgcctgctcatttttatttccatttgcatggaatatatttttccattcctttactttcagtccatgtatgtctttaggggtgagttgagctacttgtaggcagcatatagtttggtcatgtttttaaaaaatcctgtcagtcaatttatatcttttaagtggaaagtttaattcatttaccctcaaggttattattgatatatgagggcttattcctgtcattttattaattgacttctggttgttttgtatacctttttttgtttctattattgtttatcactgtggtttggtgtttttctgtagtgttaacatttgggtcctttatgatcctcatttgtgtttactcaaccagtggttttatgcttttatgtatcttcatgatggtagatattgtccttttgcttccatatgtagaactcccttaaccatttcttgtaggtctggtctagtggtgatgaattccctcagcttttgcttgtcttagaaagatgatttgtcctttatttatgaaggataaatttgctgggtatggcatccttggctgggagctgttctctttcaacactttgaatatatcattccattttttcctggcctgtgacgtttttgctgaaaaatctgatctgctgttagtgtgatgagggtttccttataagtaactaggtgcttttctcttgctgattttagaattctctctttgtctttgacttttgacagtttgactgtaatgtgccatggagaaggccttattgaatggatctgtttgggaatctctgagatttttttatctagatattaaatctcttgccagacttgggaagttttcagctattattttgttaaataggttttctctctttgtaattttctgtttgctttctggcacactgaaaattagaatatttagtcactttatggtattccatatgtcatgtagtcttttgtcaatcttttttattcttttaaaaaagttttgtttgactggtttacttccaaaaatctgtcctcaagttctgaaattctttcttctgctttctctarttattgttgaataactagattcttcagttccagaatttatgtttggttcttttttattatatctgtctgttttgtaaatttcttattgatactytgaattgtttttctgatttctttttttttctgagttatcttgcatctcaatgaatgtctttaatttccttattttgaattctttatatgggatttcatacattttattggaatctgttgttggataattattgtgttcctttgaaagtgtcatatttccttgcttttgcatgtttcttgtgtcctcatgtttatatccacgcatctggtataacaaccacttcttctaatttttttgaattctcttttataggggaggaatttttcctgaagatgtatctgtggtattgtttgggtagggcacttttgctttgattttgagtgcttgcaatagtatagtttctgtttgatttcttcagctgtaaacagcatcagtggtgtttgtgatttcctcagtggcttagggtatagttgttagtggaggctgtagtgaagttttgctggggatggggtcatcaagaaggccagtccttggacttcactggtggcagcagcaggctgagtgtgcctgtccttgggcttcagtgcagtatatgctggcactggtgttagtgagtccaagcatgatgaatcttgggcctccaggtgactggcctgcttgggtgctggcagtggcagtggtagaccactggtctggatggctgggtcttcaggcccctggacagcaggtatggcatrggaaatggcagtagcagtggcaggacaatcctctggtttccaagaagtctgcattggtgttgacagtggctgcaacaggctgggcacactagtccccaggcccgtaggtggcacatgcaggcagatgttagctgtggtagtagctgcaggtttagtgggcctgtcctcaggctcctgggaggagtgctgaggtaccaacagtggtggatggggcagggtcatccccaggcttccagaccatttgctcaggcactgagtgggagtgtagagccagggcaggcctgtcctcagacccctctagtggtgcatgtgggagctggctgtggtaggcaggcatrggatgatatccagaccactggtggaatgcttgggtgggggcagtagtgactgtgctgctgccctgctcctggggaggatggggttgctttcagtggcagtagctataggtgactggagagcatgcactttcgctccaggtagtggagataagcagggtagcccttccacagggtgttttgaaatgtgcagcagccctgctcctgagggggtggagttgcttcagcattggtggcagcagccagcagcagtgcctggctacacttggggatgtcagtaagtctccaggaatgtggagatgtaggggctattaagcccaaagtcagcctgcagtccattcggggctagactctcaaaatggtgccttgctttaaccgcttaggagctccctctctggagcaatgccattgcatatcttgtagctccctatactagtcctgggggctgcgagggtggaggtgctctctcatggctaggattgcaggagtccataatgggaatgtagaccactggaggccactcacttaccttctcccagcattggggagcctctccaggctttcagctggtccctgctaagcagggttccttccttttctctccttccttaccttaggtgttttctgtcacttctctgttgaatttcagtgttttttgataggtgatctatctgaaggggttcttctttgtggaggtggcaaataccagatgccgctagtcagccatcttgaagctcctccctcatttttgaaatattatgacagtaatatattttgtacttaacatagagaaatatatgtttcctgttaagaagatgtgctttgtgcatgttaagcagtaattcctatatttctaattaattttatagttatcaatttggttgtttgatgtaataaaattagagtgtaagctcatgagagcattaaaagagttctacctttaggagtttctccagaattttttttttcaatttttatctggaagacagcagttatcactgatatcaatagacgtttaaacattgaaaaataataaaagaataagctaatgtggtctggatacttttatgtatttatttggtatatactatgaggcaggcactgtgagagttactgaaaatttttaaaaaagcttagttcataataaaaaaaggtacatataatttttatttaaaataaaatgtattcatttttaaaatttaagtgtgaaatgaggtgggtcaaaactaatgcaaggctgggcgtggtggctcatgcttgtaatctttagcrctttgggagaccaagttcaaaggatcacttgaggccagaagtttgaaccagcctgagcagacattgtctctacaaaaaataaaaaaaattagccatgtgtggtggtatatgcctgtagtcccaagtattcggaggctgaggtgggattataaccgcccaataaattcaccttgcctgctgcctagacagagctgatttatcaagacaggggaattgcaacggagaaagagtaattcaggcagagctggctgtgtgagaaaccagagttttattattactcaaatcagtctccccagacgttcagcatttgggatcaaattttttggtttttttttttcgagatagagttttgctctgttacccaggctggagtgcagtggcgcgatcttggctcactgcaacctccrcctcccaggttcaagtgattctcctgccttagcctcccgagtagctggtactacaggtgttcgacaccacgcctggcttattttttgtatttttggtagagatggggtttcactgtgttagtggggatggtcttgatctcctgaccttgtgatccacccgcctcagcctcccagagtgctgggattacaggcgtgagccaccatgctgggtgggatcagagtttttaaagataatctggtgggtaggggcttgcaaagtggggagtgctgattgatcaggttggagatggaatcatagggggaacgaagtaaggttttcttgctgtcttctttcctgagtgggatggcagaactggttgagccagattaccagtctgggtggtgtcagctgatccatccagtgcagggtctgcagaatatctcaagcactgatctaggttttacaatagtgatgttatccccaggagcaatttggggaggttcagactcttggagccagaggttgcatgacccctaaactgtaatttctaatcttgtagctaatttgttagtcctgcaaaggcagactcgtccccaggcaagaaggggtcttttcgggaaagggctgctatccattttgtttcagagtcaaaccatgaactgaattccttcccaaagttagttcagcctactgccaggaatgaataagaacagcttaaatgttacaagcaagatggagtagattaggtctgatttctttcattgtcataatttcctcagttataactttgcaaaggcagtttcaggaggattacttgagcctgggaggtcaaggctgcagcgagctatgattattccactgtattctggcctgggtgacaaagcaagaccctgtctcaaaaacaaacaaacaagtaaacaaacaacaactaatgcaaacagtagctatctctgtagtagtgttaaaaatggtttgcattttattcttctgtgtaactgtcttttctaaatttctatattgggcatctgttatatatatgtatatgcagtaagtggataaagtagttattaaaacaaactaatttagtctagtaacttcagctaacttgatatgaaagcctaaactaatttgtctatgggacactttctgccttccccctgttgaggctagaaagagatactgtcatctttgtgctttttcaagtgttcaatttatatcttgacttaaaattagtgagtttactcctgaagatcaaaggaccaaccatagttccctaacttgtgtatgacagaaagaaggctattaaacatttaaaaattaacgtgaaattcttgtgaattcatttacttatatatatgtatatatctatgtttcttttctgtattcttagtccttaaaaatagtggtttctacagggtctggagtggacctctagcaaactccaacagacctgcagctgagggtcctgtctgttagaaggaaaactaacaaacagaaaggacatccacaccaaaaacccatctgtacatcaccatcatcaaagaccaaaagtagataaaaccgcaaagattgggaaaaaacagagcagaaaaactggaaactctaaaaagcagagcacctctcctcctccaaaggaacgcagctcctcaccagtaatggaacaaagctggacggagaatgactttgacaagttgagagaagaaggcttcagrcgatcaaactacgagctacaggaggaaattcaaaccaaaggcaaagaagttaaaaactttgaaaagaatttagacgaatgtataactagaataaccaatacagagaagtgcttaaaggagctgatggagctgaaaaccaaggctcgagaactacgtgaagaatgcagaagcctcaggagccgatgcgatcaactggaagaaagggtatcagtgatggaagatgaaatgaatgaaatgaagcgagaagggaagtttagagaaaaaagaataaaaagaaacgaacaaagcctccaagaaatatgggactatgtgaaaagaccaaatctacgtctgactggtgtacctgaaagtgacggggagaatggaaccaagttggaaaacactctgcaggatattatccaggagaactttgccaatctagcaaggcaggccaacattcagattcaggaaatacagagaacgccacaaagatactcctcgagaagagcaactccaagacacataattgtcagattcaccaaagttgaaatgaaggaaaaaatgttaagggcagccagagagaaaggtcaggttacccacaaagggaagcccatcagactaacagcggatctctcagcagaaactctacaagccagaagagagtgggggccaatattcaacattcttaaagaaaagaattttcaacccagaatttcatatccagccaaactaagcttcataagtgtaggagaaataaaatmctttacagacaagcaaatgctgagagattttgtcaccaccaggcctgccctaaaagagctcctgaaggaagcactcaacatggaaaggaacaaccggtaccagctgctacaaaatcatgccaaaatgtaaagaccatggagactaggaagaaactgcatcaactaacgagcaaaataaccarytaacatcataatgacaggatcagattcacacataacaatattaactttaaatgtaaatggactaaatgctccaattaaaagacacagactggcaaattggataaagagtcaagacccatcagtgtgctgtattcaggaaacccatctcccatgcagagacacacataggctcaaaataaaaggatggaggaagatctaccaagcaaatggaaaacaaaaaaaggcaggggttgcaatcctagtctctgataaaacagactttaaaccaacaaagatcaaaagagacaaagaaggccattacataatggtaaagggataaattccacaagaagagctaactatcctaaatatatatgcacccaatacaggagcacccagattcataaagcaagtyctgagtgacctacaaagagacttagactcccacacattaataatgggagactttaacaccccactgtcaacattagacagatcaacgagacagaaagttaacaaggatacccaggaattgaactcagctctgcaccaagcggacctaatagacatctacagaactctctaccctatatcaacagaatatacatttttttcagcaccacatcacacctattccaaaattgaccacatagttggaagtaaagcactcctcagcaaatgtagaagaacataaattataacaaactatctctcagaccacagcgcaatcaaactagaactcagaattaagaaactcactcaaaaccgctcaactacatggaaactgaacaacctgctccagaatgactactgggtacataacgaaatgaaggcagaaataaagatgttttttgaaaccaacgagaacaaagacacaacataccagaatctctgggacacattcaaagcagtgtgtagagggaaatttatagcactaaatgcccacaagagaaagcaggaaagatccaaaattgacaccctaacatcacaattaaaagaattagaaaagcaagagcaaacacattcgaaagctagcagaaggcaagaaataactaaaatcagagcagaactgaaggaaatagagacacaaaaaacccttcaaaaaattaatgaatccaggagctggttttttgaaaggatcaacaaaattgatagaccgttagcaagactaataaagaaaaaaagagagaagaatcaaatagatgcaataaaaaatgataaaggggatatcaccaccgatcccacagaaatacaaactaccatcagagaatactacaaacacctctacgcaaataaactagaaaatctagaagaaatggataaattcctcgacacatacactctcccaagactaaaccaggaagaagttgaatctctgaatagaccaataacaggatctgaaattgtggcaataatcaatagcttaccaaccaaaaagagtccaggaccagatggatttacagctgaattctaccagaggtacaaggaggaactggtaccattccttctgaaactattccaatcaatagaaaaagagggaatcctccctaactcattttatgaggccagcatcatcctgataccaaagctgggcagagacacaaccaaaaaagagaattttagacccatatccttsatgaacattgatgcaaaaatcctcaataaaatactggcaaaccggatccagcagcacatcaaaaagcttatccaccatgatcaagtgggcttcatccctgggatgcaaggctggttcaatataygcaaatcaatmaatgtaatacatcatataaacagaaccaaagacaaaaaccacatgattatctctatagatgcagaaaaggcctttgacaaaattcaacaacccttcatgctaaaaactctcaataaattaggtattgatgggacgtatctcaaaataataagagctatctatgacaaacccacagccaatatcatactgaatgggcaaaaactggaagcattccctttgaaaactggcacaagacagggatgccatctctcaccattcctattcaacatagtgttggaagttctggccagggcaattaggcaggagaaggaaataaagggtattcaattaggaaaagaggaagtcaaattgtccctgtttgcagacgacatgattgtatatctagaaaaccccattgtctcagcccaaaatctccttaagctgataagcaacktcagcaaagtctcaggatacaaaatcaatgtatataaatcacaagcattcttatacaccaataacagacaaacagagggccaaatcatgagtgaactcccattcacaattgcttcaaagagaataaaatacctaggaatccaccttacaagggacgtgaaggacctcttcaaggagaactacaaaccactgctcaatgaaataaaagaggatacaaacaaatggaagaacattccatactcatgggtaggaagaatcaatattgtgaaaatggccatactgcccaaggtaatttatagattcaatgccatccccatcaagctaccaatgactttcctcacagaattggaaaaaactactttaaagttcatatggaaccaaaaaagagcccacatcgccaagtcaatcctaagccaaaagaacaaagctggaggcatcacactacctgacttcaaactatactacaaggctacagtaaccaaaacagcatggtactggtaccaaaacagagatatagatcaagggaacagaatagagccctcagaaataacgctgtatatctacaactatctgatctttgacaaacctgagaaaaacaagcaatggggaaaggattccctattcaataaatggtgctgggaaaactggctagccatatgtagaaagctgaaactggatcccttccttacaccttatacaaaaatcaattcaagatggattaaagacttaaacgttagacctaaaaccataaaaaccctagaagaaaacctaggcattaccattcaggacataggcatgggcaaggacttcatgtctaaaacaccaaaagcaatggcaacaaaagccaaaattgacaaatgggatctaattaaactaaagagcttctgcacagcaaaagaaactaccatcagagtgaacaggcaacccacaaaatgggagaaaattttcacaacctactcgtctgacaaagggctaatatccagaatctacaatgaactcaaacaaatttacaagaaaaagacaaacaaccccatcaaaaagtgggcaaargacatgaacagacacttctcaaaagaagtcatttatgcagccaaaaaacatgaaaaaatgctcatcatcactggccatcagagaaatgcaaatcaaaaccacaatgagataccatctcacaccagttagaatggcaatcattaaaaagtcaggaaacaacaggtgctggagaggttgtggagaaataggaacacttttacactgttggtgggactgtaaactagttcaaccattgtggaagtcagtgtggcgattcctcagggatctagaactakaaataccatttgacccagccatcccattacagggtatatatccaaaggactataaatcatgctgctctaaagacacatgcacaggtatgtttattgtggcactattcacaatagcaaagacttggaaccaacccaaatgtccaacaatgatagactggattaagaaaatgtggcacatatacaccatggaatactatgcagccataaaaaatgatgagttcatgtcctttgtagggacatggatgaaattggaaatcatcattctcagtaaactatcgcaagaacaaaaaaccaaacaccgcatattctcactcataggtgggaattgaacaatgagaacacatggacacaggaaggggaacatcacactctggggactgttgtggggtggggggaggggggagggatagcattgggagatatacctaatgatagatgacaagtttagtgggtgcagcgcaccagcatggcacatgtatacatatgtaactaacctgcacattgtgcacatgtaccctaaaacttaaagtataataataataaaaaaataaaataaaataaagatttgtcagtcttgcttatttgataagcatgcattttttaatgcattcatttggaatcaatttttcattcatctttaaattattttttccataaaataatccttgaaaataactttatgggtattttgcttgaaatacccatagagagggtaggttgcttgaataatttttcctgtgattagtctcctcattgcttgagtaaattttcttctttggagcttactaacttatccttgttctaggaaacattttgccttgcgtctcttttgccttgatttcagtttcaaggattttgtactgctgagtaggtaaggagatcttgctgcttggtgaagaagagggaaaacagctgttttaactaactgtgggccaacatttttggctaacgcaatggttagctctttgaaaagcagctgcttaagtctgtcccatgattctggcaggagtaccggaaaatatctaatgtttgaatttrtaaattccatggcttgttcatttcatttggtgtcattgctgtttctttaaatgcacataactacctttccctgcagcttttcatactctattaaagatggaggaagaagagagcctgcaaaagggggagctgtgaggagctcagcagggcaaagctaatccaggcagctatctttgaataggttttccccccagtragatgaagcatctttttcatctaccagtgtttgcagattcatcccttgctgacttgaatgtgccctgcctctgaactttcactgccctgctagtccttatggttcctgatgccatcctgtattcttaactgcgacacttgggtatattttatctttctaaatatgttcagagagttagagacaacatatttgcctttttggattgggatataatttataatgcctgtcaaggttttacagacagtagttattcaagaaatagatttcatttgcttgacacaaatgctcacataactattttagtgccttttcagctagtttaggttacaaagacagtattttgataagtacaggaactgtggcatcatataaatacacgtttagcagagggtcagacatattctctatgtttgtagatttcagtgtcctttctttttttactttgagacaaagtctcatgctgttgcacaggctggagtgtagtggagcaatctcagctcacattagccttgacctcctgggctcaagcgatcctctcatctcagccactgaagtagctgggaccacaggcgtgccaccacacccagctaattttaaaattatttttagagatggggtctcattatgtagcccaggctggtctcaaacacctgggctcaagagatcctcctgcctcagcctaccaaagtgctgggactataggcacgagccactacaccctgcccatttcagtattctttttttacagagaccctcttaggctaacattttattattacagtgcccccagaatgctttgttttacattgaatatattcgacatttggctttaggactctgaaaggcaaaaagtacctttgcttttgcttttcctcattattcatatacaaatgtcaatcgttgtgtacctgtgagtgtcattccttttggtaggcatcgctgcgagaggctcatggaaagtcgagagcaccagagttaggaaacctggacccttggcctgtccactggctcaagagggaagtgctgcagtcagggcctcagaaacatctgcaaagtgatgagaacatctccaagtttcttctacctcgaacattttgtggttcttttcctttgtttgtaagttagaatagtcattaccacccaatgagggtataagtatggaacaacccagtttttcttgaaactagacatcacatgactagatgaaaacattgatacttgagtctttattacaatcaattaaagcaaggttcagtgtatagtttgggagtatgtcttcctgttactttttgacaaacttgaagtaatgtaactgagtcctcttatttttctactttctatatctctccttatacctttttctcctagacaattgaataaagctttttttctttttttttggctttttgtcccccctccaactacatcttaataaaggagtagactgtatgagaatataagaggaagctggcgtatttgagaagattttgaaggctgatgtactggacacatctacatgagctagagttgtcttgtgatactctgaacgaaggagcagtatacattaatctaggctatgtagctgtttacctttctacaaattcccatccaggtcagacacattgtgctctttgtttttttctttttttaaagaacactcactgagtcatctctgggaaaaccttaaagcgaattagtggccagaaccacattctctaccatcctctgggttgccttcctgattgaggttatatgaacaaactgtagaacataatctcttctgcttgggcttaggacatcagcgaggacaccaataagccttcaggccagggagggcctcaaggccttgaattgtggagagggcaggccagcattgcctttgcacctgttttgataaagaattcctgtcctctttgtgctgagttgtttagtcaaagtgaagagaggatgcagaacttggtggtgtgattggaaggatgagctctgtaggggattctagaagatgtagcaatccttctttcctgccctcacccccagtacttcatccatttttgaagtgatcttgcattttacttcaggagagctggtgatgataagtgttcttcaagacatggtgacttattaatgctaggagagagatgataggaagctgtattctagaaatggggcttaatttataagatggagttcttcttaactacaaataggattatgcaatttataaatttaatttagcaagtgaaaaggagtgaccaaagaacatcaggaaaactactggttatttaagactttgcgccttgtgaacctaaattacctacttttccatgtgctactggaaggaaggggtttactctatttgaaagaagaggagaggggaaaaatatgttattaagtatatctggtgataactttgtaggcttgtagatcttcatactgtgtttttaattctacaaccttagttttttcatttagtagttcccaggggtgttaacgggtgatgctctggaggagtgcggacttgctcgagaaccttccaagttcaaagcaagagaaactggggaattttgccgatgacctttgaggattgcattatttgttttcctgtcagaggctgtcactaacagctgattctcctactaaagaagaagtaacagaaaacaacacaggagcctgcttcgttggtaggaggtgctcaaaggacagagctaaaatctttagttggatattaaggagaagtatatttcaaattcagtgtaaagggagtctttacaatagccaagcctggcaaaaatgggaaggctattttgtgaggcagaggtttttttgtcattagagatatttaaagaaaggttggaatggccttttttgggggtaatattctagggcagggattagcaaactttttctcttaaggatcacatagtaaaatagtttaggcatctgtcacaactactcaactctactgttgtattgcaaaggtaaccaaagacaataagtaaacaaatgagcatgactattaagttagtctgctctggctgccctaagaaaataccataggcagagtggcttaaataacagaagtttatttctcgtagttctggcagctgggaagtccgagataaaggtgttggcccatttggtttccagtgagggctcgtttcctggcttgcagacagatgccttcttgctatgtcctcacatagtagagagagagacggatatctgtttcttcctcttcttataaggctgcaatcctaacagattactgccccacccttattacttcataaaaagctggaggttagggcttcaacataagaattttaggggaagagtccaccatttagtccataacatctgtgttccaataaaagtttatttataaaaacaagaggtgggctagatttgtcccaaagaccatagtttgacaacctattgaatagaggaaattaaacactggtgagcgagcagactaggtgatctaccagctgatagattcaaaacctggaggctatcggtaagtaacctgcaaaattaactggatcagaacaaacctaactcagagctcatcgactagtatttctcagaataaatcacttaataaacaaaaatagttcttaagtccaggattaattttacttcaatgtgcatcaaatctatgcttttggctgatgggagatgcgaatgataaactgtgctggggtcatctttagaacaggcctggtgtgctcctacagttgtaaacagtgccggttataacgtcttttgtcattgatcagcatagaaacctagcttttttttttttcttttgcagcaaagccatgattattaatctcttctttatttgtaggagaaaggtctctaagatacttctcagctagtagccttccccctccccttcctttggagaaaaatagaagccactaaataggaactccctccatactttgccacgaatcatagaaacttaaatgcctctgcacagtcactgctcttctcctttctttctgtggcagcaaagaatgagaactttttttgctgactctaaccccctgtacctccaagcttttttgagatctcatgaccagtttcttctgcgtaactttaaaaaacggtctgtttttccacccagctcttgtcccaagtctgtcccagtgctctatcttgtttaaaaataaaaactaaacacaaaaccaaacccggagacattatacaaacaatataaatttgacaggaaatggaggacagagtcatactgcgcgtatataaaactctacttcaaaacctcttcgaaacattctgacaaccccaaactctgcacccaaagttcatccctcatctttcttctttccctataattctcctcttcggtcttgttttctcttctttctgatcaacactcttctttgcctcctctctgttcctggcttttccaagtggcattttctggggctttttgtacacagagagattttatatctttctgcttctttcatattcatccttgtatatcactgtgctgggaccyttagcaattcttataaaatgcagatctggtcaygctctttgatgaaaaatcttcaatgactccgcattgatctggggtgaaattgccagactccttacctgttcgaaaagacccagtgtcatttggaccgtgctcaacttttcaattatgctgaccccctcatcaattttgttattgcccaagttccttgttttccttgttatggcattgctgtctcactcatgggccttcacatgcttctctgtgcccagaatccttatcatcttcctctgtacttagctgaggcatccttctggtctcagctagataccactttctaatgaaagcattccttggccaggcatggtggctcatgcctataatcccagtgctttgggaggtrgaggctggaggattgcttgaggccaggagttcaagactaacctggacaacaaagtgagacctcatctttacaaaaagtaaaaagaaaattagctaggtgagtggcacatgcctatagtgccagctgctcagaaggctgaggcaggaggattgcttgagcccaggagttcaaagctacagtgagctatgattgtgtgactcccggggcaacagagtgagaacctgtgtcaaaaaaaaaaaaaaaaaggaaaaagaaaagagagaaagccttccttcaccctctctgtattagctgtgctttctgatgtcctgtttttatttctcaggacaaccttttatttctcctgtcctgatattattatgcttttgaatttgtctatagacttttagttcatgagagtaggggccatgtttatcctggtcaccatttaattcccatcacttagcagagtatatggcacatagaaagtcctcaggaaatatttattggataaattatctacatttaaagtataactttattttttcacatttgattaattttaatacatataaatttataccttattacataactttaaaacccatttacattataaagtaaaatactattactttttactttataaagtatttttacttaattaaaaaggaacaaatgtgtattattcttggaaaatttattttatctttccatttgtcattttctgtttatgctccataaagtttttatgacttacaatcataacatttttagagtggaagtctatgtaaaatataycatttttgttattcttcttcagaatgaaggattaaactgaagattaaaagaaaatttccacgaagttttgattatgacagcattgtggagcacrtactgggtttgaagctgctttagtmttaccttcaatgaatcctgagaaatgcagtgataatgcttagcatattatatatatatatatatatttctttttctttttatattttagataagagtgcccaggagtggaatctggaaatagagtctacatttgatgttgtcagctcaaagccagttggtggtcaagtgatcrtagccatccctaagttgcaaacacaacagacatacagcattgaacttcaacctgggaaaaggattgttgagctatttgtgaacattagcaaggtaaatgatggtacttcctgagaagcactggatgaaaagcaatacctgtgctaaagaaatgattagaaaggagggactaagtatgaaagaaaattctactttctctgcttatatttgtcattttcttctctattttagtctctcatatattttctgtgagtatgagctaaagaatgattttcccaaactttaagattaagaaaatagagaatatattatwaatttggcaattctttctctcattttatttttatcattgtattttaattttctgtagtatttgtagtatcctaaagccaaaatacattctatggattatatttaaatagcagtggttatttttgatacttgtcaattattttgattattgatacttattctacatgcayaattttaattctaaactcatgatctttcatatatcaaggtagaacggattatttttatcttttctttttcttttttctattcctctaattgataattgtgtactgaaaaaggtggagcaaaataacattcagtagctgttgagataaagtaagaactcaaaatgatttttagtttttggcttgaaagaagagtcaacttcagagtcccattttaagtgttaagaatgtggaataaatgtaagctcggtgttagggatagggagagttgtttttctgaacactcatgttattctgttctttccttttgcttttgatgtattgatccatgctagattcccagcatgctgatttttaaatattatcaatgaattggtctgattgggcataatataggtggggagacttacattgttttagaacctagagttttgtacttgactatttgagaaattgatgtaatgctttgagccttttttgctgaaaatatgacayattagagtgacttttaaattttcttaaaagaatattactgtagaaacttggtggcctcatggacatggaaaccagactgggtacaacatgactgttctttttgaactggatggaggcttaaatattgaaaaatcagctaaggtaagtaagtaatttaaaatattttgtgaaataattttatttcttttaaaaatagtaatacagatcttcatgggaaaagaagaaaccgtcaaaactcttgtgtccccacccatcagagatcatctttagtaacagcattcaaaagcttctctctctgtgtgtgtatatatacatacatatatatacacacmtatatatatatatatatatttttttttttgagacagagtcttgctctgtcactcaggctggagtgcaatggtgcaatcttggctcactgcaacctccacctcctgggttcaagcaattctcctgcctcagcctcccaagtagatgggattacaggcacccgccaccacgcccagctaacttttgtatttttagtagagatggggtttcaccatgttgaccaggcwggtcttgaattcctgatatcaagtgatctactgccttggcctcccagagtgctgggattacrggcgtgagccactgcgcccggccttatatttttaaatggatcatactttagatattattttgtcaataagtagtctcctgctatgatttaaaattgtaccttatatcaaaataatacatgtgtaattttaaaactcaaatattactagtaagtttatatgaaaaataagacctcttgcccatcacttcctattcttacttcctactccccagaaccaaccatttttaacttttatttatttcctctgacattcttcttcatttttctgaataaggtgcttctactggtgttttctgatttttcagttttacccattttaggatatagcactaggaattggaaagaactgcactttgttatttattagctataggctacttacttaatctcaaaatatgtaaaatagggacaataagaacgagatggcttggatctggcttataagagtcatggcwtatagttagtagaaatggtattaaccctcttcaaagatctcctcctctcccagacaccagcttcggtgtttacagttggctggtgtcacctcttacatttggtatttcctctcctgtgggccagacaacatgctaaggatggagatatgtccttcaggagtgcattttctgtttttcttttgttcaatcatgctgtgtattttctgagacactgtgaatgtgtgtgtgtgtgtgtgtgtgtgtgtgtgtgtgtgtgtaaggggggaggggagagagagaaagagtgtgtatgtgtgtgtgagaggggaagagagtgtatgtgtgtttgtgtgtgtgtgtgtgtgtgtgcgcgcgcacgcacacatgcacagagttatgtacagggagaacatcctggacccgtcttaagggccaaagcattcactcttgtcgtacccctcttggctgagaggatgtgtgctgtctcacacagtgagtttgttgtgtgttgttttcatgaaaatgtaaaaaataatgagtcattccaacttactacagagaaagaagaggaacttctgtctttttctaagggaaataattcttttacattcaggctaatatgactgtattattgttcattacacataaagatgccagcctttgaatcgagcagcaacaggagtttgctttaaggaggatgtttaactgccccacaccttgagttaatgcatgtgtgtgaaatgtgctctttggctgtggctgccgtagagttgctattttttgaggctgattcattcagtaaatacttagggcacacctactgtgttttggctattttgctaggtgctggtgatagagctgtgactaagacactgtttctgtttctctctgagaccttagtagaactaatgatctgattgggaagttcaatcattaaatgagccattggaatatattagcactctagagatgtagagagtgccatggaagtgcagagcaggggcattctgggaagattcccagagcctgtgtcctgagggataagtagaatttggccaagtaatgtagcaaagaggcggagggaaaagaacgtgaaggcccaaggactagaaaggatgttgtgtgtttgcagaagtgaaagaaatttcaatgcagttgtggttgagtttgaagttgaagaacaagagatggtgttgtaaaagtagctaggacaaagtcctgcagggcctagtgagccacgtgaaggaagaagcactgtcctgagtgctgccaggattcttggaaggattttaaggagggggtaaggattatatgcatattttacaaagattgtgtagatcagattggaaggatggcaagagtaggggaccagttagaagactgtggtggtgattcagacaaaaaatgaggattggttggtctacagaactgctgaggaaataaatctgaaagagatttaggatataacctcagcaggcttgatgatgtgggggtgggaaaaaagaaggagttargaatggttcctcagctgctggtttgggctgctgaacaggcagcctctgaacaggcagggcaactctgttcattgagttacattactcagaaagaagagaaggtttgggggaaggggttgggtggaaattatttcagtgttagatgtgttttgtgtggggtgattgagagacacccaaggaataatatttgataggtgtttcattagatagatcttaagcttagggattgcatgtgggttaaggatatagatgtgtaagttagcagaatgtagataattgtagccatggtagcggatgaaatacctcagggatggcacagagaaaagagctaggacagaaccccaggcagtcataattagtaaggttggggtttggggagaagccagtagaagaatctaagaaggaatggttgacgaggtggagggaaaaccaatttgagtggggagtcacagaaaccagagggaaagagtgttttaagaagcaaagaatgttcagagtgttraatgctgcaagggagttcaagttagaaaagaattgagaaagattctttagatttggtggcaaggagattactggtcaccttgatcagcatggaaatcaaattgtagtgggttgaggaatgactcaaggtatggaagtaaagacggtgaatataggcaactcttctgaaagygtctgattggaaactatgcttagaccaggtggtaatggtggccagttgggatcagattggcttcacataggcaactgaacaaataagtaaatatattgaagtggtggaagccagccttttcatgaatggagaaaggtggtatcaacatagaaggggggaaagctacagtggattcaaattggagctaatagtatgaagttatgattttcagtatgtgtagacagagaaataaatgtctttgtaaatgcatgtgtatgtgtgggtagacacacacacacacacacacacatttcctagttcttttcacacatttcctaatcctttctcagagcgcctgggaagagtggctctctagtagcagtgagtagatttaggacccatatsttgatttggaataccactctgtgctgaaagcaatcagggctctttggagaaatgactgattctcgagctggagcctgaaatatcttgctgttccaggaagtaaggaggtactcaataataatgtgacacattgaaaggacacamgggccttcagtcttcagtcttcaatctactataatcttcaaaaatgtcaaggaaagattgaggaactgtcctacagtggaagagactatgtacgaactgggtgcagtgcagtgatcttttttgtcataatgttattggggcaactgatgaaaacttgaatgggggggtctctggattctttgtattatatataggagttctttgtattattgttgkaactttattacaartttgcaatgatttcaacatagaaaaggataccattaagagaatggaaagcaacagcaaaatcctgatggaaaggggccagtagcgagggaaagactaaaaagagttagaaagcagggaggtagttgagagggcaaggtctctgggaggtaggagataagaagaggatggattcactttgggatggggggctctgttttcrttgtaatagtggtgaaagataacacatgggaggaaaggatgcagcttgaggatggaggtaattttgaaggtctctaggaccatttaaagtatattttctttctataagactggcaaacacttttgtcagtggagttttagggtgaaaaagtaagcctgagaaagaaagctagggagttttggtcaaacaacattttattttttatttattgtgaaatatgacacatacagaaaaatacacaagccataagtgaaaagcttaatgaattatgagaaaatgaacactcaggtaactgtcaacatgttcaagaaacagaacattaattactagcacttcacacctcaaactctcccctcccttctgcgagcctccccagtaatgacccctgtttccttcccgaagatccactatcctgacatccatcactaggttacttttgtctctttttgaattttatgtacatggaaccatatagcatgtattttttagtgtgtggctaatttggctcagcattatgtttttgacatttaggtacagtagtgcctccttatctgtggtttcagttacccatggtcaactgtggtctgaaaatagtaaatggaaaactccagaaataagcaattcatgagttttaaattgctcactgttctgtgtagcatgatggcatctcgtgctgtcctgccctgtcttgtccaggacatgaatcatcgctttgttgagcatatccttgctgtatacattatccacctgttagtyactcagcagccttctcctttatcagacagaaaaagtcatagtatatatggggttcggtactatctgcagtttcaggcacctactgggggtcttggagcgtatcccctgcagataaggggggactgctgtttattgttctgtgtaactgtaagtttgtctatttaagttgtatwaaattttattatactacacattttgctgttgcaatttgagtagttgccagttttggctattccaagtaatgctgctgtgaacattactgatataacactcggagcacatatgcccccaacggcatgtctgctgggagtggaatggcatgattatggaggatgcatgagttcagctttgtagattatgctaaactgccatccaaagtggttatatgagacttgcctaggctcctcatgctcgccagcacttggtactgtgtcagacaggacattgaacactgttttctcatcaccagcccctccttatttcacctctattgctcttgtttattgttaccctgggcttgctttatgcaaaaataattctgttttaaatatacctcattgaaatccatcttgcttcagttttatatctttgtttcatgcctctcctcttccactgagcttagaaacgtgtttaggattttttttttttttaactgagtatatcaggagacagcagcatatctgactcagacaaaaggtcctggggaagttacagattttgaatgcagcccatacagcagaaatgtatggaatcatgaaaagaatgcagacacttgagagagaggaaagggccgactacatttctttgtgaacatggcagaatatcttgatgactgagaattttcttatgttgagtgacattggggcaaatggtttaagcaagaagggaggtaatatagggaaaatatcaacaggcaatttaaacattaataaataacaaaataaaaaataaatgttgggatatcataaattctgccaaataaatcattgcctgagggaccttagaatgtgagtctgggagagttagctttatcagtttgggaaaccaaattgattttttaacaaaagaaaaagttttgtgtataagtgggaatggtagaggatactctgggtaaatggaataaaaaatctgaccaatcagtttttgccattttctgcccaggttaactgagtgtttttatcctactaattgattgtactgaattgactaggtaacgtgttttaatgaactaatacatatttttgaatgcttattatggcttgcctttatggaaaaacaggaaaccaattagttgatatttctcttacacctaatttattttataagaatttctcaagtattctatgtataaggtatcgttttgctaaaagcagcagaaggctgttgctgtgtacgtttgctcctgggatcaagattctccaattaaattattgtaggaaaatagatgtaataataagtactctacaatcaattaaaacttgtgtttcatagttcccaagccagaggaggtgaatgattgtccatggctactacaattagaaaaacaattgggatttttttttctttttcagtttttttttttcttttttaatgtcactttgttctttgtttcttaaattcctgtcttcatctttgcaaattgcacagggcaaaaaaccaacataatactagtggaattttttctaagtgctactcttggctctctaaagaccttaaaagtacatagccaaagatatggaattaggaataatcaaggtgtatttttgtattgagagggcacagagattatgaagtgtgtctccttctgtattaggtttctaggtctattattacaaattactataaactgagtatcttaaaatttattttctcacagtcttggaggctggagtccaaaatcaaggtgtcggcagagctgtgttccttccgaaggctctgggaaagaattcttccttgccccttccagyttctcatcattgctggcaatccttggcttgtagatgcatcactctgatctctgtctccaccatcatatagctttctccttgtgtgtgtctcttgtttccttttcttataactacaccagccattgggttagggcccagtatgacctcattttaactaaactaaatatatttgcgaagactttatttccaaataaggttgtatttttgggtggacatgaattttggggggacactgttcaacccagtacactgtccttttggccttattcttgtcagaagttttattaaatatttccaagatggctataggcagtgacttctccaggtgggccttgggagcagttagccctaggtgcagacagtaagtgggtgaattgtgtgtagactatagattggcctgtttttcattattactatatactggcaatcctattaataaataatgccagtgatagaatacttctcctaccctccccctccaccaatcatatgttggtctaagttttaactatgtgtttggttactcttgaatgttaataatatacatgtatgcttagatttggcacatttttattaccagtcctgtaatagacattatattctacatgaaagttaatttggagtactttttttttttttttttttgagacagagttgtcttttgttacctaggctggagtgcaatggcgtgatctcggctcactgcaacttctgcctcccaggttcaagcgattattctgcctcagcctcctgagtagctgggattgcaggcacgcaccaccatgcccggctaatttttgtatttttagtagagatgggggtttctccatgttggtcaggctagtctcaaactcccgacctcaggtgatccacccgcttctgcctcccaaagtgctaggattacaggcgtgagccactgcacctggcctggagtactcttagttatacagtcattcccggatacatgaagattcagcttcatacagtcattttgaaagcaaatttataacagtttggaattgtatgagcttgttttgaacacagtttgtgcttccattccctgccctatacatgcctgcatttaaaagcattgcagattagaaataaacaacaatagcacagtgattataaaaaaggagaaactcaacataagttacttcaattcgatgtgatctcttggagttatttttatgctttaaatttacagttgagaaagctatggactctgaggtgtaatgtgtaatattttgcttggtaagtgcatattttagttcatgtatgaagtatattctactaattttaatagtgtctttagaattgaaatttatttttttaaatttgttgttttgaaactaaagaaagagtcaaagtaaaacatgacatcagtggtatgctttagtagggggtggcagatactgaaaaaaatgctttagaattattattattattttgttctttttagagacaggggctcactctgtcacccaggctgctcatagctcactgcagctttgaactcctgggccccagtgatcctcctaccttatcctcctgagtagctaggactactacaggcacatgctaccatgccttgcctattttatttttctagagatggggagtagttagccttaggtgcagacagtaagtgggtgttgcaacacagcctgccatgttgcccaggctggtctcacacccctgtcctcaagcarccctcccgcttcagcctcccaaagtgttgaggttataggcatgagccactgcctggctggaattctttttgacagcactctggatactttaaacagagatcaaatgtgtgaattggtcagataggcctatattgaaggtggcagagtggaaataaagaagtcattcttacctttctggaaacagagatcaaatgtgtgaactggtcatagggaaggtagtagaatggagataaaggagtcattctcatatttccagaacaactgctgcagaatgcacagaaaatagcttcaaggaatgggattattatttcataaacctctgctatgggccaggataaaagatgctgcatatgtggccagtattcactgtggagttcatgcaaaaatcaaagaaattaatccaaaattttatttcagcctcttggaaattattctctgagccttgtggaatttgcttttttggaaactttttttttcctgtgtgattttttttttttagaactttggacaaattgtattcattctttctcatctcacctcattgatgggaaaagctgcagaaaagctttcctagacaagatggaaggttcattatgaagctgggccacagtagaaaaattttgaaaagttaatctcaactctgaagtaccatgtaatccaaagaaaatgtggacacgtgaatcagctcagacatttctctctgctgtgtgcggttttctctctggaattatcttttttctggtatagttttagatgacattaatcagatacaaaaatatttgcaaatagactccatcttgaacaatgtacagtgaaataccaaactttaaaattcttctttgaagataagtgcacagaaattttggtgaagcctatttactgtgcaacaacaaaatataaggaaatcaacatttacatagaaaaaagaatcaaattttgaaggagagtgccaggagaaacaacaaagagttgctggttttccattgctcagagaaatccacatagcaatgccaaacgccccaattgttgtccctgagaactggacacttgttctacagcaattaatcaaatagtatctgtgttcacaatcatttagccattttctctgattttacagaagaaatacttgagaagtgggattttttttttttttatacctcagaggcatttgtaaattgtttgaatgaaagtcaaaagaacaaaggcatggatatgactgcatttttttggagtttaatgtgatgtgggattattatgaatctctaccaaacttattatgtttaatacttttctaaaatatttgcatatctctggcctcatctggaagaacatttctgagttaaaattaataaaaggtgtttttccatcagctatgacaaataaatcaaaagagctggctataccctttgttgaacatgtatgtccaaagaagatcaattttgagaaagttgttgacagatttttagaaggtaaggctgaaaatagcaaatattattatttcttactatagcataccattatatatgttattccctttgtttataattttattaaatatattaatataatcaaaacttgaatctattaacttttccttttttgtacgctaatatttgttttacttttttaaaaaactggcgtgattatacaaagttcagggaaagaaaatttttaatgtctacattcttttctggacattatcattattcatttcatttcattacttctattgaaaataactttgtcatatggaagaggaggtcttaaaaagtgatcctatctggtgtcagatatactagatacacatctggctacaaggatgcataactgtgccgatgtcaatgttaatctgttaacttctggttgtgctgtctgcaaattgcaagggcacgacaaagaatgtctcttgtgtcatcctgcacagacctgtttgacaagagctatttgtggagacccagagcttgttttctcaatacttttacatgggggagcactttcagaacaaagacagaaatgcagtgtttggttgtctcttaaaatacatgtaaaaggattttagcaggtttgacatttgacaatgtttagaaataagtggatttctttttaagaagaaaattgcccttttgaaaatgtagtgatgctattacagctttttaagtatctgatacaaacagctgagaagcagccttgggtttgtgaatcaatgattcattacatatcatctgtttggtctgccagagaaagaaatttgaggagtaccgtatttatcagtcacgtacctcttaggccctttagttcagatatccttaattcttgtttgaaagaatgcattcaactatcctgcacttttaaagttaatccttctattttgaaaatgaaatctttttgaagctaataaaaacactgatctagtgaggaatagaaacttcaaaaatagataaaaatttagaagttaaaatttttaattttctaactgcccgacttacacattttttagtttcttaggtatttatacctttttcctactgttagacaataatttgctttgttggactgtttaaaaaattttagtctcatatgaagattatatatttactttggatgcaaatatgtgttactcaagggtcttttcaagaaatcttttagaacccattattttctctgaagtaaaatacctgttgtagaagaaggcttttatgtgactatcaagactgccagaggacgtggaaaattactgacacttatcatagaagcgggagcctttcacttgtgaaagaatgcccagagggaaaggtggctggtaattactacttcacctctgaggcactgtcaggtggtttgggtttattgtcaccccagtcataacttgttattgcaagagttgggggatagggagagatgcctttttataagaacatttgcacagaaaggaaaaatattctggaaagtgttatgttgtatagttaatacaatttgtagcattaatgtatattaagaaacaaataaattctattttctgcagtagtgattctcaaatttttctggactcagcactgcattatacttacaaaagttattgaaaaccccaacatgcttttgtttatatgggttatatgtaccgatatttaccatattaaatattaaaactgagaattaagtatttacttattcattttaaataaccataataaaccatggcacatatgactgtttttatatatgacttattttataaaaaatatattgaccaaaaaaaccagtggaaataatgacagttttacatgttagcaagtcactttaacgtcttgtttagtaggagacaaagggattctcatctgtatctgccttcagtcaatttgcaatatgttgtttcggttgaaacagattaaggaaatctgacctcacacagatgtacttggaaaagggaaaaaatagtcttttcagataaattgtggattttcttttaaccaatgatagttttcttttaacaaatgatagtttcttaaactttttgttctctgttacattaaaattcatttgtctatcttgcactttgtgtgaattctttacccatattatgtgatattgtaatataatgcattggttattggaaaatgtttgtttcttgagagttacagatcttccaaatgttgaaacatttccttttataatatcacatttgttaatatcaccactgatgtcatctaaaaagtttttaagtatttaagtagtatctactaccgtgaggtagtagatacaagttttccctaatcccaatttttacttgaaagtttgaattttatccttggccacaaatactgctagttgtttttcttgaaatgataggctcactccattcattttctagagaatgtctgccaggtatccaagtctgaataaccatcgtttgtctgtcagtccttctttctatcaagtaaaaatggagtgtcgtgaacaaggccaattcagcttacatacaactctattaatggcccagaggcttttcctccagctatctattgtgaatggtgctttatggatattgctcatttcataatgcaggatattaaaatgatgcatactgagggttgggatttaatgaaattaatgtttactgctttatcaaggacagtcttaagtgaaactgttttttttcattttcctgctgctaatgcatgaaggtgaaagatgtaatgactactagcagtttggagctactgccttgattcctgctaaggcaccagcagtgttaacccaccactgcttttgtaacgtcagtgcaaatgttaacacagtaattacaggatattattcaaaaaattatttagtactttgaatatttcagcacctcttgtatattgttgccaaaaattcacagaaaagaagttttttgatgatttatcgtgctgataacagacaaatacaggcaaactggcaagtccatctatatctggagattcactcatttgtaaagcaaaagtatgattatttcagatgagatatcaggccagtcttcatattgcagtcaaatctcttaattggacgagttactctgtcattgcaaagtggcagtgctgttatttcctcgactaacttttcatctagtaagcattctgcaatgtcaacagtacaactgtctctcagctagtatgtgtgcttctccagccaggggtgcataactaaccctgtaagatgcttcactgggttttttcatgtctggtttgaaaagatgtaataaacactgtttgacttttaatgagcttatcatgtataagtttaaatattcaattctcttttcttcatactgtgaatgatttgtctcaatgagacactacaacttaactggcaccataaatattatttttaaatgttccattgcataacgcacaaaaaggtaagttattaacatccataaagtcaagagaaaggtggctttcatcataatttcacttcttattcataattttacccagtttgtttagagtagattcttcccttccatgagtcaaaagactgtctgatatgtcagtttcacttttttcagcatcctcagatatagacagatagtgcagttataggttgagaaggtaagccttcttttttttttcaagacggagtcttgttctgtagcccaggctggagtgcaatggcataatcttggctcgctgcaaactctgcctcccggattcaagtcattctcctgyctcagcctcccaagtagctgggattatgggcatgcaccaccacacccagctaatttttgtatttagtagagataggatttcaccatgttggccaggctggtgagaaggtaagccttctaatcccattttgacaattcatccctaaattggaaaaaagtattataaataaattttcttttagaacaagataaaatattattaaagtgtaaaatgagtttcaattaaaattaaaatttgtttttatttgaaaacttaaaaatattgctgtgaaacaaaggaataagtagtacctactccttttgtgctcctgtgtaggttgcaagggaaactttggggttcaaagtaagaatttattgaacaacaatgagggtacagagattacagcaggaataatcaaagacagctattaatagtaagagcacagtaaaagtactgagaacaaactgagttaatctctgaaaatgcactgcttcataccataaacctctgccgcagagctacatcacagtggaatacacagcacacattccattagctgtcagagtgatgaagtaggcacacatcatgtagtctctggaaaattccactgacactcagagactgagagagataaaggcaaataatgttttagttttactctaagtaaagtcaaggacacactgacagtctccaagggacctcctggagtccccaggccacacttaaagaaccatgcactgttctagatattggaacccaccatcatggtgttttaaaagtcacctctgaaaatcactgtgcattcttgacattttgcaaccctgaagcaggagtgatcatcgcgtgtcaagatcctccttatccaggacatattctgtatcttcttgtaaagttaattctgaggtcttttgtcatttcatataaataaagtcaggagtcaggaagcaggagaatggtggacacttttattacatgaaataatttgactaattcattcactgattttttaagttagagaaatgtgtgcttttggcttaaggctaggctttattggtataaaatcttatataaacttgatccaatttatggctggcaagaataaagattttgataaaaatgtcaaagcttctctatctggggtcttgctgcccatgcttaactgggggaaaacctggctaggctgtcactaggatggagcctctgcttcctctccagagcaccaatagcacagagtgcgtggtcctgctgcatctacttccattagaacaccatgtacatctccagtcaagaaaccagagcgtgctcaaacattgagtttaatgtgtaattaggattaaattacccattaaacaaagtgattttatggtaatgtgttattaagattgcaaagttgttaagttayaacatttgattctaagatgcatgtttggctaccttttaacaacactgaaatgagaatgtgtttttcaaagacagcatttttttctatttttttgaaatagcatgtttttgttttaatttagagatgttatcttcaaattgtcttttttgatgttatcacaaatgcctatttcatgtggaagactacagtagctctttagtggtttctatatttctcttttaaaagagaaataacggatgctagcaataatttrtatgtgtatattcctgaaatgtgcatttccacattatgtgcttcatagtaaataggaaaattagcattaaactactgaatgtagtttttcaaaaaggtctgcttttttwaaaaaaactattttgcttatgtttaaatttgatattcatcatttaattctgttcattgcaggtttattttaggacagtggaacttatagaagagcctataaaagggtctcctggtttgagtttctatttcaaaattaatggatttcccatatttctaaaaggctcaaactggatcccagcagattcattccaggaccgagtaacctctgagttgtaagttattgtctttcttttcttgttcttcttttaattagcagtcccgcaaagcttgaggtttactcatttttactttctttagtctctgggcaaggaactaagaggtagtatagaattctagacgatggaaacttyagaatggacaggattttaaraattatatattccattctcctgggttacaggtggtcttacagctaaactatttgagactgttgaagccattcgatttttagaaaactattatatgtttattctggagaaataagaaaatgagtaatttatattttgaatagtctccgaaaaaaatattacattcaactattttcagcttttcaaatgatacgttaaatgttttgagcatggttttgaaagataagaacacatatttaccttttttttttttttgagatggagtcttgctctgttgcccaggctggagtgcagtcgcgtgatctcagctcactgcaacctccgcctcccaggctcaagcgattctcctgcctcagcctcccaagtagctgggattacaggtgcaggccactaccgcccagctaatttttgtatttttagtagagatggggtttcactatgtaggccaggctggtcttgaactcctgacctcaaatgatccacctgcctcagcctcccaaagtgttgggattacatgcgtaagccaccgggccaaccccatatttacctttctatgctaaggtatttgcatattcttttacttttatctcaacaaaagaactaaacaaaatctcgtgtgtagtggaggcgcggttgtgggagggtggggaggaaactgggagctgttggtcagaggatacaatgtagcagatatgcaagagaacaagtccagagatctgatgtgcactaggaatataggttaaaaaaattgtgctatttataggattcatggtaaataagtgagtagattttagctacttgtgccacaaaagcaaaaaagagtggataactacgtaggacagcagtcccaaacctttttggcaccaataaccagtttcatggaagacagtttttctacagattgggggtgggggatgaggggatagttttggaatgaaactgttctacctcagatcatcaggaattagattctcataaggagcatgcaacctgtatccttcgcatgcacagttcacaatagkgttcctgctcctatgagaatctaatgctgccgctgatctgataggaggtcaggtagtaatgcttgctcaccagctgcttacctcctgctgtgccacctgatccatggtccagtccgtggcctgggggttgggacccctgttgtaggatggtaagtacgttggtttgtttcactatagtaaccttttaactatctatctatatatcccataacattatgtcatataccttaaatatacacaatacaatttatttaaaaacaaaatataatcttaaaagttctagatctaggaaaaaaaatgtttttccaagactgaaggaatagaactttggaagaaaataatatttcctaattggatctgtaaacttaaatctttgcaatgctgaaaataaactttatgaaatgaaaataaacacatttaaacttatttattatctaaattaaataacattttagcatatttacaaatgtataaatgtgcattgtagtatattatttgatgtttagaatgtaaatgtcatcagtaactaaaccctgattttttccaaaagttgtartaatttccttttactttaaaatgtgtatattattttagatttcataagaaaatgaaattcttctccagacacagccacgggataattggctctatctttttccttttcaaatgctcctctcccctcccagctggggctgggttggctgtggtccttcagcccarctgggccaattggtaagcctgccgtggtgcctgtgctgagcccacagtgctctgggtctgcccagcctgttacttggtttgagcactgttctgggaatggagggaaggtacatgctctcaagctgcctgtaagtttctagattttcctgagggtaatgtgaataggaattggaaaaagtagaaaggaaatttactagagaaagaaatactgggctggagaaattgcataaaaggagataggggtgctaggcactaatactcaagtcttgattttgttttatagtttggagggtttgtataaaattagtgcatactttccaaggcttacaactgtattttttataagactaaatataaaacataaatttaattttaaaaagagtataataatgttactgaaaatttaataggtaaagatatcacccatactttttctgtttatttgttttatgtggttatagttaatgtgtatataattttatcttactttctttaatttacattgtaaccaaaccatcatgattttagagtgtgtttttctaacagattagaaatgtgtttatctgtcacaatctgttttttttttccaaattatgatttgtttctaaaatgtcttctacaggttacggctccttttacagtctgttgtggatgctaatatgaatactcttcgggtttggggaggaggaatttatgagcaggatgaattctatgaactctgtgatgaactaggaataatggtgagaagttgatagcattttatatattgataagttactatatcctcagtttgactgccaatgttctgaatgatgcaattgccccagtctcagagctaggaatgatattccatttggggctataggaataaatggcatcttgtaaaccaagarccataggtgatcaactaccataattatttatttttaaatgatagatatcctgtaaattatttatatcccagtatacatatacctacttttaaaataattttctttgtgatatttaggtatgcatataaaagaaaacaaaatatttaaaacacttaaaggagatctgacgaaacctaaagagaagaaaaataataaaattaagtaaagaaaaggtgtgtttcatattgtttttctaaattttttctaattttttatttttaatttgttaaaaattaaaaatgttgcccaggctggagtgcaatggtgcaatctcagcttactgcaccctcctccaccccaggttcaagcgattctcctgcctcaacctccggagcagctgggattacaggcatgtgctaaattttgtatttttagtaaattagcatccagctaatttttgtatttttagtagagatggggtttcaccgtgttgtccaggctggccttgaactcctgacctcaggtgatccacctgcctctgcctcccaaagtggtgagattacaggtgtgagccactgtacctggccctaatattgttattaagtacttttaatgtgttttgcaattgtgaggataaagcaaagaaaatatattctgttagttctattattgttgttctaaaatataaagagtgccaccgaagactaggaattattctaataatgataatgctgatggtcattgtgacgatgacaatattctataatattctctgagtgccaggcattgttctaagtgctctacatattttatcttcatgcccattcaatgatgtagttactattctctatccccatttacagataaggaaactgacacatgaagaggttatatattttatccaaactctaacaactcatttatggtggaatgaaattccgactcagacaggctgctttggggctatgatcttttttttttttgatatggagtctggctctgttgcctaggctggaatgcagtggtgcgatcttggttcactgcagccttcacctcctgggttcaagcgattctcctgcctcagcctaccaagtagctgggattacagatgtgtgtcaccacgcccggctaatttttatatttctttcttttttttttgagacggagtcttgctctgtcacccaggctggagtgcagtggcacaatcttggctcactgcaagctctgcctcctgggttcacgccattctcctgcctcagcctcccgagtagctgggaccacaggcgctcaccaccttgcccggctaattttttgtacttttagtagagacggggtttcaccgtgttagccaggatggtctcgatctcctgacctcgtgatctgcccaccttggcctcccaaaattctgggattacaggcgtgagccaccgcgcctggcctaatttttgtatttctagtagagaccgggtttcaccattttggccaggctggtctcgaactcttgacctcaggtgatacgccccgcctcagcctcccaaagtgctgggattacaggcgtgagccactgctcccagcaggggctgtgttcttaaccattgcatcacacagcctccttaggaagggacttatatggtttcattactaaaatgtgcatgtagtaatccttttgtctatgaaaagctaattcctttataaatgaagtatgattcttaacagtctggtgcatctcaataccaaatgcctggtgaaaattggaatgaattaggagtgacaaggggctggagggaagcctcattctgtgtcccctccacacattttttctttttcaaattcttccatcttctctttcttctatacctgcctaggattttctcttctcagattttgtgcagttctgggaagtcctaatgtctttgatacatttcttggtatcaaattatgcataatggcgccccagtgatcacactcatcaggctaactggatttttcatttgtgtgaaagataatgcccagagctcagaataaagactytcttctgtgtaataaaacttatggaagtgttgcattcccttttatttgatttgctaggtatggcaggattttatgtttgcctgtgccctttatccaactgatcagggcttcctggattcagtgacagcagaagttgcctaccaggtatgttactacccttccaagaagaaataaaacaaataatatgttttagtattgccttttgttaaatcttscttcattttggtttttgttctctactaaatcccawkaaaaattacacagccaggtaattgacatcctaggtgattgtacccagtgtcatggctttaccatcatctattggctgatgactcccagatttatccccagtcctgatttctctgctgaattcctctttcttatatccaactgcctacctggtgcctctgcttggaggtttaacaggcatctgaaatgtaacatgtacaaactaaacttatattgcaccccctccccaatcttgcttcttctgaagttttctccatctcagcaaacagcaacaccactgtttgaattgctcaggagaaagtttaaattgattattgattccttgatttattttagattccacatattgacatttatatttatattcacagatatataaatgcaaggaagtgattatatgctttctctgcctactgaaaagatctagaaataatgcccaacgttgtagtgttgagtattcttatattgaagtaatctttcctgttaagagaaaagctyagagaaatggccgactccaggtctggcacaggaaatatataaaatgatcctggatatcttcttttcacaaatggcaatggtgttaatataatattatcaactgataattttagccacagatctgaggtttatgagctgtgtgctgaatatacttatttttgcagcaaggtctgtttaggggatgatcatgctttgaaacacagattgcattatatttcctctcccctaaatattaagtgcatggcatgggtttccatgtagaatcagagtgggatgcttgtcaatacatgaaaattctgaattatgatgtactcccaaaatacagtttagaaaccaacttgtgagtgtatcatatgctagtaaaatactactgaaacatcggactgattcattagcatccattggaaatgatcactgcaccaggagatcacccctaccttgtaaagagtttgcaagactgtggagacatattgagtttttatagtgctctgcaacatgttaaagaaggaaacaaatccattttctcggtaacctcaggtaaagctacaatgtggataattattgactctgatttcaatttctcatgtccaactgtctgccagattttttgtaatgttgatatacaaagaacaaatattttgatatttcttcttgaatggtgagtctgcaaccttagggaggtcactttacctcttgagcctcaatttctgtatctataactctagtatgatgtcactcctcatgaaactgtttcaaaaattaaataggataatacgtgtaagtcatgcagttcaaaagaaataacaaataatagcagctgtcacactaactcagcgtgtcttcaaagtacatctattatcttttccccagtgcactctttcaagatttttctttttagcaggaaatatgaaagtcattgatactttcttctttctcacctcccacatccatctggttttaagttgagacaattttttgatatcaatgttactagtatttgtatttactttctcacccccgtgcttactactctaattcaaatcctatttttccctctcctcaatcattgcatttgttttctgattggactccctagcattggtctctttcaatatgtgcatactcaacagagctgccaaagtcatcttccactgacacattttaagtcataccacattcctgctcagaaccctgatcctggaatatctcaacatgcagataacaaggaagctatcaaagttatgtcaaaaggattttgagagactctgaacaaccaaaagggggacaatttgagattcaataaagataaggatgtcaatgaattgaatccatcaagtgtgttaaaatctagagttcatattatagtgtctgcagatgtatattttgtgaaaaaccatacagaaatgcaaggaagcgatttctattacactatgatactctagatagtggttacttttggaaggaggaaggggctgtgattaggaagaggcacgtggatggcttccggcctggctgcactgggtggtggctacaagggtgattgccttatgataattgaccgtgtcataatttgttttctgtaactgtgtttcattttaaaataaaaggtttaaaaagtacaatcgaactccttccctagccaacacttcccctgaggtggcttcttgacctctgggtaaggtgtaagatcctcttaatgcgggactccggccagctggtgtctgcacctgttcaggcaccatctccatcttgctgtctatgtcctggaacatcttccccatccactgcccttgtgagccacctcctttgttctcctttggcccctcttaccttaagcatgggaaaaatcttttgccttttgagacacacatcacactttgaattacttgttcaaggatttgtcacctctgcaagattgtcatctccctgaggcctaggactcattcccctctgcgtccccactctgtggattattcacaaagtggatagatgaatggatgaatgaataactgtaaacatattaattgtagttacacaggttgcaagcatttcagttttatttttagttttctttcgtataaataattaaaatctaacatttatgtatcttcagttctttgatgcattattaaagataaggagagccattgcatgcaaagtttgttaaaattttaaagtaaagcttaccataaaactctaagtcagcttgagggttgtgtgtaacacggtgctactgaagctttttgccacttcaggatttatatttgtattttcatcagtggcataaatatgtcagtcacagttggtagcagctgtccctttcttgggcatgtacaaagacaaaaaaaggaaatagtgtttatatggctggctgagaaaaacacaagacttaatttttttaaaaatgaaatatatctctttaatataccttcagtgcatctctatttcatctatgtgagtttctgagcttcttgaatggagaacacattgagagcatcagtggggggcaatcagtgtaatcatgcatcacagcgaargtgaacctataaatatcaatgaggtaacattgccaaaacatgttccaaaagaatttttcttgaccattgactcactctgccattctcagaggaatttaattgctctctactggggcacatgtcctagtgtattagaagaagggacatgtctgaatctgtccagtgcaaacataacacaagtggatccttttgtctttatgtagggccagcccagatgagctcagtttatgcaggcctcgtgtggcacggttttcaggtagattctctaattttcccttttatatttaggtacattcagtaacttaatgttagttgatttctcaggacacgacattgatagttatttcaggagacatcaaccctgattgccctaatctgttttcctttagagtattccatatttgtctttaactgccagcatacctctagtactcacttgctttgtaaaaccttctctagttccccttctggttttctgatctcagtgaggactgcataggaacctccgtccttctttcagtggtagtgtttgctttgcttcatttatttcttcacacagaactccaatttgtccaatttgctcttaagaaccaatccccaaaatataatgtctcctgccttttgtatttcctgaaagttttctttgtggcaatccacagagtgaagagtttattcattccccttttctttctctttctaaaaaagggattatattatcttcagtttttatatagcagagaagagaaaccctatgtatcagtgtttataaaatctagttaaaaagaatctcagagatttcttaaaatgkattcctgcagctaacatgactagccattttcaaattaggtttttggcacataagaatttatgtgcagaaatgcaagggctttaattttatgagtaattatagctctgaattttttatgttaactctttgaaaatcattttatgttttcttaattttcagatcaagagactgaaatctcatccttctatcatcatatggagtggcaataatgaaaatgaggaggcgctgatgatgaattggtatcatatcagtttcactgaccggccaatctacatcaaggactatgtgacactctatgtgaaaaacatcagagagctcgtactggcagtaagtaatgatttttaatgcagtagaatttaagaatgtatctttagggctgggcgtggtggctcacgcctgtaatcccagcactttgggaggctgaggcgggcggatcacaaggtcaggagatcgagaccacggtgaaaccccgtctctactaaaaatacaaaaaaaattagctgggcgcggtggcgggcgcctgtagtcccagctactcgggaggctgaggcaggagcatggcgtgaacccggaaggtagagcttgcagtgagccgagatcgcgccactgcactccagcctgggcgacagggcgagactccgtctcaaaaaaaaaaaaaaagaatgtatgtttaaagtggataagtttgaatactggtatagtatgttttatgcccctttttagggctgtcttcaacagtatcgtttgaatacagggtatcccattgtagtgcagcagcagatgaaaggattcatgggctgtggactttttggaggattaacttctctgtgcagctctccacacatacaccaatgcagtgcttacaatgctaggttgtcacatgctccttggagtccatccgtggatcccaaaaagtttagaatctctagattcgatgattattgatatgccacttctaaaattctgtaatcgtatgtgttaaagtagtagactttggtatatatcacatatgaatgtcctggtatgtgatttaagggacaaagagagatgagagagctggtctccaaccccgctgtatggcccttgctctatagtggttctctttgcaccactgtttgtctaattggcatattatacagacatatgttaatataaattggcctttttgtgagaaaaagcagcatttttttcagtaatgccttcaaaagttttaacttttgaaaaactttgtttaacatgtgatttaataatctggttgtctttacacttttgtgtctgtaaatagatgttttaaatatctgggtatatccagaagcaatttgaaaaggcatctattttttaaaatagtatgtgatattagcacctaaacatgcccagtttatggcactattccatttatagaagaaacttcattgagaattcatgaaaaacatgggttcaaatttatagtttacctgatatactaagacatgtgtcatgaagaatttttctattcacaaaatgtgatgatacaaattttaaaaaatatttacagaacacttattttataatctttttattcacaatattgatattatgtttttcatgtttgatggatttatagtttctgagggttttcattttatagcatagtggttaagtatgcaggctttgaaatcctggctgggccacttcctgtctatgtaaccttgggtgagttacttaatcctccttttcccatctataaaattaggttaaaaataggagctaacttttaagagctgttatgtggactaagtgagataatggatggaaggcacatgactcagtctgacgcatagtaacttttttttttttaaagttaaaatatttctttggggcaggggacaacacatttctgcttaatgaaaagaaatatttttacagtccagagctcttttattttttaaacacctgttatgccatgcattcatagggaacaggttctagaaactcaggctctgttccattggttctcacagtgcacttctctgggtggagccagctgtgcttccattgaactcaggctcctttctctttggcttccttctttttcttttcctttgtttccttcttgagttttggggagctatcttggctcctagagtgcttaatatgctcaacacattaattatcttggcaacaatcttgcacttgtttgtttacaacagtgccaacagcatgctgggtagcacagtagactcctctggttttcccacattaacgtttgtggggcattcctttttgaaccagatgcatttccctgatgtctacatcacctttcttgtagattcacatgtatatggccaaaggaacaactccatattttctaaaaggcctagagaatatcaggtgcctttcctctttccctttgcgtgtcatcgttgtagtgaattactgaaagatggtggttcacagtaacttttttttttttttttttttgagatggagtctcatctgtctcatctgtcaccaggctggagtgcagtagtgcggtcttggctcactgcaagctctgcctcctgggttcaagcaattctcccgagtagcctcagcctcccgagtagctgggattacgggcatgcaccaccacacccagctaatttttgtatttttcatagagacagggtttcagcatgttggccagaatggtctcaatctcctgacctcctgctccacccacctcggcctccgaaagtgctgggattacaggtgtgagccaccacgcctggcccacagtaaccttttaattaaaactagccatcgtcatcatcatcatcatcatccttattgcttttgttcaacaaggtagatcttcagatacttacacattttgatcattaattttaacactacattcttaagctttaaaaaattagcttctttgtgccatttcttttttacctctgaaatggagatatgcctttctttttagggacttabttatcttaaaabgagccakgggcaataactgatgtttgtaaattttttcaaagatgaatagtattaaaagctacataaccactactgcttttagtttccatcaaagtattaggcatcataaaaagggaaagtaccataaattgattcatctacaaattggctgtaatgattggtttcctgctgcacatgctttctttttatggccattctcttggatcaccttatggtatttcctggtccaactaagggtttaaggtcatggcttagaaagatgtcatctgtgagatttgcaacaaataaccacacctcaagaataaaggatttataagtggaaggaaattataatgcatcgtcaaagccagatatttttaggtagagacttgtttgtaattttactgcatggctcagcgtgccaaatttctcaagaatctcaaggaatgaagggaaatctgtcaagcttgatcaatcaaggccaattgactggccttcttcttcaatgttcttcaaagccattgtagcaaaaatatttttaaacatttagtatcacctatagtttcatcatactttttaatatttttaaattcacccaacatctactgagtacttattgccaagagcaaagcctcattcccgatgctgtgggggacactcttatctttgtggagcttacactctgctgtcaaagggaaacatgggaaaaattatcagaccttgggcagttaaaaaaagtgctataaaaaatgtagcttcaaaatgctgggaactatgtggcagaaccattaattttaactgaaagaatctaaaaaggctttcgagtaaaaggttacattcaagggaaaccttacaggtggagaattttgaggcaaagcattgtctagtagtactttaggtcatgaaaacaatgtaaataaaggtaaaaagatgtgaaagtaggtggtatgtataatgagcagcaagcagtgcctggtgcctaagagcaagggactcctggattactgtgggagaatggaaggtagtgaagactggaagcaggtcatagagggactttaaatcatattatggagttgagcttattcggtagatggtgggaagctagtggacattttgggggagaggaggaactttatctggtccatgtttatggaagattactagcaaagattagggaggtgagaggttctaaacaaggaaaccagttataacaactaagaactccaagttactgagatgccaggcatcaatatattaattataattattatattaatattattatatattaatatattaaattaaagctggatgtggtgacttacacctgtaaccccagtgacttgggagctgaggcagggggaacatttgaggccaggagtttgagaccagcctgggtgatgtagccagatcctgtctccaaaaaaatttaaaaaattctttgggcatagtgacatgtgcctgtagtcctagctacttgggaagctgaggcgggaggcttattttgagcccagaaggtcgaggctgcagtgagctatgatcatgccactgcactccagcctgggcaacattctgtcttttaacaattttttttaaattttaaaaaacaaatttttaaaaagttaattatgtaagtgctttgtataatttatttacttaatttttagaagttacctggagtgtaggtgatatatttattttagagtcattaagtccccaaggtcatggaggtcataggtagtggagtccagtggtgtgggattggaaattcggtgatggaaaaaaatatctgaatgtagagttgctactactcagagtgactgaatgtgggaggtaagagagggagaaattgaagatgactccaatctgggtaccgttcagcaagaaagggagcatagtcagataagtttggaattagtaaataaagaattctgctttaaaaggttggatttgcgatgttggcaagacaacacaggtggaaatgtggagctggttatcagcaatgtgtggtggtgaacatgaggtcaagtgtgcaggtgtggctaggagtaatcagaacatccatgtgacgggaagccatgggacagggtgtagaacaaggagaagcctgagagagaggtagagtgtccatctggggatggagagggtagctggagaaggaagaatcaggaaggttgggggaaactggaatgtggaagaattgtgaacaaacagccaggagtggagagagcttcagaaataataggtggtaaatagggtcatttattgcacacctgagagggaataagtggggacagaaagaactgctttatttagtaagtagaagttcatgggtaatttttgaaaaacatttcagtggagtgaaatgatcaggaaatgaatgtcaggggtttaggaatgagaggatggtaaagaaatctgatggactrcaagggatcaaagggactttttattaggataaagggagtcctaaggaagctaagggaaaagggcagtagagggagattaagaaaaaaatggagtggaagatagtttgttggctatagtaccaaagcaaactagaaagatgaccagaacacagagtctggcaaaggaaagggttaaggatttttttttcttaatagcagaatagaaacaagaaatgaaatatgaatggatataccacgaaaaagtgaaacctaatggtgaaaagttgagaaaattattttctggaagtctatctctcagggaaggcttactggccttctgtaatatgttttacattcccaaagagccttgcgcttttccttcaaaatattcatcatacttataattacttgttcagtatctggtttcagcactaaattgccatctactcttccaagacggtcaccatggctgtctgctgaacctccagcacatagaaagaactgcatgcctggccaataggaaatactcaaaagagatttgttgtataagtacttgacagagtcatagattctctctctttctctctctctctctttctctgtctctctccctccctctgcagtgtggaaaaatgccagacacaatagacttgacgaatacttgctaaatgaatgaatcttctcagtgaaataggaagtagtctcatctactgagatgatagtaactatattttgagttctcacagtgtgctaggcaccctgttaagtgcttacatgctagatgttgtaacaggtaagccacagtatttcagtggtttacataataaaagtgtatttcttcctcactgacactatgaaagggctgctggcagctcctctttcagagatatagacaccttattccagctgcaccatctcttgcaccctcagctgcaaatgggggcagaggatgagaatgaggcacatggccccatatgggctaggaagccacttcctagggatggctctatattacagaaacgagaacatgaattggtggacacctagccattactttcacatgagagttatttactatttataatacctctaaaggaggtactattattatcctcatyttacagataaatctaccaaggcttagacctgtccacaaataataaggttcagatttgagatttaaagtcacgtttgggtccatctgactcagtagcttctgttcttacctgttagacctgtggttctcaagtgatggtgattttgcccccatggaacatttggcagtgcctgcagacatttttcaaggttgggggaggggtactgacatctgtttggtagaggccagggawgctactaaatatcctacaatgcataagacacccccaaccccagccaaccccaacaaaaacgtatccagctcaaaatgtcaatagtgtcaaagttaagaaactctggactagactgtacaccacccatgatggatgagagtggaggcaaaacatgattgaaaagattaagaacagctgctgtgagggatgagctaagtgttacttatgaaaagatataaaggattggcgaagagcagagaggtgctggtggttgttgaatagggaagaaggtaagtggtcctactaattttctatcagctacttggcatttcagggacttgttagtatttttaaagaagtaaatgatacatactttacaggatgaatatattatccttgaattcattttatttctgaactcagggagacaagagtcgtccttttattacgtccagtcctacaaatggggctgaaactgttgcagaagcctgggtctctcaaaaccctaatagcaattattttggtgatgtacatttttatgactatatcagtgattgctggaactggaaagttttcccaaaagctcgatttgcatctgaatatggatatcagtcctggccgtccttcagtacattagaaaaggtaagtcatcgtttgattttctaatgtttcagaatgatagactgtgggcatgtgtttattctgatcactggttcagaaaatcatatgaaacctacgtcttatttaaatgaaagtttgagaagaagatggaggaaaataatttttttaaacctttggggattacttttctatattgcttttactgtgttccttcaggagcacygaaagcactgaatgggacccagtggttgcttaagcctgacttattatcacacacggaaataactcttacttgctacaataactcttgcttgtaaatcatatcctgcaactgttttaccgtttacagatattcagagctggatatttcactacaggaagagggtaaatgtgataaataaaccttagtctaatgttgtcatcttaccttttctctcctctttctcctcctattccattmccacygcccaccccccccccaccccactcctctctctccctctttttcatcatgttggtgtgttttattttctgtatggattttcactctctctgttcctaaagattccgtttcagcattgtgtgtgttcttcttaaaatagctttattgagatataattcacttgccatacaatgcacccatttaatgtgtacaatttaatagtcttcaatatattcacagagatgtgcagccagcaccacaatttaattttagaacatttttatcactcaaaagaaaccctgaacccattagcaaccactccctatttttccctatccctcctccccagttttaggcactacgaatctactttctgtgtctatagtttccttattcttcatatttcatataattggaataatataatgtgtggtcttttgagactgattctttgactgtgttttcagggttcatccatgttgaccatgtattagtatgttccttttttttattgctgaataacattctgttgcatggatatacactacgttttgtttatctatttatcagttgatggacatttgtgttgtttcctctgtttggctattatgaataatgctgctgggaacatttgtgtacatgttttgtgtgaatacatgttttcaattctactgaatatatatatctaggagtggaattgctgggtcatatggtagctctatctttaacattctaaggaaatgtcaaattgttttctgtagtgattgcaccattttgcatttctaccagcaagggattagggttccaatttttctacatccttgccaacacttgttattttctttttttcttcacatttccctgggaatttacatttacaggaaatttgcatatccttgatggctaatcatgttgagcatttttttttcacgtgcttactggccatttgtatrtcttcctttgagaaatgtctgttcaaatcctttagccattttgttttttaaatagagacagggtcttgctttgttgcccaggctggtgtgcagtggagtggtcacggctcactgcagatttgacctctcaggctgaagcaatcctcctgcctcagcatccccaagaagctgggactacaagtgtgtgccaccacacccagctaatttttgtattttttatagagacggagtttcaccaaatcatccaggctggtctggaactcctgagctcaagtgatcttcctacctcgggctcccaaagtgctgggcttacaggtgtgagccactatgcatggcctgatcattttaaaattatttgtctttattttattgaattatgaaaattaaaaaaatatattctggctataagattttatcaggtatatgatttgcaaatattttctcccagtctgtgggttgtcaccttattcactttgatggtatcacttacagcacaaaaaatttaaattttgatgaagttttacttaccaatctgttctttttggtgttgcatctgagaaatcattgcctcaccccaaatggcaaaggtttatttctgtgttgtcttctaagaattttatagttttagctcttgcattcaagtctatgatcattttgggttattttttatgtatggtagaaggtaggagttcaggttcattcttctgcatgtgtatagccagttgttccaatagcatgtattaaaaacactattctttcccccattaaattcttttggccctgaaaatcaattgaccataaaagttagggtttatttctgaattctcaattctgttccagtggcatatttcatgtcactatgcactgtcttgattactatagctttgtagtaagttttgacattaggaagtgtgagtccaccaattttgttctttttttcaagatttctttttactatcctgggtggcttgcatttccaaatgagtcttgggatctatttgccaatttctgcagaaaagctagctgggattttgatagagattatgttgaatctgttgatcagtttgtgagtattgccatctagtaatattaaatcttctgatgcatgaacatgggatgtcttctttaatttctttcaacactgtagttttcagtgtaccagtcttacgcttctttggtttactttttcctaagtgttttattcttcctgacgctattgtaaataaattattttcttaatttcatttttaggttgttcattgctaacgtataaaaatacagatgatttttgtatattgcgcttgaatcctacaaagtggctgatctcatttattagctctaataatattttggaggatattctttagcattttctatatataagatcatgtcatctataaatagagatattaataatattgcttcttcctttccaatctggaagccttttatttcattttcttaatttccctggctagaacttttcatacaatgtagaaaatgagtgggaagacgagatatccttgagttgttctttttcttagggagtacatttcaatgatttaccatttagtgttatattgacaataggtttttagtagatgtcctttataaggtcaaggaaggtcccttttatttctagttagctgagtgcttatatcatgaaagaatgttgcatttttcaagtgctttttcttcatctattgaaatgattatgtgattttgctccccctgcatcagttgtataaagtaaccaaaaaaagtcttttaagacaatttcaaaatctttttcaatttcgctacctgaacacaactataatttgcttatacacattgaagttatattgtacttttaactttaatgatgtcataaccttagctctacctttggttttttaaaattaaaaaattaattaacgaaaaattgtatatacttatcgtgtactacgtgatgttttgaaacatatatacattgtgaaattccataccccgttttttaattgctcccaaattgtggggctaatcttttgggaatactgttgtttcagagtgaaggaggatgaagttcagtatcctgackcaggtaggaacaagtgttgagaatgggaaggaaggaatgaaggaagcaagaatatttactgaataattgctgtgtaccacgtactcattctttaattcgacaatratctacccactccactttgagacccagggggaaatcaaagtactgcaagaggtcacagatagatctcccaccctgcagtgctttgatttccttttgggcctcaggcaaagtggagtgggtagagtattgtctaataaaagagtgaggacctggcacacaagcaataattcagtaaatattcttgcttccttcattccttccttcccattctcracaataagtagctgggttcagacttactctctgtctccagagctgatagattttcttttcaccacgctttagaaagattagtgttagaaattgctaaaccttttccttaaatctataataatttctactggcctccttcaaataatggaattatttttatcccatatttttgtgaaatgcctgatgatgttcagagataataaacactatattttaaaatagaaaaagttgaggataagtgctgctcattatgaatcatttgttatctcttgatttactcatctttttttaagctacactgcttagttgagaatttgaataggtgattgggaaaataaaataaaccaaaagaaaaactaaataaaactttggctcttttatttagaagctctttcatgtattcaacaacttgattaaaacatatctctttaatttgggatacattgatttttcataaaatataattttaacatgtgattatcaatattgcacggtgattaaaagtttgggctttggaataaacagaactggattgaatatgacagctgccattcattatctgtatcatcttggacagattatttaatctttctgaatttcagtttcctcatctgtaaattggggttaatggtagtaaataccttgtgtgtgtgtgtgtgtgtgtgtgtgtgtgtgtgtgtgcatgtagatctgcatatgygcgtgtgtttatgagtaaagattaagttaactaatacattgaagcactcagcactctacctgacacagtgagagcccatgaaatgtaaactatttacctttagtatagaccattttaaccatatgatttgtatgacagttcgattttcttcagatccttctgggtttaatgaactagggactggagctagactgcattagatttggatactgaagaagttatctaacctttctgtgcctggttttcacatctgtaaaatggggtgataatagtacctactcatagagcttgttttgttttttgttttgagagagggtctagctgtgtcacccaggctggagtgcagtggcgtgatcacaactcactgcagcctcaaactcgtgggctcaagcaatcatcccactttagcctcccaagtagctgggactacaggcatgtgccaccacaccaggctrattttttatttttctttttgtagagatggggtctcactacrttgtccaggctggtcttgaactcctgggctcaagcaatcctcccacctcagcctcccaaagtgctgggattacaggtgtgaaacactgcatccggccgggtttttatgagtacyaaataagttaatattctttttttaaaaaaagttaatattcttaaagtaattagaactttgcctggccatttccagttctttctggtaatattattatagctgaaatttgaaagattttcacaccatagttatgagaaggtagaaagcctcccacgtaactaaagatcaggtttactgattatgggatagattcaaattattacaaataagaaggctgcatggcccaaaggtatatttcagactttgaaaaggaggaaggacactccaatgtgaaagctaaaaaagttcagctcaaagaagtagagtggaataatgattactagagggtggaagggttgccagggagggacaatagagttggttaattgatasaaaagtatagctagatgggaagaataagttctggtgttctatagcactttgggrtaactatagttaataataatttattgtatattttcaaatagctagaagagataattttgagtgttcccgacacaaagaaatgataaatgtttgaggtgatgaatttgcttattagcctgatttgatccttatacattgtatacatgtatcaaattataacatggtaccccataaatgtgtacacttattgtgtcaaaaataataaacataaataaaataaattaagaggaggaagcrtaggaagactattgataaaggatgtgtgtctaaaaagtgtgcgagatgattgtcaatgtgaatctctcctttaaatacataataggagtagttagcattatttaattctggtggtggcattttggaaaaacatctrtaattaggaaaaacttccaaatttaatatggctagtgtacatttcttatatttgggtatgaatcagttcctgaaggataaccttttccttttaaggtaatgggcccatgtgttgcttgattactgggaatgaaaagtcatactttatgaacagggattaagcttttttaattttcaggtttttgggtggaggggmagagtatgttttttcaaagtctgtgtaacttgaattaaaactctggatattttcagatgtagccagcaattgtcttctttcttaaatgctaacagtgcattaaattataggcctagaagccagaattattgcttttttctctttttttgtagaaggtatactccaacatatgtgagttttttttactttgttttttaatttgagctgacgacaaaagaaagatcctgtaagttaggggataaaataaagatcctataatttgggcctggcttaaaccataaaaaattgattttttaggggagagaagtaayattatttggtttgtgtcttcaactatataaaaattaaacatatgtatatcagtttcatttagtaatcactgagaaacaagtgaacagtgtaagtgctaaagcatctactctcatagtatycctattatagtgtaataggtgttttattcctatttaagaattgtgacagttttaacagtgttgattgcattctattaagttttgacaaacgaatactagataaaatgtttacctaagtagataaaatgatatttaaaaatacatatagtggatgtttcaaaaaccaggaatatgttttgataaaacaagagtcttaagagaaacatcaaaatataactttcttagttggaggaagggaggatatatgtaccaaaccctggttttgtgattccagtttccacaaggctagtccttcactggcaacaagtaggatggtaaaacatttatgaaactggagccacagaacaaacctcaaggtcttctctagtgtttaggatactttccaggtttgtcaggaacttatagaaaagtagttttactgccaactttcagatttctaattcttattmtttatttgaaaggtctcgtctacagaggactggtctttcaatagcaagttttcacttcatcgacaacatcacgaaggtggtaacaaacaaatgctttatcaggctggacttcatttcaaactcccccaaagcacagatccattacgcacatttaaagataccatctaccttactcaggtaagttgttttcattctagaattgaacaggttcctgcaattaatgtaagagattatgtagattttgtaggccatatatggtgaaaaatattcaggttttcattccactggttaaggaatttattttcttcaaagaacatatatgatgacacataggacatgaaatagttcatttttggcatttgcctctcttacaaaaacagctcacaaaattctgaaataaattgtgtatgaaaatattctctacttcaagattgctctaaaggkttagtaattaagacagtgccatttcccaaggataaaatagaacaatggracacaatagagtccagaaacagatcactgtataatatggacacctgatttatggctgtgatgccaccacaattgagtatgagaacaatcattttatcaataaacagtggtgaatcacgtggatacctttatgggaaaagaaatgaacttgactccatatacaagttaatttgattgttgagcatggtggcacacacctgtagtcccaactacttgggaggctgaggtgggaggattgattgagcctaggagtttgagaccagcctgggcaaaatgtcaagaaccctatctctaaaaaataataataaattttagaaacttcatttgaccaatgactgaagactcaaatgtgaaaggtactacaataaagcttcgagaaaacatggaatagcttcatgattttgggataggtgagagtttttatatagaacataaaaagcactaactagaaaagaaagtattgataaattatactccattgaaattatggacaccattaagtataaaaaacaccattaagagagagaaaaggcaagccacaaattggggaccaatagttttaattcatatatttgataaaaagatttgtatccagaataaagcaataagaaaaagtcagacaatctatttaaaaatggacaaaaatcttgaactggagcttcactaaagaagatatccaaagcgtcaataaatatctgaaaatgtgcccaatcttgttgtaaatcaagaacatgcaaattaaagccataccagtatacccctacacacccagcagaatggctaaaattaaaaagattgataataacaactgctggtgaggaagcgagacagctggaaattttagacattgttagtaggagtttaaatttgtttaaccactttggaaaattttatggcagtttctacctaagctaaatgtttgcttcccttttgaatcagcatttctgctcctagctatgcactaggaaaaatgagttcatatgtccaccaatggatatctcaaataatgttcatagcagcattattcacaatagccccaaagtagaaacaacctaaatgtcttttaacaggagaatttataaacaaattgtagtatattcatacagtggaatactccacagcaataaaaaaagaataaactactgataatcagcatcagcttggatgagtcttgcaggtattacattgagtaaaagaaaccagacataaaaggatacataactgtactgatttcttctatattgaaatttaagtatattatagaaaaaagtacatattagaaaaaaaaacaatcaagatgatagagagcaaagtagtattaactacacttgtggaggagggtgtgagcaatgattaggaaggggtacaagagaactttctgttttctatcttgatctgagtggtagtcacatggatgtgtgcatgtatcaaaagatttgtgaatgttatggcatgcaccttgctggattttaaaaacagttctatcaagttttgatggacatatcataaaattcacacatcttaagggtacagttaagtgatatttatagagtggtgcaaccatcactatgatccaattttagaatatttctgtcattctaaaaagatcccttgtacccatttacagtcactcccctttcccacctccagctgcaagacaacataaatctattttctgtctctatagattttacttttctcaacattttatataaatggaattatacaatatgtgatcttttgcatctggcttctttcacctagcataaagtttttgaagatcatccatgttatagcatgtatagttcatgtcctttttcttgccaaatactattcagttttatggttatacacattttgcttatccattcgtcaggttcatctgttgctggacatttgttatatcgtattccaatttttggctattatgaataatgctgttaggaatactcatatacaaatcttcgtatggacatagatttccttttcaaagggtagaaatggaatttctgagttatataacaaatttatgtattttttttaagaaactgccaaactgaattttggataatgktttcattttacttttttcattygcctattttagttcatgaacctgtgaccacacttaagactccattaaagtcgctgtttatttacctgctagttttgccatacttgtttaaagttcttagagaggaggtaaaagcctaatcccaataataaagttgatctgaagtagacaggaaatttttaaaaacataatcacagttaaattttcctatcttagtatctaaaaatgtatgaattttaatccaaactcatgctcacaccttcatcagttttctcctgtatgaaaacacaaaccccatgatagaaactaaagcagaaaactgtaagctgaaagaataatcttttttagaaggtgatgaaatgattaggagaattttaatgtttcaatcataatcttataggttaggaaagttttgccagggttatatgtaattcatgaacttaccagaacacaaggttaaaggcaatgttggtatctgtcccttgaaaagtgttgcactttatctttcaagttttccacagataatactctgttaaagtgttctgacatataaaataggctgattattatttgtgtgtgtgtgtgtataagagacttttctgctattgttttttatgctggatttcctccttccagctgtttattactctaactttattcttttcctcaaaattatattccaagaactgatagaaataatttttcttttctgaacttatcagcattcaaggtccatagttaggaactgggcatgcaagtggagttatttgttgccagtttttgttggtgatggttttgtctgagaatttagcactagtgtcctctcaggctttggctcagaattggacttgtcctcgtgtggcttgttagtgtctaccttggcactttccaacatactagatgctatctgtgatgaaagaaatcaggattatgattattttattttgttttcagtgtcagattttcttgactgaaatacagacaggaaatgttagggttttagggtttttccttgttactttgattttagaacagtcctctttaatctgtgtattagaaataaaacccttctctgttccactttctatgttcctactccaacccctgttctttttctcatagtctgtcatactgttctgaagaacagagtgcttgcctatgtgccactttttagaagatttattaattaaggaatatttgcaactgttagcaaagtcttcgctgagaaaactgtccagtaaatttcttcacgtttggatccttccctatcttctctttgtcttatagccaaaaagatatccctatgggctcctgcctctttaattctcctagtattccaggataatcttgccttaccttttactctccctcttgccctgttatattgtattcccaatagcccatatacatgagcacaccctctttagctatgttacacagatctcactctctagtttgaggaccaactatctaaatgaacatatctaaactaacttttgagtgtcttactctaccagcacggcctcttattggccactaagagagcaggccaggccaaggacattaattaccaagcccttagcttacagccttttctagtgcttttgtttattcttcatgtgtctattgaatatctaatgatggcttggggatgttcttgagaaactcattttctttagaggcccattttatcttcctgtgctgtaagtaacttgatcataagaactaggacaaaaggtaggtgatgctgtaggcccaggttttgatgatacctgctgccctggaatggttatttgtttggtaagtagcactgagacacgatggaagatccaggtcatactgagcttttaagatgagagtagggtgggcaaaggaggggaatgaaagagtgaccattaacattgtgtattatatattaggagtttgtataggcatcatgtaatttaataatcaagcmaatatgtagcattctttgggtatctactaaatgcctgcctggtcctgggtcatgaactgctttgtaaatcttatcatttaattctcacattatctccagacacccatatcactctttccatttcatacatgaggaaacagagtctcagaaaagttaaatattttgcctaaggactcagggcaatgaatggagtagggtttctgctttttaaactgtaatattctatcccttcacagttgcaataatggtgtttggttaaattgttaacagtaattttcagcaattaagtaaagtgggcatcagaaatttggcacattaaataaagacctcattagaacactggagaaaaccagtgaagccaaaagttagttctttgaatagatcaacaaaattgacaaacctttagttagactggcccagaaaaaagagaggacacttgaattactaagtcaggaatgaaagaggaaatattactactcaccttaccaaaataaataaggtgataagagaatatatacacaattatatggcaacaagtcagttaatttagatgaaatggatgaattcctagagaaacaacccatgaaaactgaattaagaagaaatagaaaatcttaatagccctataacaactaaggagattgagttagttaaaaaacaaaaacaaacaaaaaaaccttcccgtaaaaagaaaaatccaggaccagatggcttcactagtgaattctaagaatgtttaaagaagaattaaaagaaacccctcattaactccctaaaaaattagtaataagaggaggaaacacttaactcattctgtgaagccaacattactgtgataccaaaaccagacaaacatatctcatgaaaagcaacctacagactcatatcatttgtgaatgtagacagaaaaaaatcctcaataaaatggtatcaatccaaatccagcagcatatacaaaggattatatagcataactatgtgggaaatatcccaggaatgcaagattgattcgatatatgaaagttaatcagtataataaaccatattagtaaagaaagaaaaaatacacatgatcatctcaataaatgaagaaaaagcatttgacaaatcttatactgttgaaaaaaagattttaaaacttacttcaaagctgtagtaatcaggacagtgtggtaatgacaaaagacaaggtatatataatagattgattcaataaaattgagaatccaggaacaaatatacatttatggtcaactgattttctttttttaaaaaaattaatatttctttattttaattgataaattaaaaatatatatttgtggtgtacaacatgatgttttggtatatgtgtacattatggaatggctaattcaagctgttaaacatatgcattgcttcacgtacttatcttttttgtagtgagaacacttaaaatctaccctgttagcaattttcaaatatacaatacattattaattatagttaccatgttttacaatagatctcttgaacttatttctcctaattgaaattttgtattcattgaccagcatctccttggtacttcctctttcccccatccagcccaccattctactctgtgcttctatgagtttaacttttttcaattccatgtatacgtgagatcatgtagtatttgtttgtctgtgcatgacttatttcacttaacatgatgtcctccagtttcttccaggttgtcacaactgacaggatttcctttatttttaaggctggatcgtattctattgtgtatatgtatcacattttctttatgtactcatctgttgatttcatatcttggctattgtaaataatgctgtaatgaacatgggagtgtggatatctcttcaacatactgatttcatttcctttggatagatacacagtagtgggactgctggatcatatagtagttctatttttaatagtttgggaagcctccatactgttttgcataatggctgtactaatttacattccaaatggtaaaaagaataaaatgggaggaagaatcatgttttcaacaagtggtgctggaacaattggatatccacatgcaaaagaataaattcagaccactacctcataccatatacaaaaattaactcaaaatggatcaaagatctatatgtaatagctaaaactataaaactcttagaaggaaacataggtataaattttatggcttttggttaggcaacagtttcttaaatttgccatcaaagaaattaaccaaagaaaaaataggcaaattgtatgtcatcaaaaacagaaaacaaaaataccttttgtatggcaaaagacgctatcgagaaaatgaaaagataatccccagaatgaaagaaaaaatttacaaaccatatgtctgatagggatccagcatccagaatatataaagaactcttagaactcaatagtgaaaaagacaacccaattgaaaaattggtaaaggctttgaataaacacttctttaaagaaaatgaccagtaaacacatagaaagatgctcaacatcattagttattagagaaatgcaaatcaaaaccacagtgagataccagttatatccactacaatatctacaaatttttaaaaaaggaaaataatgagtattggcaaggatgtggagaaattggaaccctcatatgttgctggtgggaatgtaaaacagttcagctgctgcggtaaacagtttgttaattccttaaaaagttagacatagagtttgccatatgacccagcaattttactcttaggtatatatactcaagaaaattgaaagcatatgttcatgcaaaaacctgttcacagattcatagcagcattgttcatagtagccaaaaaggggaaataacctaatttttcagctgacgaatagacaagcaaaatgtagcatctccatacaataaaatattattcagaaataaaaaggaagccagtcacagaagccacatattttatcattccatttatgtgaaatgtccggaataggcaaatcccagaacagaggaagtagattaagtggtttccagaagccggggagaggggaggatggggagtgactgcttcccagtatggtgtttctttttggggtgatgaaaatattctggaattagatagtggaaagagttgtgcaaccttatgactgtgctaaaaaccaatgaattataacctctaaaatgatgaattttatggtatgtgaattatatcttggttttaaaacagctttgttggaagattcttagtgtcgggataattttagtaaataaagtatatagatattgagggaacttagtcacatggctactcaaagtcccaggggttggggtgtgtttctggaaaatgtagtccagctacaactccatcactctggaggaaagggatattggttttggaagacagctagcaaccaccagtggcagtgctggaactggaacttaggtcttcgtatcttgatccaatttcttctcaccataccatctgtctctcataggagactcatttcataagtgtaatcaagcaagctgctgagaataggcatttttttcttttcttcttttttagacagagtctcgctctgttgtccaggctggagtgcagtggcttgatctcggctcactgcaacctctgcctcccaagttcaagccattctcctgcctcagcttcccgagtagctgggactacaggcatgtgccaccacgtccggttaattttttgtatttttagtagagacggggtttcaccgtgttagccaggatgatctccatctcctgacctcgtgattcacccaccccagcctcccaaagtgctgggattacaggcatgagctatcgcgcccagccaaataggcatatttttaaaactaaaattcatttgtctgctaacagtggactggataacctagaaaatgactaagcatttatccctcttatgtgtaaagattgccctttttaggaaaggatgcatggatgtgtaaatataggtacagtttttaaaggggaaggggaagttctagagattttccagggaactaggattgtacaacacccctttaagaagtttagtgggcaatagccttctgcatttttatgaacaaaggtgtcattcattagccttgactggtacccactggtttggatagattcaggtccatgttattagcatggtaccatctgtgtgtggagtgtactgcactgtgccagagcctggagcacaaaagagtcttggttatgctctttcatgctaatttcctgtaagagaggctactagatagagccactttgtgctcttttcttttcattgctagtgagggttaggaatcctacttgcatttaaaattttttcaaattttgaaaattctaaggaactaataagttttacctattaaaccaggaaaaaataacttatagtgaggagattaatgttagaatggatatatagaaataaatatatcttgcagataatgctgaaaattgatatagtttagagactgaaaactcaaatgtttataggggccatggtcattttgaggtggcaccaatgctgcttgctttgtgagattcttgctttagaacattttttccagctactgttgctgtggtcctagtggtctggttcctgaatgagaagacattgctttgtctgctcatagctaaaaccatctcttgcctaaatggtctacctaaatccactctagcccccttgcaagcccttcctccttcagtagtctcagtcatcttttggaaatgtaaatctgctcacatcaccctttagttcaaaagccttttgtgacctccatttgcctttaggatgcacaccaacaccttcaacatgtggccttccagggtctggcccctgcaattctcaccagcttctcttccattgctcccggcttcctgtgctcaggccttcttggccttccttcagttcttagctgacctggcatcctcctccaatggtgtattgtcctctctggaaggttctgccctctctctttttcccattcctcttcttttaggccaatcctcactctacagctctgcccaattgccccaccatatgagcttgtaacattgcatacctcttctacttagcattggtactgtttaatgattacgtatctttctgtgattctttgatgaaggactgtcttctacacaagctgataagctccatatggtgggctgtatcatttttttctggcaggggtgcccaccattctcagtatgtaacatatcctgcaggttcttattaaatatttattgactgaccacaatttcttctggcttccgttctggaatttgatggctgtgactcatgtaagtcataacctcatctatgacttccttactggtcagccttcctctatttaaaggttctacctttatctgagcttttttgcttttatgggaaagcgtctcgacttagtcttttggtggccatatgcaccattctttttattcctctgtgaaaaccccagccctattctaaggccttcttgttctctgaaatcctcgctgctctgaccatctctgggttctcctcagtggtccattcatgagcccctcctcagcacaactccaggctaagagcatgtgattcatatgtgtcggtaayggcagcgataaaagagactgatttttccatgatggtgtcggtaatcaagggtcctgtgtgaagttctttagtgtctcttaaacaagaactaaattcatttgtctcattgctgcaatttgccatctgttctgctacaacgaaggaattgcattcatgagaaatcttacattaccaaaaatcatgacatcaaaacaattgtttgactagaaaaaataattagggattggataatatcagactcataataacaatgttatttttcttatagaattttttctagtaaaagtttttcttaaaaatagctatgaaggtattagcaaaatttttcagtgaaaataatctagttttggactatatatagcatttgctctggaatagtagtctttgtttttctttacggcctacactatcattagcagagaaccttttacaccatcctatttccattgtcaccataatgaaacaccaagtctaccagacaaacccactgttacagacaacagcttctctcatgctaaggggctagttacagatctagtataatgtattcctaatactaattaaattccctaattttatccaaattgctccaaaaagaaaaancccaaaacaaaactaaaccctgtatttttctcagatctaggcagtctacatcaaacaataacacctgtgtatgaatgttttcctgaatcaggtgatgcaggcccagtgtgtcaaaacagaaactgaattctaccgccgtagtcgcagcgagatagtggatcagcaagggcacacgatgggggcactttattggcagttgaatgacatctggcaagctccttcctgggcttctcttggtaagcatttcagcgttctttgtgcgagtgagagaaagcaacactgtggggasagggactgagaaagcacagtgctggaggggtcagattagcccaggcagaactatgaccaaaagagtcattcwttaaaaagcctgcctaggaactacagccacccaactcaccttagtagcctttccatgagccttagggtcaacctaattatgggttctgtgctgtgcaaagttgcaacagcaggctaagcatgggatagattcctatacaaaagtctcagccatgtgtcttgttattacgcatagaattttgaatttatttaagagggcattccagggctaaagaagcatgaacttaagcatcccttcttctgtgttggagaattcaatcaggtagaagtttggcccgcttatgtgttaaagtttccctttctctgattcacctttaaggacaaataaagatgtcctttaaggacataatgaagatgtctcttaaggccatctttattatgccctgtttagctcttggggaaaagctagtagaggcagaatcccgaatgggaaaggtgaccagttgaaacagttcaactagcaacaggtgagatgactggcatggaacctgcagttcgaattatcccatctattctggtacattaaaaaaaattaaggaataatagtctttgcccttcactagagatgacttgaaacaaagttcagttaataatgtaaagaatagtttggggtcaaaaacgaggcaaggccacaaagtagaaaggttgggtgaggttctttttgttttttttgagacagagtcttgttctgacacccaggctagagtgcaggggtgaggctcttaaactggctgtgaatgcagatcaaaagaaattcattccaaacatgttttcattagtgccagatggatgactcttacagagaattggatttctaatcaaatttctctgaccaaactctttatcagcaccaaccagataagagagcaytgaatgagaatcaggggtagaattggggggaaaatccttctgggatgctggaaaggtaggcaaagagataactgttcagagactcttggatactgatcctgctttctgtctgtggatgaggttgtggactgaaactgagttcgattcaagaaatgggagagcccaatttttgtaaatattcctttaagtgatcccatgcagattattcctgagttcctcaggaagagtaggtctgtgggaaamaaracactcaaactctaagtggttttttgttttgttttgtttttttgttgagatggtctcactctgcttttgcccaggctggagtgcagtggtgcaatcatggctcactgtagcctccaccccacaggctcaagccttcctcccacctcaacttcctgagtacctgggtctatagctgcataccaccatgcctggctcatttttgtattttttttctggagacagggttttgccatgttgcccaggctggtcttgaacacctggtctgaagcagtctaccctcctcagcttcccaaagtgttgggattacaggcatgagccaccgcacctggcctaaaagtgctttgttaattccctcactccacaacaacaatccacacagaagacttctgtgaccaaatatatgggaaacttcccccacacaccaagcaagcaatcacttctgcagtggacaccatgcgagtgccctccaatttaagtctgacactatctacctgcagattgcatcagattccataggttgagaactcagttccacaaagctgccttccctctttagacagcagtcgcaagtctgggcctctagaacttctgactgaccagcttcaagctggggttcccatgaccccttctttgggtttaatttgctggaatggctcacagaactcaaggaaacattctractgctgtattacagaggatgttttaaaagacacaaataaacagccgtatgaagagatatatggggtgaagtctggaagggtcctgagtgcaggaacyttatccctgtgaggctgggktgtgccaccctccaggcatgtagatgartacttgttcctctttctgtcagccttcacatggtcagctatgtggaagttctttgaactctgtcctcttgggcrttatagggagacttcattggacagccatgattgataaccatgtagaaatgtgattggacaaagcgggtatgatctaataccattagactgagtggggaaacacagcaaggcctgtccattcagcttcttggcctctctgtgaagcatttcctcctccagggtatgaggcaggacaccttctgaatgagtgtcttatgacccacaatcggattagagwcctgccttgggctggtgaaaggagggaaggagatcagagagatagattctgttttctgaggcctgcttttgagtcctaaagcttctcaacattataacaagagtctgtaacaagggctatggtagttgtgagctaggaacctgtattagtctgttctcatgctgctgatgaagacatacctgagactggtaatttgtaaagaaaaagaggtttaatggactcacagttccacatggctgggaagacctcacaatcatggcagaagacgaaggaagagcaaagggacttcttacatggcagtgggtaagagaggacttgtgcaggaaactccttctttataaaacsatcagatctcgtgagacttattcactatcacaagaacagcataggaaagacctgcccccatggttcagttacctcctaccaggtccctcctacaacacatgggaattgtgggagctacaattcaagatgagatttgggtaggggcacagccaaaccatatctaactgtagaagaaaaattatatatgtatatataataatattacagtaggaaaacccaagtaccagagcttggctgttttctaaaccctggcaggatcctgcctgcctgaggaggatcaccagctccttgtacttattagacaaaaaggttatccgggagaagctgtgacaagttttctatatctgcttctgctctgggggcctcacagccccatgttgattggctcaataaatccactgcttctagtgcgtgcrgtaggggaggtatttgttatctcttatcacccgaaatggttatatattaaagcaatcaatagctacctagaatctataagttattatayacagtcatgcaccgtataacatttcagtcaacaacacagttcatatatgatggtggtcccatgagattataatactgtattttcactgtcccatttctatgattagaattacctacagtattcagcacagcaatmtgctgtacaggttagtagcctggagcaacaggctataccatatagtctaggtgtgtagtaggctawaccatcttggtttgtttaagtacactctatgatcacacaatgatgaaattgcctaacagcatggttcgttaatgcctgccctggttcgttagtgcctgcccagatgttgtgagggtgacatgacataatgtccagagtgctcagagcgcttsacaaacatgggtgccctccactgttgactctccctcacatgctcactcccttagaacccygatgagccacaaacagctgggccattggacartgcctctctgactacttgaccttgccrtctcctgacactcttgattattttcagagtacggaggaaagtggaaaatgcttcattactttgctcagaatttctttgctccactgttgccagtaggctttgagaatgaaaacangttctatatctatggtgtgtcagatcttcactcggattattcgatgacactcagtgtaagttacttggattgttttctaagatcgaaggagacttttagatgatttctttagttgtttggttacattcttttgggaaaataaaagagaaattaatttagagttagaatacatatattcaggctacaaccctgccattaatcatgtgaccataagcraaacccttcacatcttgttgattcaatttcttctcagtaaaatgataccagtctctcttcttacaggatttctatgagtaggaaataaaataactagatgaaagcaaatcacatatgctataatgtgccccttaaatgcaaggttatttataattgtgagaggctggaaatagtccaaactttataaaaagaaatggttaaaaatggcatgttatagtgaaaatcagtaaaactattcagaatgcgcatgtggaaagcaaatttgttttaaaaaacaaatttaagtaaaaagaaaggctagaaactcaaagtcttaggtggctatagtttggaggacactaataacactgaaaataggtcacatttacagaaaaattacaacgcaccaggtactgtgcgttccgtggattattttttaaattctcacaacagcctgtgacattactgctgttattttcattctacatatgaagaaatgaagactgagaagttaacttagtcacatagctagtattttgcaggactgggattaaaactcaggtttcntagtctcttaaccatttctgctaacctgactttcagcaattattactactattgttccttaaaaacatagcaaccaagaatgcctgtttttattctgttttatttctccccaggtgagagtccatacatggagctccctggagcccgtgtgctctcgtgtgactgaacgttttgtgatgaaaggaggagaggctgtctgcctttatgaggagccagtgtctgaattgctgaggagatgtgggaattgcacacgggaaagctgtgtggtttccttttacctttcagctgaccatgaactcctgagcccgaccaactaccacttcytgtcctcaccgaaggaggccgtggggctctgcaaggcgcagatcactgtaagcacaggtcatggcggagggcaggggactgtggccttgtggggttctcctgctcttgggccagctccttgcatcctgagatttgcatgtgtcccccttggtgctgagtttacctgaggcytgggggaagattggcctsttcccactaaaagcaaacaccaaatgatttctatttcgaatccaggatttgtcagagttgctggtgaccactactcgtttgtcccatcacccctccttagtgggcaggtgcagtgatgggagaggaagctcgagtcatcaccactgcctgcatgcccactaggttccaggctgtgttctaggtgcttcacctcatagtctctgactttcaccacagctccaggcattatcatctgcattttgtaagtttggaagccagtttaggaggttaagtgatgagctcgaggtcctgtagctgggaagcattggagcccagctgacgcagtctaattttaagtagagtctattaatattcactctagtctctttgatttattgcttcaaagtagctcaatcaccaaatctttttataattgccaagatataaaaatgggatgatcaggatgtgttgttataaaaattgtgcagctggagaatttggaatttgtctagtaggttgaaaacctttccttccttctcccctacacatagcagttggaaatatatgtacacatatatgtttttaattttattatcttatcttctggacactcaggaaatatctttctagaaagttacattctctgtttttagaaaattttaaatttgttttacacttttacttcatagaaagggattttctacatttaatttagaaataatcatataaaaacacctaattcttgtgttttatttgaaagagcctaacaactgaaaacataccttctttctatagtcacataataaaatccaagttatctgtaacaactaatagagaacagaagaaaatgacagtcttacatatatttttttccaaaaaagaaaaaaaaaaccactatgtactggatgaatttkcagtctctaaacttatgattttgaaaaccaaatttttttctttcctgagttaggccttcattaccttgaggtgggtaattggggtgggagaaaagcagggctctttctttgttctatctcattttgatttcagtgagacttgtccttcttaaagagataaaatgatagtaataatactgttagttaatgtttaattcggggctaatatagactaggtatttggcttcttttctcaagggagatgccagaaacttgttctccctgtctccctgaagccagggtgcaagcttgaatcccaggctctgcagtcagacatacagagaggagatttccaatccaacgaagataaccagcatargcatgacaccagcatctctttcggccttgrtcttggagcagcagaagctgatgctaccctggcagcttcctgggcaggctggcatgagccgcatgaaccttgttcctgtggctgctttaggaccttcactggaacagctgggcggtgcgatctgggaatttgccatccaaattcaagcctgagtctctgatcctgaagagcwacctgatacrctttwttaagcttcttttctgcttctatcaatataggtttccttgtgtataactcagaaccctgaatgataacatattmcacaaatatgtaaggctaaattatatatagtgaaaatggccctttgaaattctttatgtcacacataacatataatgtaagactgagatgttgcatgacaaatgcacagattaagaaaccaggttgcactcagctccgtgctcacacwaagasaggtttgcaaaccctcccactctggggagcagcgcatcctcactctgggcatatgctattcggctacttaagaggaatggagccaacaygatttaaattgcactgtctctttttgctgctattttgtggaattcacacatgtaaaaaraatgctaataatgtgactttacttaactatgcartaaaagagakaagctctaatggtagagcttttgtaaatttctggcagtggactttctagattgctggatcttttcaggagacttgaatgtaagctccacagttgggctctgtagctaggtccagatatatccttagaaagtcattaaaaccacccaggctgtatgtaaaaatgttgctctcttgatgatactctgagaaaaactgtaaaagatgtaaagctttgagcttcttgtgaaatattctccttaatgattggagaygatgtatttccttgatttgtgattataatttggtaacgttccatagcctgtagtcattttccatgtattgttttgtgtttgaaactgcactttagcagttgtagaaccaaagttgtgggaartggactccttgttaagcccacataaatgtttacaggaactgtatacagactatataactcttccctcatccttcacttcattcatttttttttttctttttcaggccatcatctctcagcaaggtgacatatttgtttttgacctggagacctcagctgtcgctccctttgtttggttggatgtaggaagcatcccagggagatttagtgacaatggtttcctcatgactgagaagacacgaactatattattttacccttgggagcccaccagcaagaatgagttggagcaatcttttcatgtgacctccttaacagatatttactgaaggaatctaggttgtattttcagtggacaatgggaataaagcatttctaaagcaccgactggagaggaaggcaacagagacaaggagagaagccgagagacatgtctgcgtgctgccacgcatytgagcgattgctctgtgaagagttgtacactgaacayttycaggggaggctgtttacccaggcaatgtcctcaaacaagcctgtgccggggtgtcctggaatctgtgccaggactgtgtttttagcccttcacctctcagctttagcaggacatgaaccagttataacaagatggccctgcagctggttacaagaatgtgacatggcaggatctatggaaccaaatggaaggttttgaggtgatgtaggtctttcacagytagctttggggaatacrgaatactcaaataaagtgctttgttattatttcagagggaatggcgattgaaatgttacaacagagatttcttggtggtagctatttgggtaaaggtatatggrtatttttctgtacatgtgaaattatataaaaataaaagttatataaattacattgamaacttgatatttcatctgtggcttatttaaccgttctataaatattcaattttgcccaatactgtgctggaccctaatttccatttagttctcgttattattctgcttggtaaactgggagagtttgaagaatctaaactaagacatgtgaaaggttttctctggaaacagtcatgtaattggttatagaatggaccagcaaagagtgtttggctttaaaattaagatattattagtggttttggttttaaaaatgagaagcattatgttcagtgactctaaaagtaactacagacaatccagtcttcttcagtatctaagagtatcctcattttatatgtacacacacacacacacacacacacacacacacacacacacacaaagccttatcraggggataaggggacttagggctgggactccgtagagtcttacttggtaaatattatgtcatgttcttatgactattgtaaatcctgttttagcaaagcattgctgcgaggcagggaggactgctcttcttgacacctgtgcatgttctgccaggggccctgagaaggggctttcaagctgatgggccagagtttactttgtagtttgcccttactagttctgtaaccttaatcaagttacttaacttcctgtgctcagttttcttgtggctaaatgggagtggtaacacccaccttgtaagtttgttttgaagaataaataaaataatttagctcaagggcttggccccagattggcacatagtgacgctctgtaatggaagcatcatcctgggcctgagctcggtgtcctggagagggtgaggcttccagccgcagtctctagattcaaatccaggtactgaagcttctgactgtgtgtccttgggcaacaattcaaccttttgaactgtggtttccacctctgtaaaatggagctaatgatccctcaccttcaaaggtaggtgtgaggacttaacaaatagggtctggaacaaattaaaatgctaagtaaatggtgattgtacttttaacatcacattcattatcatccagttagtacagaaagcaatagtaaaaatgaagtgaagagaggcaaatggtaagtaagttcttcagcaaattctttctgaaaataataccagaaaagaataatttgtaagggaagaataaattaaaggacataaatatatgctgacaacaacttctaaaagaaaagaaatgtgccgtatacatattattcctattaaggaataatagtagccaaaacattcttccgcagttcttgtgtggcagcacagttagtcatttttactgttttcatagatttatcttgccatgcaggaatacagtctgatgcacttactcttgactttgagtttctgatagggtttttctgttagtggttgtatttgtccattcttgcattgctgtacctgagactgggtaatttataaggaaaagcggtttaattggctcacagttctgcaggttgtacaggaagcatcgcaccgggcatctgcttggcttctgatgaagccttagaaagtttacagtcagggcagaaggcgaagcagcgacaagcatgtcatatggcgaaagcaggagcaagcgagagagagtgggtgggaggtgccgcacacttttaaaccaccagatcgcctgtgaactcagagcaagagctcatttatcaccaaggggatccgtgcctatgatccggacaccttccaccaggccccgctttcaacattggagattacgtttcaacatgacatttggatggggacatatatctaaaccatatccttagttgtgtgaacaataggataaaaagaccagaaccaggtcttactgtcatatgctcttgcaaagcacattccagagagagtgggatgaagagaggtcagttcccaggattatatcttcccatttcagaacagagagaacaataaaaatcataattttctcattcacattcacgataactcttcttattctctttttttccttacttcacttttcattgtgagacattttcacaccatgagaagtcacttggaaaataaatagaaagattttgttctctgttggaatgaaggtgaactggagtgcaggagaaataaagatatgtttccctaacattcctaaagtgacaaagacctgagatagaaagaatattctcttgggctacctctggctctcagatatgaaacttattccccagcttggtaagatttagggagaaaagcaggtaggcattgtctgtgtgggaaattcaaagcatttgaaaacatccccagagtctgccttgactgaatgcaatcttattaattcaataagcacatgcaattaaaagggttatgcagaaaagacagtaatattttcaagtgaatgggagaattcttgttttctaattgatttatcagaggcatgaaccagagtagcatacaaaaccttaaaatcactggcaaaaccggtgttgtcttaagacatgtttatattctgcccctagacactgtttaacttaaggatttattcattcatttatcaagcatgtactgcagaccactctgggcaggtattgtccttgtcactgggggtatggcaatgaaaaaggcagacaagtcctagttctcatggatcattaaaccagcgaacgaggcaattccagctggcgataagtccttaaggttaatgtgatggcgacaggggagcaatgttagataaggcaccatcttgttcaatacttcagggaagctttttggaaagtatatggtaaaaaataagtgaaaaaatttcagttgagaaatgagtctttaaagaccttcattgtaattaatacataaggaaagaaaagcacaaaatcagctggttatgtagttggggctctgagcctgtgatctacaagctgggggtgaactaacctgccaagacatctttaagtccttgtgtggggccaaacagtgaatgaacttagcaaagataagaccaatgcatcactgtttcgtgttttataaatatctctccttataaatatctctccttatttctgtagacacgggttactgaatcctgccatgaaagaaaagtttgcttaaccccttaggttggtctctgtctttaaacaagatttattgagctcccctgtgtgccacatcatgctatgcagtgatcaagtacacatgattatagtaacacctaagttacctacaactctcaggaaatgagacattctggctcacgaaaatttctgtttgagaactagcactcatccctgcctcataatttaggtgggaacaacccccttgttctgattctgttcctgttactttttgttggttttgtaaaatttattggaccactgccagtagttggagcagacagtgttggctggccacctcacagccagatcttcctcctctctgctaatagaggtggccatgtccagcctcagagactgaatcataatttgttattctaatcctagtctccattgccagtgattgatgtagggttaggcccatgacacatttcaagaatgaatcataagttgatgtctaatgtggggtttctgggggaaggtttccctgcctgataagggatagacctgaggcaaaaccctctgctgttgggtaaaattgagaagctatttgagggcctgacacttggagctgctgcagcctttttttggtgatcttaaagaaacatatttgacagggggtgtcagagatgtttagctgctaaattaaccctgcaaccatctaactgtggtcttattataatgtggtaaaaaataaaggcttaattgtttaatcttgtagtcaggtgttctgattttacaacccaaagcatcctaattgatacagcagttaaaggtgtgggcgttgaaatcggacttacttgtgtttcagtcccagatccaccagtagcaggctgttcttcattggatacaggctactgagtctttctgtgccttagtttctttaaacatgggaacaataacaacagtatctgcttcataggttaattgtgaggtataaaggagataatgcacagattattgatagcacatgataactatccaccaaatgtgagctattacaatcatcattgcctctgtgtgaagccatcagaagaaatctagggaggtgggcagaactgaacgtgtgcaggcattgggtggtggctgtgaacagcatcagacaggagagctggaggtgtcgggggcagcagtgagcctgggagaggagcaggtaggacctggatccccccgcaccctgccttgtcatcctgaagatttaggtcatatttgaccagcaggtcatggtctagactgtgttttaaaaagttgaattacatgctaacatttaaaaagggaaagattccatgtaaaatatcgatgtatctatcgctgatcttgtaatggtattttttaaagcccttatttgtttagcccacttatagtcaggcattctcattttatcattaaaagcatcctcgtggataaagacatgggtctttgaggtcaaacatatctgggccttggagagggcagtgtgggcacctgggtgtcctgtdgggagatgcgtcacctacttccttgtgctgggatgctgcagtggcagtggtgcctctagtgaggaaggctgttggggacataatttgctgaagtgggctgggagcggtgrctcacgcctgtaatccctgcactttgggaggccgaggcgggtggatcatcaggtcaggagatcgagaccatcctggctaacagggtgaaacctcgtctctactaaaaatacaaaaaattagccgtgcgtggtggcgggctcctgtagtcccagctactcgggaggctgaggcaggagaatggcgtgaacccgggaggcggagcttgcaatgagccgagatggcgccactgcactccagcctgggcgacagagcgagactccatctcaaaaaaaaaaaaaaaattgccaaagtgggtgaaggaagggcccctgctcttttacaatgagctctcaagccaaagtgggtgactggcatgcttccctacccatatttttggtattggaatgaaaagatttttaactagtcaacttacaaacatgaatgaaattttgccttgtcaaagatccaaattgtgtgtgcatgcacgtgcgtgtgtaagtgtgaagactgcatgtggtgcaagggctatgggctcatgctctgatactgaacctcccggtactggccttggaccaatcacttaacctctaagcctcagtttccttattcttgaagttgagattaatggtaataactatctcacagtgttcctgtgaggattaaataaaataaagatataaatgtagtaaatgcaataaatgttggtttatcaatatcatccctcaaaggataaggctggtggtggctgaagtgttcaggcctaagaatctttgattccgcttgctaaaaggaaagagcaacttaagccttctgtactgagggaaaataatcaacaggcttcatgaactgagttgaaggagaaaaatccaggcagaaagctgaagaaatttctaattccttttttttggtaaggtttttccaattttacagaagcaataaaataaaataaaataaaataaaataaaataaaataaaataaaataaaataaaataaaataaaataaaattgagtagcaataggcaagccagctgttggatgattgtgcaaagttctgcttcttccagcagaggcctcttgtgctcaggaaatgaggctagtggtgtgcagaagggactgccctgggccagggtgctggcttcctggaggcttccccagagtacagggcatttgctgccttcagcgaggcgaggggagcctaaggaaacacttgcagggctgctccccaaacccctcaccttctgggcttcagggagttggatgccagtgccccagaggaatgcatgaatgtgaaagtaccttaaagaaggaaataaagagaaagaaaagaagggagggatgaag

SEQ ID NO: 95802 - DNA, 92447 bp, Homo sapiens
atgaccaataaatgatgctacaagatcacacacaggtaaaagatacattcatatcagtggatttcttatcagagtacaaaaaaagttcattaatatttcagattccacattgcaactaacctttaaaaacttccacttgttgagttttggtatagaatcaaaaaagaatatcctcagttatctgaaaaggccattaaaataccattccttttcccaactatatatctgtatgaggtcattattttctacatgtacttaagccaaattattgcaacagactgagtgaaggagggaatataagaatacagtgatcttctgttatgccagatagtaaacaaatttacaaaaatacaaaacaatcctacccttctgtgtggttttctgggaaaaacagttatttatattaacatgcaataagtttattattgctactttaaaataaactaataaatatttttatattttctcagttgtaatttctaatagcataacccacatgctcaaaggctttctggagtccacaataatttttacaaatataagagttctgaaaccaaaaagtttgagaattggtggtctgcaaattgggaagcatgcattctagtttcagctctcctcctccatagctacatgatactctttcctctatgaaattaagagactggaaccagataatcactaaggtccaaaaaaactctgtaattttatgttccttaccttgaagttatagatttcattgtaacaatcagcgcttttcagataccaggttatattcaaagacaggtcacaaggttctccatcaactacaaaagaagaaatctttgttaacaaaagataattccccaacaaagcatttttcctaagctgttaacctatatcctatttatttcgtaccctaaactgagatactcaaagaccatcctttctccaaacataaggtattgaaataatacatgcaaaaagagctggatattaagataaaagtattgttgttcatagaaaaatagcaggtaagcagtttttaacctctggaaactgtggatctatttttatgccataaagtcctaacttctggatctctattgagaaaaacctgggagtgataaagcactctaaattcaagccagtcttctattatttaagtatttattgagcaggctaggtgcggtagctcacacctataaccccagaagtttgggaggccaaggcagggggatcgcttgagcccaggagctcaagaccaccctaggcaacatagtgagaactcatctctacaaaaaatgattaaaaagctaggcgtggtggtacatgcttgtagtcccagctactcaggcaagggaggcaggaggatcacttgagcccaggaggtcaggtctgcagtgagccatgatgctaccactgcactccagcctgggcgacagagcgagaccctgtctcaaaaaacataaataaataaataaataaataaatagcacaagtattacaaaggtataatggcacactgttaggctaaagagggaaacgagtggaaacaaattattaagacccttcaaaaggctagttgaagagacaagcaataataaaattaggaatgcatgtcacagggcaatattcacaactgttaaatggtgttaaatgatgatatacataatagttccactgagagcaaaattgctatctcagaccttgaaagatatcaagatagaacagaaagagcaatgaacgaaaagcaaacatggctgtggaaggtagaaatagcaaaagcaaagataagagtatcagattttttttttcaaagcctaccttaaaagaggcctcaaggaagctcatgttatcatggaagcttcataaagctcattaaacacagtttggaacacagtattctaatggatcaagacattattctgaagacttgggagggtaaatctgactatatgactgattagctggaggaagtcagtattcgcttttatctttgattctagctatgaaaggaaaaatatactaaagactccctactttatataaatgtaataataaacatgacaaaaataaacatgactgcatttaggaatctacttttcattcataacaaaagacgcaacctaattataagcttcctttttttttcttttaaactgttttctcaaactaatttttagatgaccaacacattttcaaaggactctattagaatgttcaaaaatttgacctgttggatagaatttatggaaatgataaaaagcaattgggctatgaactattcaaaataatccatacagggacaggattaactaataaaaagccagtaagaacacatcccccaaacaggagacttgtaaggaaatttggcagcaaaaatactgctgtttatgttacaagacaatatttagaactttaaatgaaaggctttaagagacaataaggtcgagcgcggtggctcacgcctgtaatcccagcactttgggaggccgaggcgggtggatcatgaggtcaggagatcgagaccatcctggctaacaaggtgaaaccccgtctctactaaaaatacaaaaaattagccgggcacggtggcgggcgcctgtagtcccagctactcgggaggctgaggcaggagaatggcgtgaacccgggaggcggagcttgcagtgagccgagattgcgccactgcaatccgcagtccggcctgggcgacagagcgagactccgtctcaaaaaaaaaaaaaaaaaaaaaatggtcccagctattccatggaaagctatataccatcccccaaaaagtacaaaatcaaagacaactggtaaatatgagaaagcacagaaataacaaagaaaaagataatgttaaagtgtctcaggccgggcacggtggctcacacctgtaatcccagaactgtgggaggccaaggcaggcagataacttgaggtcgggagttcgagaccagcctggccaatatggtgaaacccccacctctgctaaaaatacaaaaattagccggcgtggtggcacgcgcctatagtcccagctactcgggaggctgaggcaggagaatcgcttgaacccaggaagcagaggttacagtgagccgagatcgtgccactgcattccagcctgggcgtcacagcaaaactccgtctcaaaaaacaacaacaaaaaataaagtgcctcaaatcctccaaaaacaatgaaatataaacacttcaaaatacgcagttagggctgggcatagagactcatgcctgtaatcccagctactccagaggctgaggcaggagaatcgcttgaacctgggaggtggaggttgcagtaagccaagatcgtaccactgcactccagtctgggtgacagagtgagacaccatcttaaaaaaaatgcagttggtttaacttggcaaaacaccactagatcaaactacaagagaaaaaaagactggacctaataaaagaataaaacagcaaacaggctgtcaagctattccaaaagacaagggttactaggttacccagtaaaccaatctcacaaggccagtgtcagagtagatttgatctaaatcaaatataagtcactggtcaggagactgattacatattcatggatacagtatatattcttcagagaaattctacctgctgttttcactcccactagaatgtaagctcgatgagggaagaacatttttctattacttccccacagtctatgcaataagtaataattactcactaaacaattgaaaagaataaaattatccaactatgacttaaaattttgcacttccgtgaagacagtatgcatagaatcacacatctatcatcaggatttttatccctcatctagaaataaagctgcccacgatcaatcgttctctaaattaaagccggtttcagaactaaaaggaagcttttactgaacacacaatgggatactttagattcagatacagtcatttttccactagacaaactagttttgttctacataatccctatttcttgataatatctgagcttcctcttccaaagcagtaaaatactccttttgtaaataaaggatctactaaatatattccttcacagccaacggcctgacaaacctaggtcatgtttgcagtaaacatttaacaagcacacaagagtaaaacctctttaatctacacagaacagattaaaaccaccatgcagggaatcaaccccaacataatcacagtcattcactacataacatttcagtaaatgaaagactacatatacaacgggggtcccataaaattgtaatatcgtatttgtactctactttcctatgtttagatatacaaaaacttaccattgtgttacaaccacctatagcattcagtacagtaacatgttatacaggtttatagcctaggagcaataggctgtaccatacagactaggcgtgtagtgccatccagttttaagtatactctatgatgtttgcataatgacaaaatcacctaaggatgcttttctcagaaagtatcaactgtaaatgtaattcgactgagatgtgactgaatattcaatgtagtatatacagcatatatattaatatatacattatatatactaatatataatgtctacatagtgtatatatgcaatgtaaacaccagaaaaacaagagaagaaaataaagttcacacgagtactttgaagatgattcagtaaaaggaccttagtaatactaaaaatatttatacctagataatgccagactattagatttcagaacttataaaataggtaatttaaaacattacctataaatttttaaaattcaaattaaaacttcatgaaattcaaaaactcacacttcaggaagatagtggtatttctgaagaggatctttccaaaactaaaataatttttcccctgcaaacataaaggaaagataattagcctcagatggcttcaattaccgaagcatcatataactatctaagactgctagaaattccaacttaacttaaatctttatgggacgtaccccttaatcagttcattccctttactcaccaatcactgctcagaataaccaatcattttttctaatgaactattctgtgtgcaaataaccagagttttattttcaaatctaaaaagacttaactattaaccattttagtaacaagtaaaaacctaactgaacacctgaaaatcttcaccactgaacaaaaggtataacgtttaccataataaaagcccaaataagatttggacattacagtcagtgagcagagcagaatgaaacaaaaaggccaacgtaggtttaatggggctaatgcttttcagcatttcctccctgcatctggtttttgtctgctcacaggactatacctgttactgaaataaggtttaaaatgggtaaggggcagaaagggtcaacccatgtagttaattatccaaatgaaagactagccttaccacattaaattttaagtactatttcttccattttaaccattcccatgttaaaacacatttcttaaatctctatgctttctagtcacacagtaaagcttagaatagccattccaaagttgaagcgaagtcgaaccatctcgtaagcagaattacccagggaccaagaagtgcagaggaagaaaaagaaagaaagaaatgaagactcctatttacatatctttcttatccaacccggggacactggattctgtgaaacatctgaaagataaacaactctccgtttgtacatcaagtttacatctcaagtcaggcactgaaagttctgtttttctgatgagaagccgctccaccactcctttctgttgctgaagtggcccttacattcccgctagcctaatcacagaagtgcgcggctttccactccagggaggtgggtcccagttggctagccacacagaccatcccagcaaccccaccccttttgaagagacttttgcggaaccttcatggaccccttgggccgccgtagccccaccccttgctcctctaggttcagacgttagtgaagtgaatactcaccgacggtatcggaatgtgccatttggaccggtcggcagcagctacggttgccggtcccgcactgaaaaacgacagtggtgacgggtgagctcccagaagcagaagaatgacaggcaacacctgaagccacgcagcmgccgccatcttcacagccgtggagtgcctaccgaaagcatttcaccctcttccggttcgtcccgccttcttccggctctgctctaagggcgggattatccgggtcctggaaacgtcgcggagcttgtttgctgtgcggcgtagcggcccctctctcagacagtcgtctgtgcgccgtgagactttggacctactgcgcaggcgtcatcctgttggaacctggtcagctgggttagagagatcgctacatgccagcctggcctgagtcttttctgtctcccagccgttaaaggttttaggaccaggcaggcaccccgtgcaggatttggctctctacttccgctcgccccagcccttcatcccttctaagtcaatgtcagactttggggccagaaagtctggaaaagccctaagcctggctgcccaagtggcgtctagtagtgagttctccggtttgggtggtatttaagcaaaggctggaattcggcggtggtggagtacacgcgattcctagactgggtagtgtaacaaccttcaaaggccccttctagccctgaagagtacgatgctgcagtacaatctggctggagacctagcctccagcaaagacccggccggcacttcccacccttaaccgaaaacggagacagagagggtcagttttcaaaatctgtggcgtgaccccgccactgagatagatctgcagatgcttcgtcccagtcagggaggccgtctcggcatttccaggttcttaacgctcttgatttttaccctctaggactcattgcgtacacgccctcaccgccgcccagtttcggttcctaacaaaagcacgttcctcatcagccacccataatcaagacaaatttgccaaataaatcattgtagaaacgctagtttgggcctgaaaaattccaggagcaagagtcaagatttgtcactccatgagaatctggaggggactcccttcccagaaacttgacgatgaagtactggttgtaattttagaaagacacccaatcggcttttttaaaagatcgcccagggcccttgtcctgagagctgggagctggtcggagtgacagagaagccatggaagcagcagtgaaagaggaaataaggtaaaggccaagtgcttctgtagcgagtgaccccagggtccctagaaacagggaatagtgttttaattgcatttcttatttgcgtatttggtatttgctgacctttatcttttctctcaattcgcgggaagttagttgatattaatagcctctcataaaatactttcaggatggttaaataggccgggtgcagtggctcacgcaggtaatcccacagcactttgggaggctaaggtgggaggatcgcttgagttcaggagttcgagaccccctccccgycccctcggagtcccagctacttgggagaccactgggaggatggatttggaggctgcagtggagctgtgatcttgccactgcttgggcaacaaagtgagaccctgtctccaaaaaaaaaggatggttaaataacattaacagtggaaaagttgcaatcagaactcttaacacgtgaatttcaggcatgttgctttccaaattcatctataatcaccccttcctatatcatcccagagttaattcttcgaagctgtaaagaggaaacaaaagattctccaatctttgtacacttgattaaaataaactgggccggttcgctcatgcctgtaatcccagcactttgggaggcctataggtgggcagattgcttgaacccaggagttcagaccagcctgggcaacatgctgaatccctgtctctacaaaaattttaaagttagccagacgtggtgatgtgggcctgtagtcccagctactcaggaggctgaggcaggaagatagcctgagcccaggaggcagcagttgcagcaagccaagatcgtgccacttcactccaacgtaggaggcagagcgagatcctgtctcaaaaaaaatttttttaataaattaaaataaacggacaaagactgagttcagtgaaggacaaacagttttttagtatggccaagtatatctgcctgggcttgttttcataatatttcgacgtttgtgttcagtcatagctttctacataatcatggacatgctgactacagatgcattcggccacactagtgcatgaaagccggtgtaattttttttttctccttataatctgtagttgttttaatcagatggaggctagtttaaatacatatactcaaacttcaatatacatatatctcattcatgttttatcccagaaacagctcttctggaaacttggttttaaaaaacatggcccctagtttgtcacctcatcttaaaaagcaagaaattccccttctacgtctgttctgttcttattctagcaccttgcacctctattaaagcatttgtcagcttgtattgtgattgctggtaaaaccctaactgatagcttgaacacagttcatatcttcctcagagcccagctctcaggaagaatattctgaaaatattttcttgaataaatcggtgggtgggttatggttcttagtttgtctggttggttggttttggtttgttcgttttgggatgctgttttggttttcctccttcagattttacttttgtggtcatagccttcagtcattatttcaaaagaatatgtcctcataagtgacagtgatcttttcccattacttttggagtaatcccagaacctgatgttttgttgtttacctcagagggtttacaaaaggctattgttctgcaacataatgtgctattatgttatactgtggccgtgacacaattttgcattgcagaatagactccaaaggtttattttgcatgttcatactgtcgttagagaaggtacaaaagttggattcacaagccctgtgtgaaataaatttctcaaaatgtctttttatttagtsttgaagatgaagctgtagataaaaacattttcagagactgtaacargatcgcattttacaggtaaggaaaataaatatagtarctagatcaaaacatctctgacagtatttcaaaattgatgcttattaaatttttggaactgatagactttccaaggaaaggataatttaataattaaggaaatcatcagacaggagactcacttttaactttatacatttactcctgaagtatttaaatttttcaataaacagctattttattttaaaagccaaaatatttttaaactagttttaaattttgacgctttgaatagataacacttttacatggttcaaaaataatataaagagctatacattgaaaaatgttgcttccactcctgtccccttctacccattcctcatcttgtcccgaataaccgaatttcttcatttcttatttatccttccagtatttttttgtaaatacatgtatttttatattattgcttttctctttttttaatcacccctttttataccaaataggttttttttcctgctttatagtttgttctgaggagaaattcatatgagtgcatggagattgtttctcctttttacagctgcataatattccatggggtagatatactattaatataatttattcagtctgtctcttattgctagacccttgggttgtttttaatcttttgctaaaatagcactaccacaatgaagagctatacataggtcattttctacacatgcaggtgtatttataggatacctttctaggagtgagattactgggtcaaagagtaaatgcatttgaaatgtgttaactattaccagatttccctccataggaattataccatttgtactcctatcaacattatataagattgcctggctgggcgaggtggctcacacctgtaatcccagcacttcgggaggccaaggcaggcggatcacctgaggytgggagtttgagaccagccygaccaacatgcagaaaccccgtctctactaaaaatacaaaattagccaggcatggtggcgcatgcctgtaatcccagctacttgggaggctgaggcaggagaattgcttgaacctgggaggcagagattgtggtgagccgagattgtgccattgcactccagcctgggcaacaagagtgaaactccgtctaaaaaaaaaaaaagattgcctgtttctccagagctacaaaaaatatgcctttaaaatcttcattttattttatttttatgcatttttttgagacggagtctccctctgtcacccaggctggagtgcagtggcgcaatcactgcccaccacaacctccacctcctgggttcaagcgattcttctgcctcagcctcccgactagctgggattacaggcatgcaccaccacgcccggctaattttttgtatttttagtagagagggggtttcaccatgttggtcaggctagtcttgaattcctgacctcagatgatccatccacctcggcctcccaaagtactgggattacaggcgtgagccaccacgcctggccataatcttcatttgaaaaaaaaaaaaaaaaaaacagtctttacgtgatcttgaaactgaaataatcaaaaattgtattatacagtatagctttctaacgtattccctctctgtttaataggaagaaaagcgtattatgttaattctgaacaggtatctagagggaagtctacagtgaatgcctggtaaccttgttaaaccactagattatatttaatatccactagaaattatttagttactattaaagtccattttatggaaagagggagggaaattaacaagttcacaaatgtcatctatgaaaattgccccaccatctcaagaaagataagatgtcatcctttgagcaacgttataataatcaattgtattagtattcttactaatactcatcttattagcattctaataataaagttcctgattagcactttattatagtactaatactgtttgtgccctgaaattcactgaatatcatagtgaattttaatgacttccacatgataatatagtcttttggatactgacaatcacaaataattatcaagcatctgcatactccgtatctataggcgtcagaaacagtggctttccaagaagtccacctatcrggcattattggattcagtcacaacagatgaagacagcaccaggttccaaatcatcaatgaagcaagtaaggtgagatggaagtattttctacagagaataatttgtttctgtatttattgggcctgaatgaagtaaattaaagctatgtatgcttcaaaaataaacctcgttagaaaaggaatatcagccttttagtgattagtggctcacgcctgtaatcccagcactctgggaggcagaagtgggcagattgctcgagcccaggagttcgagaccagcctgggtaacatggcgaaaacccatctctacaaaaagtacaaaaaattatccaggcacagtggtgtatgcctgtagtcccagctactcaggaggctgaggtgggaggatctcttgagcccgggaggtcgaggctgcagtgagccatgatagtgccactgcacttcagcctgggtgacacagcaagatcctccctcaaaaaagaacaaagaaagaaagaaaatgaatgtcatcttttcgtatctatactaataatattgtaataggtatatgaatataagtatatagattgcctgtgtatcagatgttttcctaaatgtcttacaaatattatttccttttgtttagtcttcgtaacacatctaagaggtacattatattatcccaattttcagataaggaaaatgaagtctggaaaatcacttgcccaaagtctcacatttagtaaccaaaattttctcctgcatctgtcagacgctgtcacccacgtgctttctaacactgttacacaatgcccatttgcatgtttagcctgagcaaggtacaaattcagggtatgtccaaatctcaaaatgcaggtgggccagggggaacagggaacaggcaaaaggactatgcagttgaaaacccaagtaacaagtgttccctcacctgagctgcttcactagaggttaccatagtttttgcctagtgagagggttagggaagtatatcttaagtgctttatctcacccatgaagttgtcatgttactttagctgggccagtcatagaggaagcactatgggctgtgctaggaagtgtgactgtgcactactgcctgatgccttcaacctgaccttcactttcagatcctgcctgcattctaaaggcatcctaagtttctaaggcctctgagaccaatctgacttaactggtaattcatatcactgaaagacagttaaggccattaggtctgggtcccataactgcttggataataacggcaccaactcactaacaagtcccagttctgggaagctgacgttcgtggcaaagctgtgaactatgtgactactatagttcctgccctgcagcgctgtactgatattcgtgggttctccataataattgtaaggcctttaatttagaaatgggtccaaactttattcccagacagaaagaacaattgtacagtaaggaaaactaccttcattatggagttttagagattttagtcatatggaatcttcatccataactttcttgcccaaattcaaaataatgagctagaatcatatcaacagttctgtgttctttatccccatcccctgtcctcaacttctacaacatagttattgtggcggtacatttagctcatctctcttagctgcacagatggggcagttagcctttctccaaaatctagtactgattcttacaccacccatttttctggagtaattttcctccttgcctagtgtgtttgatacatttgagttctcagctcatggtacccccaaagccataggtcctctaatgctgattcaggtctccctttatattcttatttatatatgttttttatatatccttttgtagcctagtttggtaactgttcatggagaaaaaaatgggacagcactaatttccttcctggagagccaaccactgtttgcatgtggtctaatagcctgacacccggccagacccttctattcagggtcagcagaagcagttggctccaggaaatgcatcaagtccatcagaggccttccaggagtctttaggccttgaccagatgtcaagaacctttctgtcacgtttttcttctcattgtctcattttctttcctgtttccattgtgtctaacctgagagagttgtagttgtccatagtcagagcaagaatccctatccattcttgaggatgcttagtatattgagcacctggtcatgaagacgtgctgaggtaaagtaaatgaggcaaaatcacccggaatatcagtggtgagccgaaatgaaaattctcaacacagcgtgataccagtttgcggtggacacccacatatgccatttcacgttactgtagattagtttctctttttggatcctgaaaaagtgaggaacaatgctcttcaggtcaggtgccaggaccagagcccaacaactctggatgccttcaaaggcaaagaaaccacagtccaggaggagacacaggatctcagcacaagacagcacctggctcaaaaggaagctgaggagcctgataaacaaggacaaattacctgggacatcagcaacgtagctcccaagactgagaactttgaggacctcttggaacaaactccatgctcaggtattagaaatatcagaaccacatagggaatctgcatgccctgatctcaggcaaatgtatgcaaatacatatttcgggagatcaccctgaaattctgcactgaactccattttaatgtcctccttgtcatgtggtgttgagatgactagtaggtacataaggtttcatgccctctgtcagtctgttagagacaacaraggtgatggtgatcactaatgttgcctgcatcttatatgcagctcattgcatagtgaaagagcctctattaggccaggcgtggtggctcacacctataatcccagcctttgggaggccaaagcaggcagatcgcttgaggccaggagtttgagaccagctatggccaacatggcaaaaccccatctctactaaaaatacaaaaattagccaggcagggtgatgcatgcctgtaatcccagctactccaaaggctgagacatgagaatcacttgaccctgggaggcagaggttgcagtgagccaagattgtgccactacactgctgcctgggcaacacagacactgtccaaaaaaaattgacctaaaacatgacaaagacagcatggaaaaagaaaattacagattaacttacttatgaacataaattaaaaaattgtgaaggctgtactaataaagtgaatccttcaggatagtagaaaataattattgtgactgagaggttatacatatacattgattaaattgccaagctgcaaaagtcttgagaaacrgtctcttttaaattcctgtttaggccaggtgcagtggctcatgcctataatcccagcactttgggaggcccaggcagatggatctcctgaggtcaggggtttgagaccagactgatcaacatggtgaaaccccatctctactaaaaatacaaaaataaggccgagtgcggtggctcacacctataatcccagcactttggtaggccgaggcgggcagatcacgaggtcaggagttcaagaccagcctgaccaacatggtaaaacccgtctctactaaaaataacaaaaattagccaggcatggtggcatgtgcctgtagtcccagctactcaggaggctgaggcaggagaattgcttgaacctgggagtcagaggttgcagtgagccaagattgtgccgctgcaccctcagcctgggcaacacagtgagactctgtctcaaaaaaaaaawtttttaataacaaagaacttctattaaaaatggtttctgggataagatgggtgtttcaaggagattgcacattaagatatggtatgagtgtgatctgaagttttaaaataagctgcatacatccacttattcagaatgatagctttttatttcaggtcaagagggacagcccagagtctaagaggrtcatattcagctcacagctgcagttctcaaattacactgatcaggcagattctgacaaatccaacactcttggtgcctgcctgcccctacacctttaaaacccttaaagcagtaactttggagttgtcaagatttgttaatttttgaatttctccctctcaattcccttccccartctgctccttaataaacaaccaggaagcagaaccaagcttcattcaacattgggttaggctgccataaccaaatatcacaggctaggcagcttacacaacagatgtttatttctcgcagttctgaaggctgtaaattccaagatcaaggtgctagcagcttcactgtctggtgagggctctcttcttggtttgtagatggctgccttcttcttgtgccctcgcatagtggagagagagtgtgtacacaagctctcccgtcttttcttataagggcactaatccattcctgaggacttcctcaacctcgttacctcatctaaacctaattacctcccaagggcttcatctctgaataccatcatattgtgggttagggctttaataggaaactttgggaagacaccattcagtccatagcaaacatgatgttccaggacatagatctgttccaaaacaagctagaatgttgacctgtgtgttgttgcaaggtcggaacgtccaggctttggagaaaagctggttgcatgttcagatgcataagttttctcacatagggtcctaatatagtgttgtgcttattcctgatgacagaataatcaggtagatatttagtaaagaagtttccagaaaatagaaagtgatcaggaaagtgttgactgcttttgtagaactcagttgttgttgttgttttcctactactatcagttttctatcgtcagtgaaaatttggtctggattgagaaagagagatctagtcttgtgatctaggcaaaggaaaatgtatgctgtcttgtgagtctagcttaaatagcattgctagcaaggatgtctggagcaatctactttatattgctaattatgatgctttctcatgatataggtgaccatttggcaacacgtttattttcttttgcagcctgtttgcaaggtttcaccagagacaacacttccagcagcttctccgaggatgcaggaatatctctgagcacctctgtgaagttacccyttgcctcttcatctaagcctaatgaaaatgaagctttgcccaaccagccaccttctcrgcagatraggcacaactaccgcttattagccagtactgtgtctgcagaaatggccaggaacaggcagctaatttgggaactggccagacaatcagaagcacacctggacaggccagttgtccttggggaacaggccagtgcccagcgtgaggttgccagtattctttgtagaaaatcagtgcttgcaataaaccaactggctgcaactgtagaagggacaattagtgtcctacagcaatttaatgaactattagaccatcctctggatcccgggaggtcttgatcacagctggtagaggtggccactcactgttctatgtcttttaggttaacagttctttacataacagtgaagagtcctggtgcctcaggaaaagcaagatcaacctaccaaggaagagttgatggagtcataattttcctacttaacacccactgcaaatttaaatatgtgttctagggctgtttgttaattctattatggtctttactaattgtgattcccagttctgggtgaataaaaagtttttgttttaatgtaattgtgatcaacactatgcttgaagacatagacaaagctatttctaccaccatgatgtttacaaaatatctggtatttwcgcctatatggccattaaaaaaactagatttgtggataacaaaccaccaagttttaattgtttttatttaataagggagaaataagacagaaaaagagaattaatactctttttcccagactgagaggcgggcttctaagtaaaggtatgtgaaaaactgagtagaggcttgtagtactaaaatgaacctccaaaatttattcttttctctgaggatttatctcagcttctctgtgtaattggatattaacacatcttaaattttttaaagagatggggtctcactgtgttgctcaggctggagtgcagtggttactcacaggtgcagtcatggcacactgtaacctcaaactactaggctcaagcaatcctcttgcctcagccccactgagtagctggggctatatgcatgtaccacccactggcatgtcttaaatacttctaagggagcaaaacacatgctctctcacctcattttaactatccatttaaaattattagatgtatgttcattttacataaattgacctggctacaattgagtgtaactacttatattatctaaggattaatactagattctcaatttaagcagtccagcatctctaacttcttaatgtattttttcattgtcatttccaatcatcactaacaggaggaagagatttgatagtttatttgtatattattttatttataaatatccagcaggtcctagcaaataggaaaggaatatctacaaatgtttactgttttaggtagaagaatataacagtcatgtccaaactttttgaaagagcaaggatgtggtggaaggattgggaaagaactggcagttaagcctcagggaagtggcatttaaactgtcatccacagagccctaaggtttcgacagaggtgacttaggactcagtacagggaaggcaggggactctaaggtgggacactgagccattccccactatctttaacccaagtggctttacttattggacttctgggagtctgctgatatttaaaagaaagaaagaaagaaagaaaaaacacatgagcccagatcataggaggaaatgcatactaaggtctaaggaaagtagagcctggaccaagaaagctatgttggtgataataagagataaggcacagtggctcatacttgtaatcccagcactctgggaggctgaggcaggaggatcactggaggtcaggagtttgagaccagcctggtcaacatggtgaaaccccatctctattaaaaatacaaaaattagcctggtgtgatggcacgcacctgtaattccagctactcaggaggctgaggcacaagaatctcttgaacctaggaggcggaggttgcagtgagccaagattgcgccactgcactccagcctgggtgacyaagcaagactccatctcaaaataaataaatttaaagaaagaatgactgtaaatattgctaaatttcagagtgatttttgctaaaattagattgctaaattaaaatgaggattaactctgatttatacatgaagtcattatagtgaaaacagggttattgctctcttttcccccctgggctgcagcctcaggaacagaacatacagatcagtctttggtttaaacaaaaattagtttttttttttttgtagagaaagctgttttactaaaaatgggacaatctctgagtgaataactaaatgtaaattgttaatcatatataggcagaccacctatatgccccctgcttaggaagttcttgcccatttttgcctactcaaagtcttactaattcctgaaggccctgcttaaatctctattcctctagagaaatgtccagaacttctaaccctacagtcatcattaataacccttcttaatctcttgcctttctgttttaaaacttatcacagaatgctctgtgttagctttgcatctcttttatctcctccaatttcagcctccccaaaagttcaatcattgcaataatagatgccaaataaatgttaattgaatggaatttgagagagcaatggaaacacatgtttaaatagtgagaaaatacataatctaacagaatttgaactttgtacttggacatatttccaaatgttaaaattttgattgtacgctaaaagtagtttaaatacataaaagaacattaaacatgcaagcagtaattacagtatgatcactattgcatcataaccctgccttagaatatctagaaaaggatccacagccatagcactgtttacttgttcactgttcattatcatgttacagtttaactgccctgattgcttccctgttttcgcaagaggcaaagttccagtaacatcatgtttttggtgctggcttggtattcttcatatttcttatcttttacttgcaccacattgtacccattctaagctatgtcacacaacttaccgagtttagctgtcatttaacagacataatagtaacaacacaggcacccagtagtaaccaaaatttggcatcatacttcgtgaggaaattgcaattgactagtatggcatggcccaccagttgaaaaccatggtcttaaaatatttttctaggtgctcattttgtagcctgagtcctgtcatttctgttctcctagagcttcttgttctgtgttttatttttcaaattctctattatcttcatgattctacattgtttccgtgtcccacggtaggcagaattttacttaggttccccagcctcttgtaaaagttccccgggtctattttcccagctgtgaaaaatcaattccagtttgattttagtgcaccaagcctcctttcatccaccactagagaactccaatgatcatcattttattctgtactgttttctcttctgtagcctgccacccttcatctttcatccagctggaatctagttactctgcttttaacaggcaaactcttattcttaatgtatctgtagtttatcatagatacagtagccacatgtcccaatcttccaaggcaagtttcagtttatgcctgtctttcagtgtaattattaatagagacttctttcactctgaagatcctggtttgacaattttatgttcacctagccacagaacacatagaagatatttcttgttgctgctgtagctatagtcaagcaagtacatacataaactggggagcttttttttttaattgccattgttctccaatttgcttggcctatcataattgaaacaaatactttcctaattattgyaattggtgcaaaattggccatcacttgggtaacctgttgaaggtaatctcttgtatctgtttccaggttcctctcctggctgaaatttatggtatagaaggaaacattttcaggcttaaaattaaygaagagactcctctaaaacccagatttgaagttccggatgtcctcacaagcaagccaagcactgtaaggtaagccaaggagcgaggtattttagagacacgcttgatatattcttttatcatatcttgagtaataaattttgttatgtgcacttcttmttttggctgctcaaaactacagtcatttaggttggtgtaaaagtaattgtggtttttgccattacttttaatgtattcagttatttggggataagtctatccattttccttattatccattctgttttttcttcatccaccatttgattcatcaggatttatttaacggggagaagcagaactttgatccctgctctctttctcacaaagaaagtggttttattagccagactatgggagcaagtagaaggaaagctacttattactcactcagattagcagcagggctccggagatctaatacgctagccaaactcccatacttacagtaatttatactattggacggactcacttaattaaggttattctcagaagtctaacrtgtaattttacttagtgtcaaggtaaattaataatcagtgtctaggtgaaaaacaatctttggggactaaagcattttcaagtacctgcaaaactttaatctcttctcataacactttccagtgatatttcaactcagttttgccggttggtttccattatattgtcatattatttcactaaaggaatatcagattatgccagatgctttcatttttactawatcattactgtagttttatgtagattattttttccatgaaaatcttataaaaggtcaatacattataatgagaaatgaattcagttatgatagaatcatcaaaagtttaaaatatatctattcactgagccacactatatgccaataacttagtaaacataattttttttaatttaattttttcttttaatagagacagagtcttgctgtgttaccccagctggtatcaaactcctggcctcaaatgattctccctcctcttcctcccaaagtgttggggttatcggcatgagccaccatgcctgccctaaataagaacttaaaagagactgtttctcaaggcttttgcagtttgacaattgaatcaatgcatacatataacctcctggccacagtatgttattttctactatcctgaaggatagtacagccttcacaatttttacacttgtgttcgtaagtaagttaatctgtaattttctctttccgtgctgtctttgccatgttttagggtccaggtgataattcacttggtatggtaaatatggtattaattctgcttctgtactgagttctttctagagggcctttggctactgtagtaactggaaagctaaaaactacrtttcttcatttcccagactcccttgtagctacaggttctgatataattcagtttccaccaatcagatgcacttaaaaaaaccttgatttcagaactgagttccccattttgcttatatggatttggcacctgtagagtggctctaaggccattagttaaggccatgatttactcatctctgaatcatagctaaggtggcatgatcctagagcccagcagttgtcatagtgacttctgataactcaacttcctgattctagctaagatagaaggtcagttggccatacagttacacagtattgttctagggggtcattcctggacatgcagcctggaacctactacctcaacccttcccgtgatgttgtaagcaacaaattatccatatgaagtcatttattttctgcttaaaatagccagagttgtttttgttttctacaattgagccttggttgataaagtagttggtattataaatgaatataagcaacagcctctcaaggatgggagtatgagattggctggctgacctagctggatttggaggcagtgaggatgtatttacctatagagaatgggatactactgttacaggctgaattgtgttatcccaaaattcaggtgttgagccctaacctctagtacctcagaatgtgactatattttgagatagggtctttaaagcagtaaataagttaaaatgggatgattagggtaggctctaatccattatacctgggtgcccttgtaagaagaggagattaggacacagatgcaggcacagagggacaaccacgtgaagacatagtgataaggcagccatctgcaagcccaggaaataggcctcacaagaaactcaactttctgacaccttgatctttgacttctagcctcaaaaattatgagaaaataaatttctgttgttcaagctacccagtttctgatattttcttatggcagccctgccaaactaatagaactaataatagaccacaaaattctgtggcaatgttacttaaatgacgactggtggtcaactaaaataaagtggcccattgaaagcagaccaagaggtagggccatactgcattctgattatcatgcagaattcagagctctgaggtggcttggctgctacaacttcactgaagagtttaaagaaagaaaacaatagtctcagggctttaaattcttagctcaaggtattgtcagaagattgttaattttctgtgacaatcctaaaagtcctcatatcttctgtagctgcaggtacatatagctgaaaatcagatgcagagtttgatattgcaggtcactgaattagtccataagttaatttcaggcattaactgggaaaacgtaggactcctcaaaattgaatagcaggctgagtgcagtggttcacacctgtaatcccaatactttgggaggccaaggcaggaggattgcttgaggttaagggttgtagaccagactggacaacaaagtaagactgcatctctataaaaaattaaaaaactaaccgggcatggtagcacacacctgttgtcctagctactcaggaggctgtggtgaaaggatcacttgaccccagtggtttaaggctgcagtgaactatgatcgcaccactgcactccagcctgggtgatggagcaagaccctgtctctaaaaaaataarcaattttttttaaaaattgaataacaatatttgggaagagttgggtaattctaaatagtcaaacctcaaaatttcactggccctcccatttcagcagaagcaacccctcctataaaggcaggtgaagctgatcctgccttgcttggataccctgtattgacctcacctaaaatatacatgcacggggattccaattctcctgtgcccgacctctaccacccttcactgcctccagacccatcatcagagtcagatcccaacatgcccagagagccaattacagtcaaacccgggggagaaggcttgcatgcctgaaaaattataagactatataatgcaaaaaaaacctgggaaatatgaatggaaatggtttctgaggaattcctagaccagaaagaaggaacttaattgtagatcaggctaaatttattgactcaggtacacataccagataatgtagatttgatatgctagcttgggcaactgagaatggctctaattgatggcatagttggttaattataatctgaactcagctatggattcttctgaatgaagctgagatatcaggaattccttggcatggtgtagaggaaatgatccacagacttagagagataaagatgttgaagtggatttgtttcatgcaaccagctcatctagcccctctggattctgttccccacgagaatccagaacatacccccttcactgagaaactgatgagggagcacttggaaagcattgtagtgaacatcttccttttgtgggctggagataatgktgggaaatgatgccgttaaaatggtctccctgatttcagtggagataatgagactccaggtagcagaggcagagtagaaacatttarttgtcagagacaaggtgaacataattccattatgtgtggtaggacccatgtagtactcaaaatggtttaacgcttggggcagtaagcaatttatggtggggtgcattagactgacatatatgaactacagtcctacttaatggaatcatcaaaagaactctgtctgggttcartggatagtgagagacagcctctcagctgtctccagagttaatttccagatcctaagcatcttgcttgaagagaaggcatagaatccatggaggactgaaaagacatcataagaacataaactgtctctttttaccttcctgaaagagtcctgtgaacatttactggggacactgtgcactggagaaagggaaatatctagctttgagggattttaagtgctgtgtctgagcttacataattcttgtggatctaaaacatcctaacartgtacctgtgaaattggaggctggtgggaatcaggcaataaataggtaaataaaaatttgacctggttccatctcactgtggagagatggacccaatctgtgttatttcctcagtttctgagtatgtgtttggaatgagaaagaaaaacaatagttagattttacacaccaaaatctagaaagttactagaccttccagaccaaggtgatgatgatgacaacgatgatagctaacatttactgtgtgttttttttttttaatgtgtctggcactgtgtcaagagctttacacatgtgatctcatttaattctctccaaaaactttgttgttgcttttgttattttcactttacagataaggaaaccaagacctagaaaagttggataactttgttatccgaagttataacgtatatgatagagttatgctcaatttaagctctttggcatcaaagccaatgctctcattaacttttctctgttgccttatctatggctatgtcacatgaatattgatttactaattaattacttggaagtacaaatcacatagggccatgtaaacctatagcagcttgtttytctcttcctgttttgttttctaggctgatttcatgctctggggacacaggcagtctgatattggcagatggaaaaggagacctgaagtgccatatcacagcaaacccattcaaggtagacttggtgtctgaagaagaggttgtgattagcataaattccctgggccaattatactttgagcatctacagrttcttcacaaacaaaggtattcttatgcattacttgacacataaagaccttaacataacctggttaatgaatatcagttgcctaaatagataacatagcaccatagaaaattggtttgccttatttgctctagtattgttctgagaaattttaccttttcacctgtgaaggtgaatacaagctttatgacaaaaataattcccaaacttttgtaaatgttacactcttaacatgtcctgtgtgtaactgatggcattctctaccctgcacacccwtctataaaagcactctgttgacctgacaaatgttaatgtgaactagcataccttcgtaatttcrcttcactcccttgcaataacacaaattaccctagacttgaatagttgtccaggaattttctgggaccatctgcttgatcaaagctgtttatgtggggtgctcacatgaattaggaggtggtggtaaggaggagattcttattccattcttacgaacactgtttttaaatcttttagtctatagttctttctatttttatcatgataataaacgtattatatgatctgcagaaagcattcaacattcattattccaacatagtcatttttctgagtttcaactcatttctgttttaaaattttgatactaaaaatatctcattttctcatctcagaactaatacttgttcatcataggcagattagaaaatattgaaaagaagaaaatttaaaatccccataatctctccacctactctcttagtgccttatgaatagtcaagtacttgtttaactgaaaaatactaataatagcagaacaaatatctgtgtacccactactcatgttctttatatgtaaagccttttttctagccaggcacagtggctcacacctgtaatcataacacttttgccgaggtggcaaatcagttgagcccaggaatttgaagccagcctgggcaacatggtgaaaccctgtcctacaaaaaaatacaaaaaaattagctgagtttaatagcacatgcctgtagtcccagttacttgggaggctgaggtaggaggatcacttgagcccaggaggtcaagactgcagtgagctgcgactgtgccactgcactccagcctgggcaacagagcgagattctgtctcaaaacaaacaaacaaaaaacgcttttttttcttttgtaaaccccgatgattttgttctgttttcttttaaacattgttttctttcctatctaagttgatccttttacttacttatgtagaagaggcacatggtacaaaggagtatatattaatacacatttctatgtaataatagtaaagaatctccttccccctgtgtcctctagctgcccactttccatcgttgaaagtaatgtgttctggtcgggtgtggtggctcatgcctgtaaccccagcactttgggaggccgaggcaggtggatcacctgaggtcaggagttcgagaccagcctggccaacatggtgaaaccctgtctctagtaaaaatacaaaaatttagccaggtatagtggcacatgcctgtagtcccagctactcaagaggctgaggcagaagaatctcttgaacccaggaggtggaggttgcagtgagctgagatcataccattgcactccagcctgggcagcagagcaagactctgtctcaaaaaaaaaaaaaaaaaaagtaatgtgtttccagttttttgtgtatcctttcagaaacaatttatgtatacacattttatatatattctttgacttttcctttcctgacacaaatggcgccacctttacacattattctacaccttgcttttttctgttaacaatgtgataattcttaatttctttaaagcagctacataatttctgttgtatggctttaccatgattcactgagtaaattctctattgagggatttaaagttgtttctaatcttgttttacaactagttagtttactaataaccttgaatatgtgtcattgtgcatatatacaagtatatttatagtatagagtcataaaaggatagttgttgatcagatggtttgtgcatttgtagttttttttttttttttttgagatggagtctcgctctgtcacccaggctggagtgcagtggcatgatcttggctcactgcaagctctgcctcctgggttcatgccattctcccaccttagcctcccgagtagctgggactacagcgcccaccaccatgcccggctaattttgtttttgtatttttagtagagatgggatttcactgtgttagtcaggatgatctcgatctcctgaactcgtgatccgcccgcctcagcctcccaaagtgctgcgattgcaggcatgagcgaccacgccccgcctgtagttttcataggtattgccaaattgccttccatagaggttgtactggtagctatagttccatgatttacatttatatttataattatatttgtgttaggaaaatcagatgatctaactggaaaaaattttaagttagattttaacctcataacattaacaaaaatcaattgcagatgaataaaaattaaacataaaaagacataaaaatagaagaaaatataaaacaatatttctgtaattgtgagagtgtgacataaattgaagagccataaggaaaagattgatggatttgattacttacacattttaagctttgattctactcagaaagcaacacaagaagaaaaaaagctttattatagacacacacacacacacacacacacacacacacacacacacagcgtgaacaaaattaaaagtcaaggacttccagtttcccgtctggcatgtaaggagcttagaagtcactactccatcctaacaatgactaaaaagctcaacaaatcagtttttgccttatatagtttgatgctctgttagactcatacacgcattaaagattgttacgttgagctgggcacaatggctcatggctataatactagcactttgggaggctgaggcaggcagatcatctgaggtcaggagtttgagaccagcctggccaacatgctgaaaccctgtctctactaaaaatacaaaaaaattagctaggcatggtggcatgtgcctgtcgttccatctacttgggaggttgaggtgggagaatcacttgaacctgggaggtggaggtttcagtgagccgagatcataccattgctccaggcggggcgacaagagcaaaactctgtctcaaaaaaaaaaaaaaaaaagattgttatgtctgcttagagtattgatccctttatcattatgtaatatccctttttatccccccaaattttccttgctttgaaatctcttctgtctgaaattaatatatctactcttactctcttttgattggtgttagcatagtatatcttaccttcagaggtaaccagtttactaaattttgtgttaatcacttccttgggtttgatttggtttggtttagtttagttttgtattgttttaagacggaatttcactcttgttgcccaggctggagtgcagtggtgcaatctcggctcactgcaacctccgcctcccaattgcaggttcaagcaattctcctgcctcagcctcccaagtagctgggattacaggtgcccaccaccacgtccagctaatttttgtatttttagtagagacagggtttcaccatgttggccaggctggtctcgagctcctgacctcaggtaatctacccgcattggcctcccaaagtgcccatattacaggtgtgagctgccgcacccagcctccttggggtttttaattggattcccacatatgtatgaattcccaaacaacatattatttggattcgtcttttctaaaaaaacttttatgtaataaaagtatgctgtatatattcttttgtaatgtatttttcactcaaatattttttttctttttcctttttttttttttttggaagatatggtctcactatgttgcccattaaatgtataaaagttagcctacatcattcatgctcttagaaatacaaactgaaatgcatttattttttctacaattttagattggcaaaaactgaaagattgataaagtccagcaatgttaagaatgtggggaactgagcactgaaatacaactatgggtggaagaataaattgtcacaatcattctgaaagactgtacattatagtgctgtgttctgggagtaaggagagttacaccgagtgtagggagctatgttctaccttgcttacttagattttgttgaaatattatgagcatgtttaacatttataataaaaaatgataaaagtattttttaaagagttaacaaaattaaaatacttctacattaagaaatgaagctattagattaatgttcatcattactgtccaattttataaactcatttttaaattgttttttattgtttaaagatgagatctcactatgttacccaggctgacatcgaactcctgggctcaagtgaccctctagcctcagcctcccaagtagctgggattacaggcaggcaccactgcacctgggttcatttttatttttataatgatgttatatttaatacattaaaggatataactgaggtctcaaaagttggaaatgaaaaatctttatcattgaacaaaattctgtcagtcttgccattgagtgaaacaactttatttacgttaaaacagagctgctaaagaaaatgaggaggagacatcagtggacacctctcaggtaatctagattgatccatttattgttatctttttcaccatcatcatcatgatagggcatataaggaattctctttcttccttctacagaagggtgcttgttaaatgatcgactgcatataaataggaccacctgtttctttggctcaccttgtcatctcgttgattcattcattcatttattcattcattcattcataaaaacagatgcttcctgagtgcctactttttgccaggcattattgctaggcaaggagaatcagccttgaataaaacaaatcccaaacatgttctcatggaaattagaatctattgggaaagacagacattgagtaagtaattacaagcatgaggagtgttacaaaatggtgctgtaggagaatacaagggacctggccaagatgagggtcaggaaagaccttctgagggaaataatgttaaagccgaaactgatgtctacacaagtcaaaaagttgtatatacacaagtcaaaaagttgggaaaagaatgttccaggtagagggaactgcatattcaaagatgtggaggtaggatggagcatattccatttgaagaaatggaatatgtatgcaatatatatttatttcatctggagaaaggaaagcaaaggggagggtggtatgtaacgaggctagaaagacacgcagggcagtgctgtggaaagatttgtaataattattttatctaacaattatttgttaagtacctcctatatcccaggcactgttcatggaattggtgagacatcattgaaaaatataagtcccccatttatcatgcagcttaccttcttccaagccatgttaacctttctgagtttctcctaagagcaaaggaaaactctggaacggttctaagtagcagagatgcatggtcttatttctatttttaaaagattattttgttgaattgtgaagaatggacactccagaaatcttctctctcttcatccccaatcacatgtatcttcaaaagagcacttttcacaatattgattcttcctatccatgaggatggaatgttttatcatttgtgttctcgcttatttccttgagccgtggtttgtagttctccttgaagaggcccttcacatcccttgttagctgtattcctaggtattttattccctttgtagcaattgtgaatgggagttcattcatgatttggctctctgattgtctagtgtggatgtaaaggcatgcttgtgatttttgcacattgattttgtatcctcagactttgctgaagttgcttatcagtttaaggattttttkggggctgagatgatggggttttctaaatataaaatcatgtcgtctacaaacagagacaatttgacttcctctcttcctatttgaatactctttatttcttcctcttgcctgattgccttggccagatcttccaattactatgttgaataggagtggtgagagaggacatccttgtcttgtgccggttttcaaagggaatgcttctagcttttgcccattcagtgtgatattggctgtgggttcgtcataagtagctcttattattttgagatatgttccatcaatatgtagtttattgagagtttttaacatgaaggatgttgaattttatcaaaggcctttcccgcatctattgagataatcatgtggtttttgtctttggttctgtttatgtgatggattacgtttattgatttgcrtatgttgaaccggccttgccccagagatgaagctgacttgatcgtggtggataaattttttgatgtgctgctgaattcggtttgccagtattttattgaggattttcacattgatgtttatcagggatattggcctgaagttttcttactgcccaaaataatttatagattcaatgctattcccatcaaactaccattgacattcttcacagaattagaaacaactaccttaaatttcatatggaatcaaagaagatcccgtatagccaagacaatcctaagcaaaaagaacagatctggaggcatcacattacctgacttcaagctatactacaaggctacagtaaccaaaacagcatggtgctggtaccaaaacagacatatagaccagtggaacagaacagagacctcagaaataaccaaataacaccacacatctacaaccatctgatcttygagaaacctgacaaaaacaagcaatgtggaaaggatctcctattcaataaatggtgctgagagaactggctagccatatgcagaaaactgaaactggatcccttccatatgccttatacaaaaattaactcaagatgaattaaagacttaaatgtaaaacccaaaaccataaaaaccctagaagaaaacctagacaataccattcaggacataggcgtgggcaaagacttcgtgatgaaagcgccaaaagcaaatgcaataaaaaccaaaattgacagatgggatctaattaaactaaagagcttctgcacagcaacagaaacgatcatcagagtaaacaggcaacctacagaatgggtgaaaatttttgcaatctaccctaagtgctaatatccagaatttacaaggaacctaagcaaatttacaataaaaaaacaaccccatcaaaacataggcaaaggatatgaacagacacttctcaaaagaagacatttatgtggccaacaaacatgaaaaaaagctcaacatcactgatcatcagagaaatgcaaatcaaaaccacgatgagataccatctcacaccagtcagaatgatgattattaaaaagtcaaaaaacaatagatgctggcgaggctttggagaaataggaatgcttttacactcttggtggaaatgtaaattagtccattgtggaagatggtatagtgagtcctcaagggtctagaaccagaaataccatttggcccagcagtcccattacttggtatatacccaaaggaatataaatcattctactataaagacacatgcacatgtatgtttattgcagcactatttacaatagcaaagacatgaaaccaacccaagtgcccatcagtgatagactggataaagaaaatatgggactgggtgtgtggctcatgcctgtaatcccagcactttagggggctgaggcaggtggatcacctgaggttgggagttcaagacctgcctgaccaacatggagaaaccctgtctgtactaaaaatacaaaattagctgggcgtggtagtgcatgcctgtaatcccagctactagggaggctgaagcaggagaatcacatgaacctgggaggtggaggttgcagtgagccaagatgatgccattgcactccagcctgggcaacaagagtgaaactccatctcaaaaaaaaaaraaagaaagaaagaaagaaactgtggtatgctgtggctggcaagatggctgaataggaacagctccggcctgcagctgccagcaagatcaacacagaaggcaggtgatttctgaatttccaactgaagtgccctgactcatctcattgggactggttagagagtgggtgcagcccatggagggcgagccgaagcagggtggggcattgcctcacccgggaagcacaagggatcagggaactccctcccttagccaaaggaaaccatgagagactgcgctgtgaggaatggtgcattctggcccagacactacacttctcccatggtcttggtaacccacagaccaggagattccctcaggtgcctacaccaccagggctgcacaaaactgggtggctgtttgggcagacaccgagctagctgcaggggtttttttttttcataccccagtggcgcctggaacaccagcgagacagaactcttcactcccctggaaagggggctgaagccagggagccaagtggtctagctcagtggatcccacccccacagaacccagcaagctaagatccactgagttgaaattctcactgccaccacagcagtctgaagttgacctgggatgctcaatcttggtgggacgaggggcatccgccatcactgaggcttgagtaggcggttttcccctcacagtctaaacagaggcacctggaattttgagctgggtggagcccaccacagttttgcaaagctgctatagccagactgcctctctagattcctcctccctgggcagggcatctctgaaagaaaggcagcagccccaatcgggcttatagataaaactcccatctccctgggacagagcacctgggggaagggacaactgtgggtgcagcttcagcagacttaaacattcgtgcctgccagctctgaagagagcagcgggtctcccagcacagtgctcgagctctgctaagggacagactgcctcctcaagtgggtccctgacccccatgcctcctgactaggagacacctcccagcaggggttgacagacacctcatacaggagagctccggctggcatcttgtgggtgcccctctgggactaagcttccagaggaaggaacaggcagcaatctttgctgttctgcagcctctgctggtaatactcagtcaaacagtgtctggaatggacctccggcaaacttcagcagacctgcagcagaggggcctgactgttagaacgaaaactaacacggaaaggaatagcatcaacatcaacaaaaaggacgtccacacaaaaaccctatccgaaggtcaccaacatcgaagagcaaaggtagataaatccatgaaagtgaggaaaaaccagcgcaaaaggctgaaaattccaaaaaccagaacgcctcttctcctccaaacgatcacagcttctcaacagcaagtgaacaaaattggacggagaatgagtttgacaaattgacagaaagtaggcttcagaaggtgggtaataacaaactcctccaagctaaaggagtatgttctaacccaatgcaaggaagctaagaaccttgaaaaaaggttagaggaattgctaactagaataaccagtttagagaagaacataaatgacctgatggagctgaaaaacacagcatgagaacttcatgaggcatgcacaagtatcagtagccaaactgatcaagtggaagaaaggatatcagagattgaagatcaacttaatggaataaagagtgaagacaagattagagaaaaaaaaatcaaaaggaatgaacaaagcctccaagatatatgggactatgtgaaaaggccaaacctacctttgattgatacacctgaaaatgacagggagaatggaaccaagttggaaaacactcttcaggatattatccaggagaatttccccaacatggcaagacggaccaacattcaaattcaggaaatacagagaacaccacaaagatactactcctcaagaagagcaatcccaagacaatcatcagcctgaccaaagttgaaatgaaggaaaaaaatgttaagggcagccatagagaaaggtcaggttacccacaaagggaagcccatcagactaacaccggatctctctgcagaagccctacaagccagaagagagtgggggccaatattcaacattcttaaagaaaataattttcaatccagaatttcatatccagccaaactaagcttcataagcaaaggagaaagaaaatcctttacagacaagcaaatgctgagagattttgtcaccaccaggcctgccttgcaagaggtcctgaaggaagcactaaatatggaaaggaaaaatcagccctagccactgcaaaaacataccaaattgtaaagaccattgacacaatgaagaaactacattaactaatgggcaaaataaccagctagtatcataatgacaggatcaaattcacacataacattattaaccttaaatgtaaacgggctaaatatcccaattaaaagacatagactggcaaattggataaagagtcaagacccaccagtgtgctgtgttcaggagacccatctcacgtgcagagacacccataggctcaaaataaagggagggaggaatatttaccaagaaaaaaaaaaaaaaaaaaagaaagcaggggttgaaatcttagtctctgataaaacagactttaaatcaacaaagatcaaaagagacaaaaaagggcattacataatagtaaagggatcaatgcaacaagaagagctaactatcctaaatatatatgcacccaatacaggagcacccagattcataaagcaagttcttagagacctacaaagagacttagacttccacacaataatagtgggagactttaacaccccattgtcaatattagacagattaacgagacagaaaattaacaaggatactcaggacttgaactcagcactggaccaagcagacctaataaacatctgcagaactctccaccctaaatcaatagaatgtacattcttctcagcaccgcatcgcacttactctaaaattgaccatgtaattggaagtaaaacactcctcagcaaatggaaaataacggaaatcataacaaacagtttttcagaccacagtgcaatcaaattggaactcaggattaagaaacctcactcaaaactgcacaactacatggaaactgaacaacctgctcctgaatgactactgggtaaatgacgaaatgaaggcagaaataaacaagttctttgaaaccaatgagaacaaaaacgcaatgtaccagaatctctgggacacagccaaagcagtgtttagagggaaatttgtagcattaaatgcccatggaatacaacttacaagggatgtaaaggacctcttcaaggagaactacaaaccactgcttaaggaaataagagaggacacaaacaaatggaaacattccatgctcatggatagtaagaatcaatattgtgaaaatggctgtactgcccaaagtgatttatagattcaatgctatccccatcaagctaccattgactttcttcacaaaattagaaaaaactactttaaatttcacagggaaccaaaaaagagtccatatagccaagacaatcctaagcagaaagaacaaagctggagttatcactctacctgacttcaaattatactacaaggatacagtaaccaaaacagcatggtactggtaccaaaacagatatgtagaccaatggaacagaacagaggcctcagaaataatgccacacatctacaaccacctgatctttgacaacctgacaaaagcaatggggaaaggatttcctatttaataaatggtgctgggaaaactgtctagccatgtgcagaaaactgaaactggaccccttccttacaccttatacaaaaattaactcaagatgaattaaagacttaaacataagatctaaaaccttaaaaaccctagaagaaaacgtaggcaataccattcaggacataagcaatgggcaaagacttcatgactaaaacatcaaaagtaatagcaacaaaagccaaaattgacaaatgggatctgattaaactgaagagcttctgcacagcgaaagaaactatcatcagagtgaacaagcaacctatagaatgggagaaaatttttgcaatctgtccatctgataaagggctaatatccagaatctacaaggaacttaaaattacaagaaaaaaacaaccccatcaaaaagtggacaaaggttatgaacagacacctctgaaaagaagacatttatgtggccaacaaacaaaaaaagctcatcatcactggtcattagagaaatgcaaatcaaaaccacaatgagataccatctcacaccagttagaatggcaatgattaaaaagtcaggaaacaacagatgctggagaggatgtggagaaatatgaatgcttttacactgttggtgggagtgtaaattagttcaaccattgtggaagactatggtgattcctcaaggatctagaaccagaaataccatcsgacccagccatcccattactgggtatatttctaaagaattataaatcattctataaagacacattcacacatatgtttattgcagcactgttcacattagcaaagacttggaaccaactcaaatgcctatcagtgatagactggataaagaaaatgtggcacatacacaccatgaaatactatgcagccataaaaaagaatgagttcatgtcctttgcagagacatggatgaagctagaaaccatcattctcagcaaactaacacaggaacagaaaaccaaacaccacatgttctcactcataagtgggagttgaacaatgagaacacatggacacagggaggggaacatcacacaccggggtctgttgggggatggggggctaggggagagatagcattaggagtaatacctaatgtagatgatgggttgatgggtgcagcaaaccaccatgtctatttttttttttttttgagacagagtctcgctgtgtcgcccaggctggagtgcagtggtgtgatactggctcactgcaacctccgcctcccaggttcaagcaattattctgcctcagcctcctgagtagctgggactacaggtgccagccaccacacccggctaatttttgtatttttagtagttcaatagttgcacagcaatgtgaatgtacttaaagccactgaacctgaactttatacttgaaaatagttaaaatggtaaattttatgttgtgtatattttaccacaataaaaaacatatttatgtcagctatggcccataaagattattactgacatgtatatagaacacagatttgatttgttaaaggtactgacgtcacacactggtcttctaaaagatgaactcactttctcagtcttttaaaaaaataatccaaataaaatgagctattgtggtaaacacatttgttgcaatttgtaaactcagtttgctcccttttttgtaccaacaggaaaatcaagaagatctgggcctgtgggaagagaaatttggaaaatttgtggatatcaaagctaatggtaaaattgaaactggtatagtattaaaacagatcattctaaaaatgtctacataattctatcaaaaagccccttgatctctggcacctaaaacaggtgactttaacagaagaacagaaatcccagatcagatttgctatcyttcagtaatgcattgcatcagagaaatagcaattatttgccttttgtaggaagtgtaaaagaaatataggccacacggagcttatggtctcatacagggtcatgggtcagcacactgcttgcactgttcatcagataagacagctacaaattccacattaaatttttatgagagtgaagtgatgagaaacccaagttctagagccactccgttgcaacatttcaagccaatggttctcaaccttttctaggcctccccatcattcacatgggtatcacatgcccatctgtcacatttctcaccaggcttagtgatggaattrgggtagaggggcgagtttgtctctttaggagatatctttcaggtacttggggcttatgcagttagaaaaatactcactttcctctttcctcctccctattgtgtagaataacaaaccctttctaacacctttaaaattcccattctagccatcattatctatagcatagtataatgatgagggctgacagaatgccccaaattaaaagtgggggcatgggttctcaggccctcctttctgtaacatcatcatctttttatctttttttttttttttgaggcaggttctcactctgtcacccaggctggagtgcagtggcatgatcatggcttactgcacccttgaactcctggcctcgagtgatgcacctgcctcggcctcccaaagtgctgggattacaggcatgagccaccatacccggccatgtcataatctttttcaccttctctgtagcatcccttttccacaagctcctacaaataaggaccatttgatggcaaatactttaacctaggcataaattaaagtccacgttatacctcctagtcatttgcatttttcccatagctctaaaataattgttaaagacttcgtctttggttaaaggaaatttatataatcacagaggaggagtattttgaggaaccagttatggccctcctggtgcccttgacatttgcattccctgtaggtagtcacagacgaggctggcagtaagaatgatcaggcacaagacaatcagtcatttcatctagtgtagactgaaagtgcacaatatcctttgcttcctaaagcaaagaaatatgtgataaggaaaatttcgattaggaaaaaatctaaaactttgtaatgatgttttatatagagacgagatttactgtgaagaggacacagagagcttcatcacacagctaaggcaacagaactaatacatgaccagaactttgccttacacatttttgtatccccacaacacctgaatataatatctcacagagggtcagtacacagcatttgctaattgatctaggtgagcccaggtctctcagcctttagtctagtcatctctctgcactcagaattaactgaatctccttaagtgagtgttcttttcagaaacaaaactcagtatcctggtctctacaggcccttcttctattggtttggatttctccttgcatggatttgagcatctttatgggatcccacaacatgcagaatcacaccaacttaaaaatactgggtaagtgaaaacaagaattcttatgggagtctctggtttttgtattgagatgatctgaaaacatttgtgagctgtctgagccagtgctaatatgtgccaggccttttcctcctttatattgcttgtggatctttaagaaccctccttgaatgatcactcagagcagtggttttccttttttttgagacagagtcttgctctgtcgcccaggctggagtgcagtggcacaatcttggctcactgcaagctccacctcccgagttcaagagattctcctgcctcagcctcctgagtagctgagactacaggcacctgtcaccacgcctggctaatttattttgtatttttagtagagacagggttttaccatgttggccaggctggtcttgaactcctgaccttgtgattcacccacctcagcatcccaaagtgctggtattacagcagtgagccaccgtgcctggccggttttccagttttatttatttttttaatggaaaaattagataactgtaaaaactataatactgagcctagaaatatagaggaagtaaaattatggagctgctgtgatcagaatagagggaagatctttatcctcgggtttcacttttacctctcaagaccttttgtggagccttgggagaatatattgtgaaaaatcactgacccagaaaaaggcttttaccaaaatgggagagtgagccagagaatggaaaaatgtggtatctcatatcacctttagtttcctcagggatatcatgtcaggctaacactattgacaaatagatgcccgaggcatcagactaagaggaaacaaaaccaaagagaaacagagtctgataagattgccaggttcaggtgctgtttactttcaggtaggcacagtgacaagtccagcagaaactgtgctgctctcacactgatttgagctctgtgctcccacccccaattcagttccccatcttcccctgctaagcactgtggaagcctgttggacacaatttttttttttttttgagacagagtctcgcactgtcgcccaggctggagtgcggtggcgtgatctcggctcactgcaacctctgcctcccaggttcaagcgattctcctgcctcagcctccctagtagctgagactacaggtatgcgccactacgcccagctaatttttgtatttttaatagcgtcaggctttcacagtgttggccaggatggtctcgatctcttgacctcatgatccacctgcttcggcctcccaaaatgctgggattacaggcgtgagccaccggcacccagcctggacacaattcttttaaccgcagagaagtactcacaaaattcatcagtgggtacttgctgtgtgcttgctattgtggagtattcataggagagagtcctccactcaaaggatatttaggctgggcacagtggctcatacctgtaatcccagcactttgggaggccgaggtgggtagatcacttgaggtcaggagtttgagaccagcctggccaacatggtgaaaccgcatctctaccaaaaaatacaaaaattaactgggtgtagtggcacgcacctgtattccccgctacttgggaggctgaggtgggagaactgctgaccctggaaggtagagtttgcagtgagccaagatcgcaccactgcactccaccctgggtgacagagtgagaccctatctggaaaaaagaaaaaggagatatttagaaaagatgtctaagatgtgatcgtatgtgctaatgtcacaggaagtggtgccaaaggagtcaagggaagaggaccacgttcacctaagttgggtcaggaaatctttagggaagtggcaagagttgagcctccaaagatgcgtgggacctaagtgtttagagagaagagtagagctgttctatttattaatattaataatatatttgtgatggtaattgatgataatctttgtgtttcagtgatggagatgcttaccgtctttataacctggatgtctatggataccaaatatatgataaaatgggcatttatggttcagtaccttatctcctggcccacaaactgggcagaactataggtattttctggctgaatgcctyggaaacactggtggagatcaatacagagcctgcagtagaggtgagctatttatcatggctacatgtcatacttaaagaagaaacaaaaccactgcagtggagttatagctcttatctttgtattggcacttctctgccaacaaaagctttacagtgtaatcagtgaatatcagtagtatctactaaaggatcagactgttacttatatgtggctggatgttgcaggttagagggaaatttctcaaatttttattccattctttttccagtacacactgacccagatgggcccagttgctgctaaacaaaaggtcagatctcgcactcatgtgcactggatgtcagagagtggcatcattgatgtttttctgctgacaggacctacaccttctgatgtcttcaaacagtactcacaccttacaggtatttgcacgaagaagtgccagtttcttgttctgttayatatccaatgtcccatgtgtcatcacggtaagttaatatttgttgtatactatgtagagtttataacttacccaagcattttaattagcaagcatttctgttsccatcctcatcccattcagttcagtaaaacattgcactgggtctagaatgctctactgtctagttcctaatacttgccatctgctttccttgaagcttttagcccctgggctatctctacctttatctcagatgaccagtatcccaacttcaacttttctatgttttcttctccattaaaatatgcaactggctttagcattagagcattttattttaaaagaatgcaagcttttctctaagatcagaaacaagacaaggcattgcattttcaccactattattcaacattgtactggaatttctagccagagaaattaggcaagaaaaataaataaaagatatcaaaattggaaaagaataaataagattataggagatgatatgatcctatatatagaaaatcccaaagaatccacaaaaaaattactagaggtagtaaattcagcaaagttgcagggtacaagatcaatatattaatccactctcacactgctatgaagaaatacctgaaactgggcagtttataaagaaaataagtttaattggctcatggtcctgcaggctgtacaggaaacatggctggggaggcctcaggaaacttaacaattatgatggaaggcaaaggggaagcaggcacatcttacctggtcggagcaggaggaataaagagagggaggaggtgccacacacttttaaacaaccagatcttgtgagaaatcactatcacaagaacagcaagggagaaatccgcttccatgatccagtcatctcccaccaggctcctcttccaacattggggattacaattcgacatgagatttgggtgggaacacaaatccaaaccatatcaatcaataatgaaaaaaaaaaattagttctgtttctatatacccgcaatgaacaatccaaaaaaatttaagaaaacagttccatttacaataatatccaaaagaataaaatacctaggaatacacttaacaaaggaggtgaaagacttgtacactgaaaactataaaacattcctgatagaaattaaagaatgcctaaataaatggaaagacatcccatgttcataggttggaaggcaatgttaagatggcagtaatatagaaagtgattcacagattcactgcaatccctatcaaaattccaatggcttcttttgcagaaatggaaaagctgatcttccatagaattgcacagggacctgaatagccaaaacaatccttaaaaagagaaacaaagttgaaaaatttatacttcttatatgatttggctgtttccccacccaaatctcatcatgaattcccctgttgtgggagagaccyggtgggaggtaattgaatcatgggggcagatctttctcrtactgttctcgtgatagtgaatgagtctcatgagatgtgatggttataaaaaggggagtttccctgcacaagcactctctttgcctgctgctattcacagaagatgtgacatgctcctccttgccttcggccacaattgtgaggcttccccagacatgtagaactgtaagttctacarttaaacttctttcttttgtagattgcccagtcttgggtatgtcttaagcagagtgaaaatcaaatacaacttctcaatttcaaacttacttcaaagctatggcaatcaaaagaacatgccactgcccaggcacggtggcccacgcctgtaatcccgcactttgggaggctgaggtgggtggatcacttgaggtcaggagtttgagaccagcctgaccaacatggcgaaaacctgtctctactaaaaatacaaaaattggccaggcatggtggtgggctataatccagctactcgggaggctgaggcagaagaatcgattgaacccacaaggcgaggtggaggttgcagtgagccaagatcatgccactgcactccagcctgggtgacaaagcaagactccgtctcaaaaaaaaaaaaaaagaacatgctactggaataaggatagacatatagaccagtgaaatagaattgagaatctagaagtaaacccatacgcttatggccacccaaaacactgggattacaggcacaggccacagtgctttgtccatgtcaccattataatttcaataaaggttcatgaccattcgatgaagaagaaatagtctcttgagcatatggtgtgagacagttgsatatctacttgcaaaagaatgaagttggactcctatattcaaaaatatgttatatgtgtatcatatacaaaaaaataactcaaaatggttcaactatataagagctaaaaccataagactcagaagaaaacaggtaaatcttcatgaacttggatttggcagtggattcttagatatgacaacaaaatcgtgaggaacaatgacaagaaacacatgttagaattcactaacattaaaaacttttgtgcatcaaagaacataaagtgaaaaagcaacctacagaatgggagaaaatgtttgcagattgtatatctgatatgggtctcttatccagaatacatgaagaactktctacmactgagcaacaaaaagacaggctgagcactgggcccatatccctcatgctcgtctgccactgagggcrcatgcagcctctagaccacaaccaaacagtgacccagactgctacagccaccttctgggcaccatatcacagagcagggaccccaggctgtagggaaagagcttgcagggctcctggatagaactgtactttagcaatgataggaaggggaacagtgctccaacatcagtttctgtttataatggtgacatgggctgggcacagtggctcacgcstgtaatcccagtgctttgggaagcctccaaagtgcttccttgaattcaagtaatcctctgccttgcttcccagagaaaggctgcagtgagcactgttcatgctgctgctctcccgcctagacaacagagcgagaccctatctctaaaaacaacaacaacaacaacaacaacaacaacaacaaaattaatgtaatagtgacatggaaaaaatacagctggatgcttaaaatgaatttggacagagtagctccaaaagttctgtgacagcctacctcttttacagacattggagaaaaatagctctcagtctgaggaagatactgagaaaaggaaagaagttgaaagcatcttgaagaaaaattcagattggatatgggattggacaagttggccagaaaatattccccacaaggagttcctctttaaagcacctgaagcacgtagctacccagcatggaatttaaagcctgatgaggaaagggggcattttctcagcagaatttccaaagggttttgctgctgtctcatctggtggccatgggattggggatctatattggaaggcatctgacaacttctaccagcaccttttgatgaataatttgaatccagctttgtgcgtatagtggggatttctatctgagcttgtgacacagctaactcaggagctgttatggtccttggktggctgtttcacttgtttttatttgttctgtaaatactgctttcctaatttagtaaaatgaaagaatagacactaaaatcacactgacctatacttatacctatagaatcagttaataaggktatcagactgattaatatctactgtaacaatttggcagtgagttttctttggatattagtataaatatgtaagtatcgttttaatatattagtcatgatatagyattttaaaaattatctgtaacctgaattctgttaaaacactttatattccaaaagaatgaatgacagtgatattaaaatcactacattaaagggtttgcccagaataaatattgtggccttacttacactactgtggaaaatattatgtttaatttaaataaatgcaggttgtctactaagactacacttaactatggtaattgttcttaataaatagagaacaagttacagctacaaatgccaccatacacttcatacaccaaattgttctcacttttgcagcataaggactttaacctccaactattaggtaatcaacttggataatgtgtctgtcaaaggcacgtactcagtgtcttttcctctttatcactctggattgctgaatttaatcctatcctttgtgctcaacttttttgtgctgttaaaatcagctttatcctaagcatatctgtatctactttaaaagattggaaatggaaaaaaataaatatttgccatatcctttaaaaaaagaaaagaagccatactttaaaagactagaaatggaaaataaataaatctttaccaaattcttaaacaacaaaaagataaacaacccaattctaaaatgagcaaaggattttaagagatagttctccaaagaagataaataagtgaacaacaaacacatgaaaatatgctcagcattgttagtcattaggaaaatgcaaatcaaaaccacagtaaaatatcacttcacacccactaggatggctaaatccaaaaaaatggaaaagcataagtgtttacgaggatgcagagaaattgaaacattgctggtggaaatgtaaaatggttcagccattgcagaaaagtttggcatttcctcaaaaagttaaacatagaattaccatatgactcagtatgatggttaattttatgtgtcaatttgactaggtcgtggtacccaggtattcaaacaccagtctagatgtctctgtgaaagtattttttaatgagattaacatttaagtcagtagactttgaggaaagcagattactctccataatgagagtgggcctcatccagtagttgaaggcctggagaaaaagactaaggtccctggggaaaacagaatgtctccagcctgccttcaggctcaagctgcaacatcaactcctccctggttttctagtatgccagtatctcctgcaaaactcagacttgccagcccctacaatcacacgagccagttactttaaataaataagtatttgtatctctctctgtgtatgtatacatatttataaatatataaatatattcaatataaatcctattaattctgtttctctgaaaaaccctgtgttctctgaagaaccctaactgatacacccagcaattctactcctagatatatgcacaagggaattgaaagcagggactcaacagatacatgtatgccaatgatcactgtagcattattcacaattgtagggtccagccctacggggcttagtgggtgttgtccccatgtgcggagatgagagattgtaagaaataaagacacaagacaaagagataaagagaaaacagctgggcccgggggaccactaccaccaagacgcggagactggtagtggccctgaatggctgggcgcgctgatatttattgcatacaagacaaggggggcagggtaaggaaggtgagtcgtccaagtgattgataaggtcaagcaagtcacgtgatcatgggacgggggcccttcccttttaggcagccgaagcagagagggaaggcagcattttcttctatgcattttcttctatgcacttgtaagaaagatcaaggactttaagacttccactatttattctaccgctatctactatgaacttcaaagagaaacatgaaagtggacaaggaacgtgaccattgaagcacagcactacagggacgggtttaagcctccagatgactgcgggcaggcctggataatatccagcctcccacaggaagctggtggagcagagtgttccctaactcctccaaggaaaggagactccctttcactatctgctaattaacagggccttcccaggtactggtgttaccgcttgaccaaggagccctcaagcggcccttatgcgggcgtgacagagggctcacctcttgccttctaggtcacttctcacaatgtcccttgagtacctgaccctatacccgctggttattctagrttatattagtaatgcaacaaagagtaatattaaaagctaatgattaataatgtttacgctaatgattgataattgtccatgatcatctctatatctaatttgtattataactattctttattctaactattttctttattatactgctacagtttgtgccttcagtctcttgcctcggcacctgggtaatccttcgcccacacatgatagccaaaaggtagaaacaatccaagtgcacatcaaagatgaacacataaacaaaatgtggtatatacatgtaacagaatattattcagctataaaaagaaatgaagttctgatacatgctgcaacatggatgaaccttgaaaatatggaaaatgaaataggacagacacgaaaggacaagtattatataatccacttatatgaagtagctatgatatgcaaatttgtcaagacagagatgagagggggctgagaggtgtgagtgatagggagttactgcttaatgattacagagtttctgcttggggtgatgtaaaggttttagaaatagtggtaatgcttgtactacatggtgaatgtaattaatgccattgaattggacacttggaaatggttaaaatggcaaattttgctatatatattttaacacaatttttaagaatcaataatgtaatatgccataaaaaccctcattaaattgtgcattttagatgggtaaattgcatggtacgtgaattcagtaaagctgttaaaaacaaaagtattgcagcatcatttctgctgcattcagttgttaaaagcaagctaagtctagcccatgttcagttccaattgtgatgggaggaatgacaatttatggatatgggcacccatgcaggaataagtgctatcaaagcccacctgcagctacattcaacattgttattagtgagaatgctggtttatgataaagcacttccaaaatactggatctcccaccatgttcaaagacagtaaagattatttgttgactcctgctgagggtttagctcaatcatataccataccctcctccgtctcccatccaatctagttatatcacaatttttggttaaatcaatattcaatgtttacatttttcacatgctcaagggtgtctgwtactttatccagtctacttctttccctggagacttycttccctaccagagctcttcatcttcctcctcccatctggaccattgttctctaggttccctgcacagctttcatctcagaacttacctttgctgttttctggtgttgtatccctcctttcttcagttccctgtttttctcttttctggtttattcccttgctgtgtttatttgtttgtagcatcttctggtagtttcctaagaacatttgcattggaggtactctttttgcttccttgcaggtatgaaaccatcttttttcctacctttacctttgrctgataatttgcctggcaagactgaatattctttctctcagaatttgaaggcatttcttttactgtcttctaccttcttgctccaaaaccattcttaattctattcctttgttcctctgtatataatctatcttttctctctgaaataccttctctttatcactaacattccaaatttccagtattctgaaattttgtaataaaatcccttgatggagagcttttgtttgtttgtttgagtcagggttttgctctgtgcccaggttggagtgcagtggtgtgatcatggttcactgcagcctcaagctcctgggctcaagcgatcatcacacctcagaatcctgagtagatgggacttaacaggcatgtgccaccatgcccaactaattttttcattttttatataggcagggtctccctaggttacccaggctggttttaaaaccctaggctcaagggatcctcccacctcagcttcccaaagtgctttacagggattacaggtgtgagccaccgtgcctggccctaggtcttttaaaataattattgttctggatgttagatgtggaccccttcaatcctgagaattgtgtccttcagttctgagaaactgttttgtattattccttagattaatttttcccttcctttttttctttctactctacggattttataatctccttttccttttttgcctagtttttgagcaattttctcaattttatcttctaggctttccatttatgctatcatgtttctgctttcaaggagctctttcttatcctctgatggttccttggtttttgttttcattttatgcaaagcaatggcaaaacatttattatcctgaaatgtgtacatcctatttttttcaagtagcaaatttgctggtaacataatttatttaacctgtttcagtcagacaaactcatgatcaatgctgctctgtataatttcaagtctgatgagcctcttaagttttttgtttttttgtttttaaacaaaaaacactctgttgcccaggctggagtgcagtggcgtgaccatggctcactgcakcctctagctcctgggctcaagcrattcttccgctttagcctcctgagtagctgggactgtgggcatgtgcyacatgcccagctaattctttttatttattttaatttttttgttgagatggggtcttgctstgttgcccaggttagtcttraacccctggtctcaagcaatcctcctgccttagccttccaaagcactgagatcttctaagtatttttaccccacttctaaaacttgatgaggaattcaaaatagcacaccacgttaaatgacatttattgttttataaattgtatacaggttgagtattccatgcttgggactctagagtgtttcagttttgggattattttgaatattttcattaaacttactggttgagcatcccaatctgaaaatccaaagcccaaaatgctccaatgagcatttcctttgagtgtcatgttggtgttcaaaaagtttcagattttrgaggccagatktggtggctcatgactgtaatcccagcactttggggagccaagatgggcgatcacctaakgtcrggagtttgagaccagcttggtcaacatggtgaaaccctctgtctactaaaagtacaaaaattagctgggcatggtggcatgcacctgtagtcccagctactcgggaggctgaggcaggaaaatcgcttgaacccagaggcggaggttgcagtgagctgagatcgtgccactgcactccagcctgggcgacagagctaaactccatcttaaaaataaattaattaattaattttaaaaaaagtttcagattttaaagtatttcagattttggattttcaaattagggatactcaacctacacttgttttatgctatcctagtcttgtttaagggtataataccttatttcatctctctagagatactaatgataatgttttgatatttactttggttccttgcattgttcctgttttcttggagatccttttctgtttccttatttgagtcactgtctctgattttggagactttgctcaaatgtgagttttgagacacartctcactctgttgcccaggctggagtayagtggtgcaatctcggctcactgcaacmtccacctcctgggttcaagcagttctcctgcctcagcctcccaagtagtggggactacaggtgcccgccaccacacctggataatttttgtatttttagtagagacggggtttcaccgtgttggccaggctggtctcgaactcctgacttcaagtgatccacccaccccggcctcccaaagtgctgggattacaggtgtgagccaccacacctgcctccattcatatttcatggtgaggctctgtgtgcctagatgaggcttccactctagttttgagagtrggcatgtctactggtgtttgggagcagggtgagctcttctgtcaatagcctcctcaataccactctggggagagcttccctggctttggccaacagttaccaccctgctcctgcctgccacctgccaaatttttgttgaaattactccactcccattctctttgtttttgtggctttcttccttttttcttytctttactcagattttagtgtgactttaggaggggaaggagatacatgcaagtggttgaccagaagtccttcacgttatcagtaaacattttgataataatttactgaaacttcttcccaacttcagtttctttaccttyaagtgagtcccartgctgcaccctgacttaatttttctaaaatataggtctgctaagattacatcttgccagacttttgatggcttctcataagacaagattcagaattcctaacctcaattacagggcccttgacaatctgaccctattcagtttcatcttctactggtctctctcacagtgatacccttgaatatttatttttctgtaagcctgtcatgtacttccttgcctctgtgttttttctgttccctgtgcccggaatgctctatctattcttcctgtctggtatattccyactaastctacaaggtccaaaccaggttttatctcctctgtgaagcctttcaagaccctatacttcaccacaggcagaatttattaacctctctgtgttctggtagcactaaactgatgcttaacctggcaattatacctcagggcagagcactttatttacactcctgcctcattagccaggttgtcacttccttaaaggcaaggactgtgctttcttctccttgttattctaagcataagctcagtgctgaatactctgtagacattcaggaaatgtttatcaaatgaataatggtcattgccatggcagttgactcagttgtcatctccctcttttaggcacacaagccatgccccctcttttctctttgggataccaccagtgccgctggaactatgaagatgagcaggatgtaaaagcagtggatgcagggtttgatgagcatgacattccttatgatgccatgtggctggacatagagcacactgagggcaagaggtacttcacctgggacaaaaacagattcccaaaccccaagaggatgcaagagctgctcaggarcaaaaagcgtaaggtaaaataagccaacatttctgaaccttttaattacagagttttaaaaaatgttttagacttgccttggcacatcagtggtggagaaacatctgataaaaaatggctgtgaaaatagtagattcaaatataattgtcactgtgataagagagaaagtgaatggtaaaaaggtgatgaccccatccattcctggcttagttatctaggtcaccataatgaagaaggggtctagcattttcagttccgtttsttgtggccaccctgtagtaatgtgatccccccactcaaaatttagtttccatgtctcaattggtgacaccacacttgcactaagagtatattaaaaagtttattactcatataatgaggctttctggggagagcaggggtggctcccaagctggtttgaaaatggcttgagagaactgagaaaggagattggctcagcttttatggtggttagcgggtggggacagggcaagggctcttgcacgcaggctgaggcttagatagtttgaaccccctgctggcaccaaaggagggggcactagagctttctttgtcagcttgtccagatacgggccgaagggtaaggggggagtagcagggcttgaaaacgcttaaaagtcaaatatcaaatatggtatcaaattctttrttacactgtttttcctgcatgcttccctggtggactccacctgtcaatctggccaagaaaagaacrgaaatagaaaatggggagggagagaagccmctggaacatgtataatgctgctttccagttccaggagtggtggtggtggtaatagcaataatgaaaagatggaaggagagaagaaaatggagagaggagaaggggggcgaaaccctatgtgtatcatgtgagtgaataaagtccctctccttgaaagtaaggttgacttttcaacccattcctttgacctccccaccaggcttttcacagacagccagagcccatccagttaactcctaatttcccaattaataaatagttaccatatatcaagctgttatgggctagacaatatgrtaaaacacattattccatccagcgatgacaaaactataaggtaggtcttgttaccccatattttagatgaagaagctgaggcttagactggtttcaaaatttacacaaaggcacacagtgaataaatagcatggcaagaatmtgaaccatggtctgcctgactccagatcttctgtccttaataagtagttatttamtgaggccttgaaccttcaagatgctrtggtagtgctgaagggtatacagagatgagctccttgtggtcttacagtgagtgaagaaaaggcaagtatccaactacaatacaggaaagtaacataagggccaaagaaaggtcagggtaggggcaggccaagaaagagaagattgtatcctcaagacttaagcagggctttgttccagaggtgcattttattttatttatttattttttatttaatttttttttgggggacagagtctcactctgtcacccaggctgtagtgctatggtgcgatctcagctcattgcatcctccatctcctgggttcatgcaattctcctgcctcagcctcctgagtatctagaattacaggcatgtgccaccatggccaactaatttttgtatttttagtagagatggggtttcaccatgttagccaggctggtcttgaactcctgacttcaggtgatccgcccacctgaggctcccaaagtgctggggttacaggcgtgagccatcatatctggcctagaagtgcattttagatgagccctgaagcatgtccctaactaatgagtaagcagggagagggaagagggcawtgcagccagaggaaggagcattaggggtgttcggaaagcagtgcacaggcaagtttgacagccaggcatgtgagggttctaatagtggaggatctgaccagaaaggttgggacctttgtgtaaactgctttgtatgcatttggaaacattacaagtttttgaataaggggttaatatccagaatatataacaaactcctacaactcagcaacaacaaaaaaaaacagttaaaaagtgggcaaagaacttgaatagacakctctccagagaagatacacaaatagccaacaagcacaagaaaagatgctcaacaccactaatcattagggaaatgcaaaccaagaccacagtgaaatcccattttacataattaagatgactactatttaaaaaaaaaacaaaataacaagtgttggcaaggatgtagagaaattggaatctttgtgcaccgttggtaggaatgcaaaatggtacagctgttatggaaaacaatatgatagttcctcagaaatttaaaaatggaattactgtatgatccagcaattccacttgtgggtatatacccaaaggaactggaagcaggaacctgaaaagatatttatacacccatgtttatagcagcattagtcacagtagtcaaaaggtcaaagcaacccaagctgcttgggttgcaactccattgacagacgaatatgtaaacaaaatgtggtatatacgtacaacagaatattattcagcctttaaaacgaaggaaattctaatagatactacagcatggatgaaccttgaggataaatgctaagtgaaataagccagttacaaaaagacaaataccgtgtgattccactaatttgaagtaattggagtagtcatattcatagagacagaaagtattatagaatggtagttgctggagctaggaggagggaatgagaaatcatcatttaatgagtataaaggtttagttttgcaacatgagagagttctggagattgactacacaacattatgactgtacatacttaacagtactaaactgcacacttaaaaatggttaagatagtaaattttatgttatgtgtattttaccacaatttaaaaattaaggctgggtgcggtggctcacacctgtaatcccagcactttgggaggccgaggtgagcagatcacctgaggtcaggagttcgagatcagcctggccaacataatgaaaccctatctctattaaaaatacaaaaaaaaaaaaaattagtccagcatggtggcgggcacctgtaatcccagctacttgggaggctgaggcaggagaatcgctggaacccaggaggcggaggttgcaatgagccgagatcgtgccactgcactccagcctgggcgacagagcgagactctgtctcaaaaaacaaacaaaaaaaaaaatttaagaaaatgtttgagcaatgaagaaytaaactttaatattcaggactgattagaatagagatgaggaaggaggattagatggtgttctggccaaataaagtgttattgaggccctagactggtggaagtgatggtattgtaaagtcacrgagagatgctagagacacagcgctgtggcttacaacttttctcaaatctccttcctaatatgcctgcaccactgggcttggggactttgtttttaacatgttattctcttagtttctttaatgtttgcttatatcaatgttatctgagcgtctaaatgtctagggagcaggtaccctgcctacttagttctgtatgtatagtatgcagcactcagcatcatggacagatagacacttaatgctatttaaagaacatctattggttaggcagcaataattataaaagagcattggcctggtttttttgtttttgtttttttcttttttagagatggggtcttgttctgtcacccaagctggattgcagtatcatgatcatggctcactgtagccgcgacctccccagctcaaacagtcctcctgcctcagcctcctgagtagctgggaccacaggtggacaccaccacacccagctaatttttaaatttttttgtagagacagtgttccactatgttgcccaggctggtctcaaactcctggccttaagcagtcctcccaccttggcctcccaatgtgttgggattgcaggtgtgagccgctgtgcctggccagcattggcccagttttggtatcagttgaaattctcataagcacatgaaaggttatagggttttactggtgtctgaaatatttattttttgtttttgtttttgtttttttgtctgaaatatttcaatactagttgtagttgtttgtaaaaattgaacccccaaactatggcgaaaacatatacgtgaacatttgtcttacataaaactgatgagacctccaaaccttcatgtcctgacagcttgtggtcatcagtgatccccacatcaagattgawcctgactactcagtatatgtgaaggccaaagatcagggcttctttgtgaagaatcaggaaggggaagactttgaaggggtgtgttggccaggtatgaaatcactttatacacttattatttccacatgttctgtcccaattaatgaaggctgcgtggtcatcattctgctcccttgtagatgtctcttgctcctctagctacattttaagcatataatttaatgaagagataggtttgccttcttttgtatcttttataatacctggtactatatgctttgtatgtatttatcaatcaatarttgaatgaatgaaaaataaacaagcaaacctcagtggcatgctgtttctccaagcaaacagagataaaaagtcggggaataagaaaagcagaggaggagaaagaaaaaaagtgggtcctgcaagctctctccttgtgattgctcttcacccttttagcccatagttttgacttcccaggctttcatgagtcacctcagccaccctgatgactatggattcttcatttcaaaagttattaaaagttattaatttaaagccttggtagaaactccccaaggacaaaaggaaaatacgttgtttagaaataaagagtcagcactatctatcataaatccatgcactgtagagaaaccccgtgcctttctttttttccctttacatcccttgaacacaattcyctgttctctttaagaaccaagagatcactgcaggatatttgccatccttccttgggctatattaggccatcagtgagggacaggctctatcatgatacttgtgcattggcattcccctgggcttctggtattgaaagatctagtgattgtcactggagcccagcattaccttccttcacttctcaacagaccatgcctctgtcagccaactttcgtgtttatgtaaggtgcccatttcccagctctcacatctgataccttctttacaatgcatcytactgtgaggaccactgttcttgacaggctatctactgttctgcctccacaggtctctcctcttacctggatttcaccaatcccaaggtcagagagtggtattcaagtctttttgctttccctgtttatcaggttggtttttattcctttgttcttttctagttacctgaaagagtgaaagaagtggaaaaagtgattgaataaaactattctttttcattgagtagcttttgatatataatgcttttattaaaaggcaagtatggccaccacattacagactctgggggtgctgggagaggtgccatatgcataagcaaatgcacaaaacctgtgattttgacctctattataatagactctatgatatatcaaagtactttatagcagaggtttattatattttcaaattgctatatatattttatataaaattgtrttccataactgttatttaaatatgatgatacatgtgaaaatatcttacaacgtatttgtcattaaaagtgaagtatgatttttaaataatctgataagaaccacagaggaaactggagaggccacatctggagaactgttttcaaccaattatgatgatattaatgatggcagtgttgatgatgatgatacctaatgcaaatggagtacttgctgtgtgccaagcactgtgctaaggatgacttcatgtgcatcataccatttgtcttcataataaccctctgaagttggaactataactaaatctaaccccatagaagaggaaattgagacatagagaagcttaaaaacttgccaaggtcatgcatctagtaagtggtggaaccaaaatttgaactcaggtctgtttgtgccctaagcccagcttttaaccactaaactgtagtttctggcatcaagtattagggcactaataaacaacttagtacagggatagacaagcgttgggccaaatctggccatgcctattcatttscctatttgtggctgcttttgtactactatggcagagttgaataattgaaaaagagacctcatggcctgcaaagttgaaaatatttactatctggacctttaccaaaaatgtttgccaatccctgctttagatggttctaaaggaaagatatggtagttaaatatttggaaatcatttacccccttatacatagaagaacacacatgtttagaaataaagattcaaaaaaaaaaaaaaacaagccacctccaggaatttgaaagactttcttgtgggcgaggtgacagatgtattctgtggggtctcagaaggtaagctaggtaggctctgcgaggggaatgttatatacaaggagcaggatttttgaaaaataatagaatgagctgcctgagggactccctgtctttttagctattcagtcaaacgccaaaagataagtgattctagaaaagaccagggattctacaataccatgttagctagatgactcaactgtcccttcccactctaaactgaacarttctgtgtaggatacaaactatagatcatgttawcaaacaggtatattggctgtcaagtctttcaaagtattagagagaaggtagaatcttgtcatgttcagctatagttgcccttagttaagagttgtagcatctgatgaatgagaaggagcccaattgtgaacattcacaacctttcccataggagtcctgcagggaggtcttggaatgaatttgccaggcaatatatatttcacagacaacacagggcagcattcttttattcagcagcaaatatttattgagatctgtctatgggccaggtactattctagatgtttgggatttattaatgaacaaaacagacaaaatgttgttccctgtggaacttatactctagcagtggagcagaggacagagcatagataataaacataatttttaaaatgaggtagcaatggtgacagctattatatagacatcatcaatgtaggagtgtcatgaccaaggtttacttcctagggatctacggacatcctcttcctttggaatgacatgaatgagccttctgtctttagagggccagagcaaaccatgcagaagaatgccattcatcatggcaattgggagcacagagagctccacaacatctacggtttttatcatgtaagacatccaaaaagaattaaactgggcttgtgtgacccaccttttggctgaaggtcatttgctttgtgatataatggctattctctactgttcatttctctttgtgtgtcttttctgacaactgcaatkagtcttaggtagtagccaatayaagactttttattatttctccctttgcttcttttcttttcatgatgaacttgatgaacttttaaatattatgaaattaattataacataaagcttctgccttgataggagccattaataagtggcactcactggccactacctcaaacttttattgatgcaagcagtatataaatatgtgaatgaaggtaattaaaacaagtgttttaagatttcacagatatctaaatacagcaaatcttatattcacactggaggagcaatatttagaacacagacacacagcttcaataagtatattttaaaaatgtaaagccttccttaagtacttagcttcctcaataaaggtggtaaaattatctttcatttgccaactacatccaaaagacgtggcagacacttgacctcatgtatacccatggttctttgttattttcaaattgtgactgtattcctgtggccctcttacctattggtattttccaatgggatcttttggctaaatataagcatagttttcagattgtgtgtgtttgcctctttaacagcctgttgcagtaactgtagactgctttagttagtgagctgtcttatataggtcaggaccagtcatttaacctctctgaagctcagtttttcgtaccaatgaaaactgtctgtctcagaggttgttacggagattatatgagaaaattatattaaatgcctagcaatagtaagcaccaaagaaatgctagatgattgtttattattatttcattgctattgttaaccaaagaaaattttccattcttttaataggggaatttagagtaatttcattataccatgaaaattatttgatggatttattttaatattttccatttcatgctcctgcctactgtttgctttttgtatgttagatagcttattggggatgtctgtacaaatccaatcatctctttgaaatttttcttgtttggtgatatagcaaatggctactgcagaaggactgataaaacgatctaaagggaaggagagaccctttgttcttacacgttctttctttgctggatcacaaaagtatggtaaggaatggctcatatcagacttaaaaacacattagcaactttttttttaaccatttatagaatgtgatgttactgtgctgatgccttccttttccytttttttttttttttttttcatttgtttgtttgaaacagagtctcgctttgtcacccaggctggagtgcagtggcacagtcatgactcactgcagcattgaccacctgggctcaagcaatcctcccaccgaagcctcatgagtagctgggattacgggtgcacaccaccacacccagctaatttatatatgtatatgtattttttggtagagacagggtttcaccatgttgcccaggctagtctcgaactcctggactcaagcgatctgcccaccttggcctcccaaagtgttgtgattacaggtgtgaaccaccacactcagctgatgccttccttttcaatagccattggtcaggcctttgattgtagacagtggtatgccctaaagtgtggattttgtcctataagacagaataaacaaattttagtcatttgatacttgtttctcactgaagaaatggccacttcgttgttgggagagtaacttctaagtattcagtttgctgggatagtcatctttggtcctgtctctttgatttatcaaagccagggagatacacctctaacacattccattaaccaactgttccacttagaaatgtggcttaaaatagacctggctgttgcgtgtggtcagggtcatctataactggatgcagtttaccagctaatgcagatctggttcaacttaacaaccctgtggcaggaaggctattttaagtcccctggccttgcataagcaacggagagcttagatcctagtttaaagaatccagcccttactatcctgtggacattattaagcctcccactccacccctgaaaacctggccctgtggcattctggaaagggccaaaatattacaatctcaggcaaagattcatgtacagaggtattcaacacagtggtagtccttgaaacaaaagtaagaaagaaaatctaaatacataacaataagggaatagttataaaagtatggtatagcaacatgatagattatcgtgaggctatttatgtttaaaaaattttttttctttttttaattttcataaggctattttaaatggtagatttaattgcatgaaaaaatgtttttgatatgataaataaaaaaaggaacacctaagtgtttataatattaacctaattttgtattgatatgtattagatgtacatattttcaggatatgtgtgataatttgatatgttcatataatcaaatcagagtaattgggatatctatcaccttaaatatgtatcttttctttatactaggaacgtttaaattattctcttttagcttttttaaaatgcacacaatcaaggctaactatagtcaccttactgatctatcaaacatcaagtcttatttcttattatctcaattttataaaagattaatggaagatagtaatttaaataaataagtgggtagataggcagacagttaaatataagaaaatgtaataccttggtgattttgagtgattttcatttttttcttttatctaactttattttacaaattgtctacaagtatcatttttaatcacaaaaaaaagtatttttaatgaaaacatttaccagcaacagttaaaaaaagataacagaagatttaaatattaggttattgttgatctcttatgttggtccattgcttagcctgcagtactctgtgtgaagctatcagctttgcttcactgtgtagcaagacattacaggaaayactactttgttaagtcatatgcgatgatcaatagccatagagaacttctgactaaacaatagtatgagacatgaaaatatctgcatgtttatgtgagctttctttcttgatgagaatgtctccatacggatttcaaaatcattatgtaaatacgtacatatctcgcttgaagtcaagaggaaattagaatacttttttaaaagaacaatccctggaaaatattttttttgagccaggcacagtggctcaaacctgtaatcccagcactttgggaggccgaggcgggtggatcacctgaggtcaggagttcaagactagcctgatcaacatggtgaaaccctgtctctactaaaaaaaaaaaaaaaaaatagctgcgtggtagcgcgcacctgtaatcccagctactagggaggctgaggcaggagaatcgcttgaacctgggaggcaggggttgcagtgagcagagatcgtgccattgcactccagcctgggcaacaagagcaaaactctgtctcaaaaaatatatatatatatatatwttttttttggtcacgagcagtggctcatgtctgtaatcccagtacttttctgaggcaggtgggcagatcacttgaggttaggagtttgagaccagcctgggcaacatggtgaaaccctgtctctactaaaaatacgaaaatgagccaggcatagtggcacatgcctgtagtcccagctattcaggaggctgaggcaggagaatttcttgcaactgggaagtggaagttgcagtgagccaagattgcaccactgcagtccagcctgggccacagagtgaaactccatctcaaaaaaaaaaagaattttttttttcctggccatagggcggcctaaaatttctatgaaagattaaaacaaaaatagctaccaaaactattttggtagaagatagacaaaaatgcttcagaagtagtatatatttcataaaataagactttcccttttatggctgtctttggtggtatataatctctcatcacaaactcttagcaactcttcagtaaataagaacaagaacactggcttaggcatcagagtgcctgggctcaaatcctgcctctaccacttaataactgtgtaactctgggtagattatgcatccattgcttgctatacttccctcatctataaaattgagtttataatagtgtttatctgataggattgttgtgattattaagtaggataataccagcaaactattcggcataacacytggctcagtatgggttaaataaatgttaattattgttattgctactgttattatgtctcccctttaaggcctgtaacacttctctcaaattttttagggttttctttggaagcaggggctggtggaggtgggaggaaataggtacatagatcaattgaacagagtagagaatccagagtatccaacacatatgtgatcaattgctttgcaacaaagtttccaaggcaatttaatggagaaattacaatttcttttcagtaaatggttctgaaacaactggatatctgtgtggggaaaaaaatgaaactacacccctacctcataccatattcaaaattaaactaaaaaattaactcattttaaaagctaaaaatacaacctaacttctggaaaaaaacatagaataaaatctttttttttttttgagatggagtctcactctgttgcccaggctggaatgcaatggcatcatctcagatcactgcaacctccacctcccgggttcaagtgattctcctgcctcagcctcctgagtggctgggattacaggtgcccaccaccacacctggctaacttttacatttttagtagagacagggtttcaccatgttgggcagtccggtcttaaactcttgacctcaagtgatctgccctcctcggcttcacaaagtgctgggattacaggcgtgagccactgcacctggccagtagaaaatctttatggctttgaaacagacaaacatttcttagaaagaacacaaaaagcatgaatcataaaagaaaaaaatgacaaattagactttatcaaaatttaaaaatgtctgccctttcaaagacattggtaagaaaatgaaatggcaagccaccgactgaggaaaaaaatatttgaaatatacatatacagatatatctgccaaaatacttgtatccagaatatataaagaacttttactactcaataataataagaaagacaacctactttaagagttggttttctgaaaaaaaaaataataataacaaaatagatagactgctagctagactaataaagaagaaaagagagaaaatccaaataaacacaattaggaattacaaaggagaaaatgtaggagaaatggataaattcctggacacatataccctcctaagactgaaccaagaagaaattgaatccctgaaaagactaataacgagctccaaaattgaatgagtagtaaaaagcctaccaaccaaaaatagcccaggaccagacagattcacatcccagttttaccagatgtacaaaggagagctgataccatttctactgacactatttcaaaaaattgaggaggaaagactcctccctaactcattctataatgccagcatcatcctgatgccaaaacctggcagagacacaaaaaagagaaaatttcaagccagtatcctcgatgaacattgatgcaaaaatcctcaacaaaatactggcagactgaattcagcagcacatcaaaaagcttatccaccgtgatcaagaagsctttatcattggaatgcaaggttggtttaacatacccaagtcaataaatgtgattcatcacataaacagaactaaagacaaaaaccacatgatcatctcaatagatgcagaaaaagctttcaataaaattcagcatcccttcttgttaaaaactctcagcaaactaggtactgaaggaacatacctcaaaataataagagtcatatttgacaaatccacagcccacatcatactaaatgggcaaaagctggaagcattccccttgaaaactggcacaatacaaggatgccgtctgtcaccactcctattcaaaatgatattggaagaagtcctggccagagcagtcaggcaagaggaagaaataaagtgcatccagatagaaagagaggaagtcaaactattcctatttgcagatgacatgactctgtctagaaaaccccatagtctcagcccaaaagctccttaagctaataaacaacttcagcaaagtctcaggatacaaaatcaacatataataatcattagcatttctatacaccaacaacagtcaagcctagagccaaatcaggagcatagtcccattcacaattgcctcaaaaagaagaaaatacctaggaatacagctaaccagcgaggtgaaagatctctacaatgagaactacaaaacgctgctcaaagaaatcagagataacacaagcaaatagaaaaacattccatgctcatggataggaaaaatcaatattgttgaaatggccatactgcccaaagcaatttatagattccgtgctattcctgtcaaactaccaatgacattcttcacaaaactagaaaaaactattttaaaattcatattgaaccaaaaaaaaaaaagaaaaaaaaaagagcctgaataaccaaggcagtcctaagcaaaaagaacaaagcaggaggcaatatgctacccaacctcaaactactacaaggctgcagtaaccaaaacaacatgatactggcacaaaaacaggcatgtagaccaatggaacagaatagagggcccagaaataaggttgcacacctacaaccatctgatctttgacaaagctgacaaaaacaagcaatggggaaaggactccctattcaacaagtggtgctgggacaactggcaagccatatgcagaagattgaaactggactcctttcatatactgtatacaaaattaactcaagatggattaaagacttaacagtaaaacccaaaactatataaaaaccctggaagacaacctaggcattaccattctggacatgggaataggcaaagatttcatgatgaggataccaaaaacaattggaacaaaagcaaaattgacaaatgggatctaattaaactaaacagcttctgcacagctgaagaaactgtcaatagagttaatagacaatctacagaacgggagaaaatatttacaaactatgcatctgacaaaggtctaatatccagcatctataaggaacttaagcaaatttaagagaaaaaacaaacagccccattaaaaagtgggcaaagaacatgaacagacacttttcaaaagaagacatacatgtggccaacaagcatgtgaaaaaaagctcaacatcactgatcaatagaaaaaagcatatcaaaaccacaatgaaataccacctcacaccattcagaatggctgttattaaaaagtgaaaaggtaacagatgctggcaaggttgcagagaaaggacaatgcttatacactgctggtaggagtgtaaaatagttcaaccattgtggaaagcaatgtggtgtttcctcaaataactaaaaacagaactaccatttgacccagcaatcccattactaggtatatacccaaaggaatacaaatcattctgtcataaagacacatgcgcgtgtatgtttactgcagcacctgttcacaatagcaaagacatggaataaacttaaatgcctatcagtggtaaactggataaagaaaatgtggtacgtatacaccatggaatactatgcagccataaaaaggaatgagatatcttgcctgtgatctggtctttgatatttttttcttttttattaaatttatttttatatatatgaatgagatcatgccctgtgcaggaacatggatggagttggaggccattatccttagcaaactaatgcagaaacagaaaaccaaataccacatgttctcacttaggagtgggaactaaatgatgagaacacgtggacacatagaggggaacaacagacactggggcctacctgagaatagagggtgggaagaggaagaggatcaggaaaaataactaatgggtattaggcttaacatcagggagacaaaatgacaaaataatctgtacaacaaactcctgtgacacacgagtttaccaacataacacacctgtgcatgtacccctgaacttaaatattttttttaaatgagcaaaagatttctatagacacttttcaaaagaagatacatgaagaggctgggcatggtggctcacgcctataatttcagcactttgggaagccaaggcaggtggatcacttgaggctaggagttcaagaccagcctggccaacatggtgaaacccctctctmctaaaaatacaaaatttagccaggagtgatggtgcacacttgtaatcccagctacttgggaggctgaggcaggagactcacttgaaccctgggaggcaaaggttgcagtgagccgagatcacggcactgcactgcagcctgggcaagtgagaacatgactccatctaaaaaaaaaacaaaccacatgtattatatgcaagttaaatcttaaagttgatttttcaaagggttcctctatcagacctaaattatacttaaaaaaaagtgcaatttcagaatattttcctagaatgtttgttttgtagattttaataacttttcacgttagaaaattgatacttttcattgtagaaaattagaatttatttattttaaggcaagaaattggttttccttttcattaagttgtcttttacaaataaggaatctacataggaaattgaacgcatgggttgatttgtgattttaatacattgttgctggtgaccaaaggtgccgtgtggacaggcgacaacacagcagaatggagcaacttgaaaatttctatcccaatgttactcactctcagcattactgggatctctttttgcggaggtaagatgagtcctttgaggcttgaagtgcaaggaaataaaaaatgagggtgttttcatcaaagctggttacaaatcccttctcattagctgttgtgggcagacataaatgtgggaaagaaaaaatgtgagaaagtgaagaggagcggattagagaggagagtgaaaggcatgcctcagagctatttctatctggtctctgttgagggcatgaaatcaagttgtcagaaagggagccagagccattttcttatcacttccttcctagacgctcttgataactaagtttctcttcctgacagctatcttttcttcttgaaagtgagaaaaatagaactacaaggaatttagcaaatcagaaagtcagccttacagaaattctttttactcagcagatttaaaattctgtggcatattttaactgtactaaaacaaaaacatatgctcttgagaaagatgaatttagttaaaataagattttccaatggactatcttccctgcatcctaagaattctctgtagatgagcgatctcaatatggagggggctcaagatggctgcagttccagctgctctttgtttcctgtaggagtagaagcaaattaatatcattcttttgatgcatgtgtttttattgcattggtccatgtacaatacaaggaatatgtatataccactcagtggcccagcatggaattctattctgataatcagaacctctacttctgattatctgcttctcttcagttctttctgtttttatcttagttcagctgttgcttccaaaggaaatcagttgccaaccacccccctccaacacacacacacacacacacacacacacacacacacacacacacacacacacagttatttaatcaggcagacatttttcagtgtctgggttatctggtttggggaacatacaggaatattgatcttgaaataaagcctctgacctttcgacaagaaagtaatattctaaragcccattgtcagatccccaaacaggctgaattatgtagtaagggggtcacctgtttgaggccacggctttatcctgtcatttgaagtgcatatactgcrcttttctcctgtcggtcttcaagaccttaatttccctgtgtgcatcatttatccaaagcttggttgcctcacttggccttcttttgcttccagctgacataggcgggttcattgggaatccagagacagagctgctagtgcgttggtaccaggcyggagcctaccagcccttcttccgtggccatgccaccatgaacaccaarcgacgagagccctggctctttggggaggaacacacccgactcatccgagaagccatcagagagcgctatggcctcctgccatattggtattctctgttctaccatgcacacgtggcttcccaacctgtcatgaggtaaaaaagcttcatccattcagggaccccagcaaccaatctgtaatagaagatctcagtgattaaagaatgcaataattacagtgatttcaagagaaaggtgaagaaaagctacatgtttaatcaagtttcaataagcttattgagcagcrcggtgaacagggtgctggctgttggggacacagaagataaaaactgctactgctttgtgactaaagtrtgaatatttgataggagacagaatagagatatttcaaagaaaaaggaagtggctttgtaataaaattcattcagtatttaacctatcagtatcttctcatgaagaataacttattttgccaggcttaggcttgaatcatatgaaaaagagtcttggctctttggcacgttcccatttcctttgaatagttataaaactgaaaataggccaggcttggtggctcacacctgtaatcccagcactttgggaggatcatctgaggtctggagttcgagaccagcctgaccaatatgatgaaaccctgtctctaaaaatacaaaaattagctgggcgtggtggtgtgtgcctgtaatcccagctacttgggagaccgaggcaggagaatcggttgaacccaagaggcggaaactgcagtgagccaagatagcaccacggcattccagcctgggcaacaaagtgagatccatctaaaaaaaaaaaaaaaactaaaaatataagtgattgattgcaataagatgtctataatgttaaaacaataattttttttctttccccaggcctctgtgggtagagttccctgatgaactaaagacttttgatatggaagatgaatacatgctgggtgagcatttctgtttttttttttttttttgagacggagtctcactctgtcacctaggctggagtgcagtgatgctatctcggctcactgcaacctccgcctcccggtttcaagaaattgtctgcctcagcctcctgagcagctgggattacaggtgcccgccaccatgcccggctaatttttgtatttttagtagagacagggtttcatcatcttggccaggctggtcttgaactcctgacctcatgatccacccaccttggcctcccaaagtgctgggattacaggcgtgagccactaggcctggccaagcatttcttgattaattacagtcattataaaaagtgtaattacgtttttattatattttctaatataagagcaataaaaaagttcctaattccaagaaagacaaaaaataaaaatataggaaattccttcaccaagatttctaatgcattattagtaggatcatacctccattctgttgtgatgtagcatttctcataatattgttcttgctgacttatttgtggatgtcgtttaggattcttgttctgggttcactcctctaatcctgtgagatcacttgggggaagggaagtagaaaaaaacagcccaggtggtgatagtaaaaaaccagaagagcttatttcatatgcaataatagggtttttctttggttgacctcttctttaacaaagattaactatcaaatccagaacatagaattttaccagcttagtagcagggctcaagaagccaggctaaatatactgttccccaaagggtgactctcatttctgagttctatttttttttttttttaaatggagcctcactttgtcacccaggctggagtgcagtggtgtaatcttggctcactgcaacctctgcctccggggctcaagcaatcctcccacctcagcctctcgagtagctggatcacaggcatgtgccactatgcctggctaattttttctatttttagtagagatggggtttcgtcttgctgcccaggctaatcttgaactcctgacctcaggtgatccacccacctcggccttccaaagtgctgggattacaggtgtgagctaccacgcccagccccgtttctgagttcttttaagtctccactcatcattaggtctcagtttaatagtcactgccttggagaaacttccctgaccactcctggtttccttataccttattctacctagtaaaaatcagcccctcttattatgtaactttcattccattttgtaatttggtctcttttggtatttgtcttaattctaattaatttgtaattattttttaatatttgttttcactaactgtaaactccgtaaggtcaggagccacgcttgtcttattggccactatatccccagagcctagcatggtgcccggcatgcagtaggcactcgaaataagtatttattgaataaaagagcaaagtagtaagtgggtgaattttacatacgtgttgtgccaaagtcaaagcaaatttaataatccagattgcctttaagaaaactagaggccaggcatggtggctcatgcctgtaatcccaacactgtgggaggtcgagtatgagatcgcttaaattgaggagtttgagattagcctgggcaatatagcaagaccctgtctctacaaaaaatttaaaaattagctgggcacgttgggtgtgtacctgtcatcctagctactcagaggctgaggctggaggattacatgagcccaggagttagaggttgcagtargctgtgattgcactgctgcactcccacttggggaacagagtgagaccctgtctcctgtctctaaggaaaaaaaaaaagaaaaagaaaactgcagcctctctgatgataactccaagcaagagggtctgagcacccacactgaccacacttctggataatagttgtgggctccccatcttcagcttcactgacagcaaacagtaaagcacttggaaaggagcaatgggggtgctttgactactgacacattagcagttagacacaaaatgagacygatggactgtgtcagagtcccttcctataatctcagtatacccagagtgcattaatgacaggcgatgacctttttgagctcacctctttgagcgcctgccctctttctatcagtgcatctctctaacaaatcattggttcaagtcagtctctgcctctccaaagttcacagctgggaggtctgtaacaccatgatagctagcactcagttaaagagaaaggagatttttagacctcttataatgatactcaactttatttcctctccattacttagggagtgcattattggttcatccagtcacagaaccaaaagccaccacagttgatgtgtttcttccaggatcaaatgaggtaagagtaataacagccacatatctgatatgtctcatatctctcatcccttcttttcttttaggaaagagatttcttcatcatgtgtttgtgaacacaccccagatgactatagcaagtaattattataataagtcatgaccactgtcctcagaggtcaagaaacttaatggaggagaggagggagaaagatgaattggtgaggattccaaggaggatcagaatgatttttagtcttcacactttgactagtaaaagtgagtcctgataaacacaccgaggcttggggtaggaagaaatcttcagtctgctatgaggtatcaaactctgggggaaagcagatatgaagtgactttgctctttggtctggctctatctgaagcctgagtttttggtaccaaaagctggtctcaatacactcactgaagtgggtaaaaagtaaaaatagtgactcccctcccacattcctctgctcttttattagttattgtcactaattactgtcccaggtataaaatatcatcctagacctgctggagcccagggcactgaacccaggcagggcacaggggagaggagggaataccagcggtctgcaggcagagagccatgggtaataagagcagccttcagagacaggccacagataaatccagaagggccaggagaagagctggagcaaaactcaggtcaccagactaagggaggagggtgtggaagggagagcaggaaggagacagaccctagagagcatccttgagcacgggagcatgccacagggttcagcaggcaggggaagagccacgcaggtatggagctggcatgggactgccaggccacatagtcatggactgtcaaggcaagtggcaaggtagctgagccaggccacgcttgctgctcagtactgtcaggtgctgggctggcaaccccatgaaaccacatccagcgccgtgctctccctcaacatagctttacatgtttggttgttcttttagtttcttgaggcttctgtaacaaattacctcaaacctagtggtttaaaacaacaaaactttattctctcacaattctggaggcttgaagtctgaaatcaaggtgtcatcagggttggtttcttctggaggccctgagggagaatctgttcatgcctccctcttagcttctggaggttgccagcaaccctgggcttccttggtttgtagccacgtcactgcagtctcgcctatcttcatgttgccttttcctctgtgtgtctctgtctatctcttataaggacacttgtggtcacattgaaggcccacctggataatctgggataacctccttgtctcaggatctttaacttaatcaaacctgtgaccatagaaggtaatattcattccttccagggattgtgacgtgagtacatctttttgaggggcgacggttccatctgctatgcttgtcattattgacagaacagtaaccaggcttctctccagaatgttcatgaactatggtctattctcttggtttctccagttatttggagttctgaagatgagggctctttactaaggttcccctgccaagtagaaacctgaggaaaaggttaaatgcaacaactgctgagtaaatgccctgccagatatttttgctgagaatttctcaagttgattccagcaaagtggtgggttcccattaagaggaactggctccctttccgacttagtcacagagttttattcgtgatctrtcatcattccaaacacgtcgttgtgagtgtgtattatgttccttcagcactatttcctggactgttctgtgattgtttctcttgcttcacaaacctgccgtataaaggatgtggtaatccctggaggtgaacttgcaaaatagactccagggctgccagaaagtgtactgagctagaagaaagaaaaagatgtttgctttcattctgcttctgatgatatcttaagaatttatcccatcaaattactttagagaccttattggtacttcagcaactaaacccycttgatagataacaaccttatctttgaattgtgctttgtttaaaaaaaaaaaaaagatactataatagtaattcaagtttccatttttttcctcccagatatgtttccttctctgatgcttccttttctcctgcctcttttgtaattgatttgcctgcaatgtgcttgtcttctttgttgtttttttttcttttctccatcacctctttcactactagaagcattaagtttttataagccaaatggactataagatccatgaggacaggaactatgtcttttctgttcagtcttgtatattcagcacctggcacagtgctgggcacatggtagattgttcagtcggtagcttttggatgaatagaaaacaaatggccttttagttaaattaatcagccatagtcytttgggatcttcctaaaagcacgtattcttcctaacttctacccaatatattttttaagttatatttattttagctttctggttatttgaaatccaggtaagtggatattttgctgactaatgaaatggtgagcagagttgcttatgtactcttttttactggactctgttactttctaggtctggtatgactataagacatttgctcattgggaaggagggtgtactgtaaagatcccagtagccttggacactgtaagttattttcagactactatttttacctatcatgctctattggtcggctagggctgccatgacaaaataccacagactgggtggttttacccaacagaaacttattttctcgaagttttggaggctggaagttccagatcaaggtgccagccgattctgttcctggtgagagatcttttcctggcctatagactgctaccttcttgctgtgcctacacatggcagagagagataaagagaaggtgctgtctcagttttcttcttacaaggacactgttcctgtcgtttcaggaccccatccttatgaccacatttttaaccttagttaactccataaaggcctgatctccaaatatctcaggcttggggattcagcatatgaatttgggggacatacaaacattcagtccataatgtgttcctctgtaaaaagaaccaaggatgctagtgttctgcacaatagcacatatgcatagagacagaaggtaggtccgggggtgcctagtgctggggcagaggagggttaaggagtcatggggaatgactgtaaactggtccagggtttctttttggggtgatgaaaatgctttaaaattgagtgtggtgatggttgcatgactctgaatatgctgaaaactgtttaattgtatactttaaattggtgagttgtatggtatatgaattctatcaaagctgtaaaatgtgagaaaaaaagttaaaaatcacatctactctgatttcacagaatgagacatcagagacaaacacacctcttccccgtatgtttacatttgtgtgtctaagaagaacaaaaacactgaaaacaaaaaacatggtagtcaccatatgtgccatctggaatatcattctacaggattaaggcaaaaaacaggagttttcagttgtaatcctgggcccaggggaatgcatcagttatgatgttaaaatcaaagtggtccatccaggctatcttgagtttctaaagggaactttctttctacacctgaattacaaccactgccacactactacaggcccaaagtagtgtgaagattaatagatactgatattattttgtaaaccatcagcagcaatatgaaccccattatttaaaaaaatagtttcagataccaactttcagatctagaagagaacttaacaattatctactctaatccctcacacaggtaaaaaaccctgagattcagagaagttaaattatttgtccaggaacacagcaaacttgtggcagaattgagacaagcccccaggtgcattcccttgggctggactcccattctggaacccatttcactctaacttatggccttgttctttgaaaaaaaaaaaaaaaaagaagagagagattggccagtgaggaaggggcatgtgtggggagatggaagtgctttacttctcactgccgaggcaagttaagcagaggtgggacatctgaactactgagtcctcagtctcaacttcatgtatgttcttgtactctcctgcatgctcattcttgagtcagagcaaagcacaagcccttctctgacacaggcagcttccttataggaggtgggaaacctaccctggcattgctacctggagtgccattccagaagactcatagttatgggcctgttgttagggtctcttaaagtacccttggtagtctctaatgtaagagcagcagtttcacagatttaccctcagaattgagtcagtcatccaggtaatccatgtaatccaaacagggagcaagaggggacaggctgcagtgagtgaggacaaaagtcatctgtccaaaccaagaaaccaccatcagttatacatacacacatacacagacttctgggcccactcacacagacagaaaacttcactcttcagcagggttctggaaataagcatgtatatactacactgataggaaaatttaaaatacaaaataggaaaagccacttayaggatgggcagaaaggaattcatcacttaagaggaaaaaacagcaaagacaggtatagataacaaaccaatgaagggtgggaagtttccctaataattaaaaagtggaccattcttcagcgttagagctcttttccttttaatgccaggacccccatatttgccatctctgtgccccaaaatttattttgcctacaaatccgtacttgtagactgtgaattttataaaatgaaatatttttaaattctaccttgaaattttcttatatgaatactgcttccctgagcgtgctgctctgttacagattccagtgtttcagcgaggtggaagtgtgataccaataaagacaactgtaggaaaatccacaggctggatgactgaatcctcctatggactccgggttgctctaagcactaaggtatttggtaaatctgttactcattttgtttctactctttctttacagtgatagccttttgagtgtgtgacactacgtaaaagtggtgagctcctgacatttatctagaaatcaaggtttgaatcatttctgaatcattgttcagcttgtctgccttccttggaattgttcttaagggaacctttgagatcyaggaatgacagaaatgttcctcttgggcactgtgagtgttggtgctcttcaacttgacgttgattactactggagtgaatgctttttgggccatagacagccttcccacgtggattagccctgaaacccagtctcccataaaacggtacccatgtctatgcaccatttcagagatcccagtcccaaccagtgatttcttaycaggtagctccaacaactaaaacccccttgggcaaagcctgggaggatccagaagtgatgtgtccttttcagattttttaagcctagtgaggcctgtagcagattcctctcctgtccatttgttcaaacctagtacagggccaaacaccaacccttactcttactatattaatactcacttgcattgatatcaatattataaaataattcagttgtagggttttttttcccctatctttttcacttaggcatgtcttcttgggccaaactatgggtcccagacccatgtgaggccccagaataaatacaaaagactagcgatccatatcctcctactaaaaataaaaataaatttaaaaaaaggaagcagataccattctctgagtggagggtcttctaaagatagttgatgtcatctattatgtattaattttttttaacatcgttgtcattcaatgaactttcttggccttgttgtcacattctggtggagtattttcagggaatccacttataccactgaacatacttcacagtttaaattctttgaacaaagcctaactctttgtgctcctcttatgtgactttcctattgttttactatctactcaggagtgattggctattgaatatgttaggtatttgtacgactactttatatagcttgaatttttcacaaactttttactctgttgttaccctttaggagctgacattcttttcctgtaaagctatcatataagcacattctgtctctgtgattcattctccagggttcttcagtgggtgagttatatcttgatgatggccattcattccaatacctccaccagaagcaatttttgcacaggaagttttcattctgttccagtgttctgatcaataggtaatggcagctaaagaaactgtttgttttcttaagtaaatcacactatccgttcagcatcctcaaatcaaatgcacaggtatgttttaagttactatttaaagaaatgaatggtgaaggccgtttccggaatatttttttcttttcttttcttttctttttttttgagacagagtctcactcactctgtcgctcagactagagtgcagtggcgtgatctcagctcactgcaacctccacctcctgggttcaagtgatttctcctgcctcagcctcccaagtagctggaactacaggcatgcaccaacayacccggctaatttttgtatttttagtagagacggggtttcaccatgttagctaggctggtctcaaactcctgacctcaggtgatccacccacctcagcctcccaaagtgctgggattacaggtgtgagccaccgtgcccggcgcatttctggagtatttttcaacctttctaccataaacaatcctcccttattgtcttcacctttctttcccccactttttttttttttttttttttttttgagatggagtttcactcttattgcccaggctggagtgcagtggcacaatctcggctcaccgcaacctctgcctcccaggttcaagcgagtctcctgcctcagcctcccaagtagctgggattacaggcatgcgccaccacgcctggctaattttgtatttttrgtacagacagggtttctccatgttggtcagcctggtctcgaactcccgacctcaggtgatctgcccacttcggcctcccaaagtgctgggattacaggcgtgagccactccgcccatctccccgactttctaaaaaatgaaaaaggacttaatttaagttcccactaattccattcattcatccattcaccagctcactaaatatctgatttattacaatttgattataatatccaagtcacatttgtaacttttgtgttcttcagttatttttcaaataacttgttaaaaagagcctgatttggccaccagttagctgttccttggtacacagagttgtcttttttttttttttttttgagacggagttttgctcttgtcgcccaggctggagtgcagtggcatgatctcagctcactgcaacctcagcctcccgggttcaagcaattctcctgcctcagcctcctgagtagctgggattacagatgcccaccaccatgcctggctaattttttgtawttttttagtagagrcggggtttcgtcatgttgggcaggctggtctcgaactcctgacctcaagtgatccgcccacgttggcctcccaaagtgctgggattacaggcatgagccaccatgcccagcgagtcgtcttttattattattattattattattttgagatggagtctcactgtatcacccagtctggagtacagtggtgcgatctcagctcactgcaacctctatctcccaggttcgggggattctcgtgtctcagcctcccaagtagctgggactacaggcacccaccaccactcctggctaatttttgtatttttagtatagacaggattttgccatgttgcccaggctggtgttgaactcctggcctcaagtgatctgcccacctcggcctcccaaagtgctgggattacaggcgtgagccaccgtgcctgggtcttttattatctcttcatcctagtaaatatgactcccatatggatcatgcctccaagggacagatgggagaggaactcacaaggctggagatgttgagctggtggccacttcaaacccccatccctctccttttaatactgtttgtatctattccagttytgctgaccrgaggggtcattatcccagcaagtgtgtggtggagaagatcttggtcttaggcttcaggaaggagccatcttctgtgactacccactcatctggtgagaaagcagtccattcttacctcaccatttgtttttataaacagaagtatctgcagtgagatgattagtccccaaacggagataatatgctgagcctgagtgtgtgctttcaggtagaggtgaaatatactagtctgtagaataaatgaggccatcttgcttctcttcatgaattgatctttctgctcacttttaatgtttttctaaggaaacttatttggggcttgaaataatatcatagcttctctgaatatttgtttaaactatagctgcctgaagacctggaaaatcctacccatgtgtttggagtttatgaaagggcaggatgggacttatatccttccttgcttcctgaagttcttggacaaatttattcattccttacggtttcttttcaaccaatcttgcggtcaaaacaatgaagttttccacgtttctaaaacttcatggaagttcatgggtaaaagtgctrttaatttggagtggggtataaggttttatgatacagtgagaaaacatttcagatttggagaaaagacttttcccttctagagattcatcaaaatttccctcttttattgtcttgctatttagatggtaaagatcagcctgtggcttttacgtattgtgccaaaacatccatcctgagcctggagaagctctcactcaacattgccactgactgggaggtccgcatcatatgacaaagaactgcccctggtgatgtgagcagggacctgcctgcccctttcaacctttcccctcaccttttttgagatttttgctgcaatctgtttgccttccctgaatcaaaataatctttcattcgtcaccattatactaatgaacaatagatttcatgtttcaaaatttcagattttacatgttaagatgtactaacaatattccttgtatcaaacatctccttttctccctgatacatagccctgagacatttatagcgttcaggagtcttctattgcttccattccttcagcagggctgcgtgggtctgttttaacgtgggccaagcctacctgggcagcccatttgccagggyttgcctcaggccatgcagcattggcgctctggctgcagcagctgagttgctcaaggccagtgtccaagtggacagcagcctctggtactccccccagttatcttccacccacatggactgggcagagcagccctcttctgtgtgcactgcatacgctgcagccgtgggagttattctcccctagagatcgacttggcagcacgaaggattcttttctctttcatgcttctcaggctcaatagtttctaattaatcttaaaatccatgtcttttacattgtttttttaattaagtgctgtttactaaccaaataatatttataacatgagtaagctataattaataacaatgaaataaatacccatgtacccaccactggacttcagaagtagaactcatgactgggactaggatgaggcaagggagaccctggccttgggcacaaaatgtaagggatgccaaaaaaatacagtaatcaaagtaagtaatatttcaatccaatatttttaaaaatcagaattaatgcaaaaaaaaccatgatgaacaaaatattaaaatttaaaataaagacaggattagtattactgagttttccttttgtcccaggctctaatatggcttggcatggggcagaacattacaacataccagtcgtgtcatggtgcccaaggctccacagacctcagtggctccctgctgcctgccacagcatctgttttagcagcctcgactcctcagcactcctcagcacacacctcttcttatcaggcttcctccacttagcarcttgctaacggccacctctgtgccttctgatccctgggcgccaatatcctcctgcccttaccatccttccaggcccaacttaaatcccactttcccatgaagcctaactgcgtgaacacccctacccccatacccattagcagtgattttgcccttccccgtaatgctgtcccacttataactgtgctctacttagcattctcagggatcataccttaatgttttcagtatgtctgcgttctcctactagattgtatgtccctcaagagcatgttctgtttctcttctrtctgacagagcactattatacctgactttcagtaactgttagctgtgattagttagctggtggatttaattgattaaaaaattacgattgaatgtatttccatctgatttgcttttctggtacaagattcttcccaaaggcaatcaacattgtgcatttccttgtggacacatttcatagtatgagttgagatttgagctctgcaccatatgtaagctcacagagacctgcacagattctttgctcctatttctgtaagttttgcagttgagaagaaaggagcaagcttatattagctgaagccatggtgcctatcttcaaatttcccttgccaacctaaaataaaacttagccagaagactgggtgctcctccctaatataaatgatagtttttaatagcatttacagttgaataagaactatctttaggtcaacatttattgcacgtctagtcttccatttaaaatattattggaggaatggagcagtaactagtagagtaagttaatgaggaactgctctgttttgacccaaatctatattgaaacatttggctagagacaagtggagacagcctgggtgtttttaatggttttctgctcttattgcttctcacactttacctacctcccatttctgaatttgtgtaccagagagcaacatggggctgagttggcctacaggtattgttacttttttgtggctaattcttaatatggtttcataggaaactggattttatataagaaattttattcatttcaacagggttcctaaaaaagctctaaaatgaatgcatagtgtgtctttccttcaagatgtaaatgtcaaggaatgagttggcaaatcagtttaaaaacacaaactacccaacagaaaaatgtaagtataatctttcagagtggcaatctggcaacaatataaaaaatattttaattttaataaaaatatgtgggggtctcactatgttgcccaggctagtcttgaactcccggactcaaacaatcctcctgccttgacctcccaaagggctggggctataggcatgagccactgtgcctggccttacctcctctgttggaacagttggcaacattggaatgggatcttttgattacatggtaatttttttacttttgagcattgtattaggatcatatagaagaattttcttggttttaagaaaaatacaattctggagtttggtctgtgtgcagaattccttcactttgtcacatccttttcactatcaaggcatcaaaatgataagcagcagaaacacagtcaaagcacataaacactgggagttgaatagtttttagctaattaaccactctgcctgaaagccttagtaatgagattcctaggatttccacctaccaaaccctcgaagggctactctagactaaaataacttctcaggccagtgggtagaaagccatcagcagctccactggaaacaggctatcatattagccactgacaatggaggccatatagctagcattctaggagaaatagcagagacattggcatcttatatcagatctgcttgtctcatgacaagccttgctaaaggctatagtgccacacgaagacttgccagaattagacagctgctgctgctttttttttttttttttttttttttattgagacagaatcttgctctgtcacccaggatggagtgcaatggcacgatctcggctaactgcaacctctgctttccgggttcaagcgattcttctgcctcagcatcctgagtaaccgagattacaggcatgctccaccaggcccagctaatttttgtatttttagtagagaaaggttttcaccatgttggccaggctgacctcgaactcctgacctcatgtaatccacctgcctctgcctcccaaagtgcaacagctgcttcttgacagttgtttccacccaggccgacggtattagattgctgtccaatcagagccagggaaaggggagcctgactatttacatgcaaggatacagagatcttatacctaattcacatcaattaaatcttagtcaagcatttacttccaaggaaatcaagagacctggagtctagtttgcttctacagtgaactggctgagtgatcttggccatggcatttgacctctctgggctttgttaaagaaaagagataatctctagcctgggtgcagtggcttacgcctgtaatcccagcactttgggaggccgaggcagggggttcacttgagttcaggagttcgagaccaacctggccaacatggtgaagccccatctctactaaaaataacaaaaattagcagggcatggtggcacatgcctgtaatctcagctgttcaggagactgaggcaggagaatcgcttgaacccgggaggcggaagttgcagtgagctaagattgcaccagtgcactccagcctggtgacagagagagactccatctaaaaaaaaaaaaagagagataatctctaaaattttgtgagttttctgatacttaactgtcaaaatacagcagatatctcaagtttcctcagttgtaaaatggacttagtgaaacttgcagagtttttctacaaatttaaaatatcttatgtgtacagaaagggaaaaatagtaacattaccagggagaaacccagtaaacatcactttaggcaagtgatcaaagttgacatcacctgtaataaaacctatcaatatcatgtgcccccaaatatggtttgaggaggtagccatgtcacatctgtgacagtcttcccctaaatccataacctcagtctaatcatgtgaaaaatatcagagaaacccaaatttagggtcattctacaaaaacctgacaagtactcttcaaaagtgtcacggtcatgagagacaaagactgtggaatgatcagagactggaggacactatctttgcaactcttttgtaagtctttgcaagtcttttgtaagtctaaaattattttaaaataaaaagttttttaaaggtctctgtgaagtggctagctcccagtaggcacttaatgaatgagaggtattataatgataagcaaagacattgcttccaatagtgttagtaatcaaagaaatgcttcttggtggaaaagacagagccattagttggcaatgctgtgcagcagaaaccattccagccacagatattacatgaccgtgggtgaaatatgttataaaaactagttctttatccttgaaggggcttctgggaattgaaatgtgcagttgtttatgtgttcattatctgccctttgttcatgggctcgagttggacttctccctgatagcattggtttccacagctgtgccattgaataaaccttgagtttggacctgttcatctgagagaatgttttatccacaacaactgacagagcaaaatgaatggcaccttgccctttctgtgtttgatatgcccaccctgctctgacaagaggctcgctggtgtcacacacttctgttagttactcacagatggtgctggctgagacagctgaggaaagaaagctcagtgggtatgcggcccaagacagctccttcgcctggagcagatcagcagagaaactttgattgcactggcaaagccagaagtgtaagaaatttctctttgcataggaaaatttcattcaccagatatataacacgcatttattaagggccttctaaacctgagagggaaatgggaacccacttcccagctccacggtcttatgggcaaacgggaagttaaataagcaaaaacaatacagtgtgggtcagtgctctgaatttcagggtgggatagaatgctaggctgggacccaaacttatgacagtgggggaaagaaaccccacctttgctgtctatgccactggtgactttgagggtggaagtcagtctttttgttgcaggcagataggccagcttctgattggagatgctgcataccacatgagcctgggcagattatacctattcctgtgctgtccacatagcagatattcagttaatgcccattgagtggatgctgatttgcgtcagcgagtaaatgtagcattcgacctgatctaactccaaagtaatattaaattcaggtcttctctaacaacaccatttattgagtgcttaagaaaatcctggcactgtgtaaaatgtattacataaattatttaattgttaccaaaacctaataacagaatgactgtaattgtacctattttataggtgagaaatctgagacagaaaggaagaaataactcacctaaagttacacaggcacagccaataaggggccaacctagactttgaaccgaggtggtcagtcaccagagaccactgtcctctattctgcctctccaagactagtaaaaagccctgggcattttcttggagggacagatggctaggctgatggttcctgcaagcccagacatagagtccttcaaagccgcaatcccagggatcaggaggctgatagtactccctattttacctgtcacttcccaccttcttccatagcctctaatcttggattattgagactggtcgcatgggaacaggcatgactgcagcctaggacatgcctccactctgccatacttgaaatgtgctcatctccttacagcccagggagcagctattgtgggtagaagacaaggtggaggccaggcaggcacttcccttccccagagccacttatgctctcatctaagagccctgaaaccaggtgtgacatcccaggagttgacagacagtctggttcagtatctaattccaacttctgtctcagatgcctaatgtggcatggctgaatgagtcaacatataacctgtacagtaagtcctcacttaacatcattgataggtgcttgtaaactgtgactttaacgaaaacataccgtgtgctgtagggacttaactcttgtttatatcagttagcctggtttcactatacagtacatcattttgcttaaagtcacagcttacgagaacctatcgatgatgttaagtgaggattttctctgctcaggtgcacttttttttttttttaagacggagtctctttctgtcacctgggctggagtgcagtggcgtgatctgggttcactacaacctctgcctcctgggttcaagcaattcttctgtctcagcctcccaagtagctgggattacaggcacccgccgccacacccggcttatttttgtatttttagtagagacagggtttcactattgttggccatgctggtctcgaactcgtgacctcatgtgatccacccgcctcggcctcccaaagtgcagagattagagacgtgagccacatggcccagcaggaccactttttagcagattcagtcccagtgttcattttgtggatggggagagacaagaggtggcaaggtcaagtgtgcaggtagagacagggattttctcaaatgaggactctgctgagtagcattttccatgcagacatttccaatgagcgctgacccaagaacattctaaaaaagataccaaatctaacattgaataatgttctgatatcctaaaattttaggactaaaaatcatgttctctaaaattcacagaatatttttgtagaattcagtacctcccgttcaccctaactagcttttttgcaatattgttttccattcatttgatggccagtagttgggtggtctgtataactgcctactcaataacatgtcagcagttctcagcttctttccagtgttcaccttactcagatactcccttttcattttctggcaacaccagcacttcatggcaacagaaatgtccctagccaggttctctctctaccatgcagtctctcttgctctcatactcacagtgtttcttcacatctatttttagttttcctggctcaagcatcttcaggccactgaaacacaaccctcactctctttctctctccctctggcatgcatgctgctggtaggagacccccaagtcaacattgcttcagaaatcctttagcactcatttctcaggagaacttatggcttcagaatcacagctcggtttttaagatggacataacctgtacgaccttctgatgggctt

SEQ ID NO: 95803 - DNA, 29668 bp, Homo sapiens
gagctatgatcgcaccactgcactccaaccaggatgacagagggagactctgtctcaaaaaacaaaggaggggtggggaagtgtcaatttaggggaaatgtaaggcacagctttctcagtggcgtgagtggagctattttagctaccactaaaagtccgagggttgtaattaagtcaggatgaacatacattgtatttccagaaccatcccaatgggacagacccttctaaggcaatttccccttcctgctgtcccttctttgactacagtgcagggagcaacagctacccctatgctaaaataccttctcttgcctctgtagagttcccaacagagatctaagctatacctgagcttgtttagaggccttatactagttctggactttctatctctttagcattcagctctagctgacccacataagttcagtttgtcaaagactcattaccatgcagtctttatgggtatagcattatcctaagaaggacagttataaataactcccagaaaaaacactcagagatatcttgaaatatcaagatggcagcatgcgacacaatatgcagcttacaggagtggtgaacactgaaagtagttggactacatgtatgcaccctgcatcatgcagtagctattctcctgagaatctgtgagaaaatcaagtgtcctagaagttaagggctcaggcttttgagtcttagaggcctggatttgaattttggctctattagccacttggccactgtttcacttaggacaatttgtttaatcctgtagggctcggtttcttcatctttgaaacaaaaatattataagaatacctcatagatgactaaatgaaataacatgtgaagctcttatctggcacatagtaagtgctcagtaaatagtagttattattattagagtagaaatgattttaaaattaattgaagctggccgggcatggtggctcatgcctgtaatcccagcactttgggaggctgaggcgggcagattgtgaggtcaggagttcgagaccagcctggccaatatggtgaaaccccatctctactaaaaatacaaaaattagccagaaatcgctttaacccgggaggcggaggttgcagtgagctgagatcatgccactgcactccagcctgggcaacagagtgagactacattaaattaaaaaaaaaaaaagcagcaatttggcaaatgggttagcctttgcctttaagtttagtcagaaccttaagaaagagaatggtgtttactgtttttaaattccagaagggtatttgaagactaaagtaaaaaaaataagaagatcccttggagcagacttcaaatgtttcttcctcagttttcttaaagctgtatcagtttcagtgctaacctaagctgagattattttaaatacttggagaaagctggcatttaatttagctggagctagtgttttgcagttgtcttccaatgaaagaatctacctcattgggagatgttgagcagtaataacacagctgttcaaaactagtaaaaatcctaaaatgattcgtaagggacagtgcagaggctgccttcacaagattttgtaactcatttgaaatcaaagactgcaaagtaccaaagagggagctctggttattctagcctgggccatcagagtggcattgaacaattgattaaggactctggctgtgtcaggcactgtgctagggatatactggtgggtaaaacagactccctgtccttaaggagccaacagccatataagcaggcaattccagggaacacaggctattgtgggatcaggccagtcccacagcatttcagatttagaaagtaaattccatcagtttacctggaattgactaggtagtcaggaaaaagagaacattaagaagggaaacataattaggaagcaagaactgagctagaactcaccacactctgagggataagctagaatgtttattattattattattactaatatttttgagacagagtttctctcctgttgcccaggctggagtgcagtggtatgatctcggctcagggcaacctccacctcctgggttcaagcaattctcctgcctcagcctccagagtagctgggattacaggtgtgcaccaacacgcctggctaatttttgtatttttagtagagacggggttttgccatatttgccaggctggtctcagatgggttcaagcaattctcctgcctcaacctcccgagtagctgggattacaggtgtgcaccaacacacctggctaatttttgtatttttagtagagatggggttttgccatgtttgccaggctggtctcaaacttctgacctcaggtgatccacccacctcagcctcccagagtgctgagattacaggtgtgaaccaccacacccagcagaatactgatttaatactttacaatgagatcttcatctttccagctatcagatcacttgtgctcagcctgcagggtaactcccctatgccaaggttcccagggatgagcttggtgagctcacaagttagaggaggtgaatagttttgagggatatttcataaaaacccacagaattattcttgtcctcaatagatttaacctttccagaggccagaatattctgattccatccttaggtagatctggatgaacagactccgataggttggccactcaggcttcctttttaaaaactccatgttgataatcacaccctgcaaatgcagtcttttaaatatgttttttgtttattaggtaattcactcacgtgttcaaaggtacaataaggcttacagtggaaaatctctctcattcctgtttcctagtcatccaggtcccctccccagggacaacttaggttatcagtatctgtgtatccttccaaatatattttattgatgcagcccaaataatattttctaaaaaaattgcagctttatttacattccaggcatgagaatatactttagtcaccttgtttgaacttgagtaatacattattgtttctaatttactttgagagatatccttcccctaaactgtaggtacaaatgtctcttagaataggtgacttctgtagatagctaatctcatccagtgtatctgtgtgtatatgtgtgtgcttaaccaatttcacagagtatctgtattcttaagttctaggaacaccttcctctgtacttgtttatgccctatgtacagattctgaagtcaaccatgatatagaaataataaattcttacaacgggctcttttgttgtttattttgttaatccaatgactttacttgcttttttaatttcaagacacatttcaaaaactctgtgctttgttggttggaactagggagagttgggcatatctcgaaagcaacagtgatgaggaagaattgaaaagctgaatttttgccatgcttctggtatgttttctattccctgtccttttagacccctttatacacacactatcctaaattatgcctttaagttaagctacaaagatgaactactattagacttgaatatgcataacgactaggtatgagaccaccaagatcctaaaattattggttcaatcaaagtatttaatggtatctactgccaataggggaaggcaagacaagacttcacagtctattccatttcttctgaataaggcagcaactaaagaccacggagttgccaactatcactatatagatactttgcagagttggcccagtattagacaaacaatctaatatggaaagcttgtactttaaattgatgaggtcactctagaaattgttaccaaattttttcaaaaacagaacatagaagagaatgaaaaaatataattgtagtgaatgaataaaagtgtggtataaaaggggaaaaaggacaaagaatgaaagtaaatcagaggcatagcaaaaaggaggagtgagtgctttgatttgcttttataacagtaggactggtttgggtggcgctatccacacactttctgctggatcccaggagataagggtatgctctttggctatgagtttttcattatgtaaaacttaacaacatcgtaaacttcattattaccagacactcccaattcttacatctgcaaaattaaaatagtgcttttaatgggtggcaagaggatgtcctccaatctcaagcagaaatggtatagtaatctcaagggcttgttatgtgtacttactgtactcttcagttcttttcaggagaagcacatctctggctgccctcagtacactaagagaatcagacctcagaggtggctgcattttattgttgggagtaagtactttttaaattttgagaaatgttagagatttcccaaaacctcactagaagtatgaagccttgattagaaagataaagggatttggttccaggtcacacagcaaattaagtggcagaattaagttatgaacctagacttactcctttcaccatattatggcatttgggggcctccttattgctagagtagtaacacattacctcatatagctttttttttttttttttccccagatggagtcttgctctgtcgcccaggctggagtgtagtggctcgatctcagctcagtagctgggattacaggcacccaccaccatgcccggctttttttttttttttttttttttttttttgagacggagtctagctctgtcgcccaggctggagtgcagtggcgccatctcgcctcactacaagctccgcctcccgggttcacgccattctcctgcctcagcctcccgagtagctgagactacaggcgcccgccaccacgcccggctaatttttttttgtatttttagtagagacggggtttcaccatgttagccaggatggtcttgatctcctgacctcgtgatccgcccgcctcggcctcccaaagtgctgggattacaagcatgagccaccgcgcccgacctagtttttgtatttttagtagacagggtttcatcatgttgaccaggatagtctcaaactcctgacctcaggcaatccgcctgcctcggccttcccaattgctgggattacaggcgtgagccactgcacccggcctcatacagctctaatgccacgcatcaagttctgcatgtacaatctctcattttggcctctcagcaaccccccatgtgctagggacagtaaattctattgttctcactttgcagataagaagactgcaattcaggaagacatatagtagtctataagtgattcaggactggaactcagttatcctaattccctctcggaggctctttccaccatgccatctgctcgtctggtgctttccatccatgaactctggaaaacaagcttgagataccaaaattgaaaagacagctcatcaaaaatgaatagttataattctataagtacaaaaatgaaatactcaaatctcttgccccccctcctgctaggagcataaatgttaacctgagttctctagctctgtacaaatccacagcaattaagactgcactgtgagggaaaatacttttctaaaaaagaatcctgatcaagttgaaacaaaaattttaaaacatgaaatggaaggaacgaaactgtcgtcctcccttatttctgacccacacttgtcgattttcatgacggagtttctcaagccaggggcatatggccaaagaccatgtgaaatgccaggtgttccaaataacaaccgacggggtactggaaggaaagcactgcctccccggggaacaaatggcccaatttccagacttagttttctgcagtctcaaacccgatgttgcaccaagaaaccacctaatctttaggtggtttcgtttaccgaaaaatgaggtgactggttcagtgcgcatatgtgaatttaagggtaacactgtactcacgctttgcatatttaaattctcaaatattcacttaatatatgcatagaccattgtcacttcgtcagaagtcgcgtcctgcccagttgcgcgagactccaacgggccttcttgcgacgctcgggtctgggtccgggtccggacgtgcaacagaagccgtcagtggccccgctggctaaaaaagggcaagcatcggaggctcgagccagcggccgcggcgcttcccgacagttcctaattcggggcgctacgccggccccaccacctgttcccggcagccaatggggccgcggggggcggccggggcggagcgcggctacaaaaggcctcgggccccgcgcgcccgcccaccccgctccgggcgcgctctcgggaaggcttggaccgacgcggcccagaggccaggaacagtccgcgcgtggaccagccgggccagggcgatgctgcgggtgcggtgtctgcgcggcgggagccgcggcgccgaggcggtgcactacatcggatctcgggtgcgtgcgccaccggcctcgtctggcggccgcgtgactcactcgatcctgcgggcggcgtggagcactcgctcgctccctgcccggagccgccaccttccctcgctttccctagccggaattgcacgagagtgtcccttctggtatccctgggaagctcagcttcaagagccttcgcaggctccaggagctgggcggcgtcccccagtcagggggaacttgcgttgcggctccagcccttggggtcyacttgctgtctgcgcgtcygcggcctgctggcccacggcgcagggggcgccgcccccctctaccggaccttggtgcgctgcaccaagcttcccgctcggagcaaggggttgggacgacggaggctcctcttagtaaaagggtggcgttattggggttcagtagcctgagtgggcgtcgagttggggagatttctggaaaatgcgtgtggggtagatggatggggagaagaggcaagcaaagtgggaatcggggacggggagcgagcgaccagattcactccaagtataacatgggatcccacgtctggagaggagtcggggcgagtgcagcctgtaagcagagtttctgcgctccccgccctcggctgccctggcagcagaccctcccatgcttctagtactggaatcgctccgacattctggcttcctcccagcaactggttcctgaacagctgtcattctccgtctttcttctgcctccacccgagttctcctcctgcccacttcctaaggcttttaacagagcaggatagagatttggggggttgaggtttgctcaggggttgagggaccctccctgctctagattttataggccatgcatttttaaaaggcttttgaagtttttagatctccttcttatttgtttgaatttacgcctgagctaatcctgaccttggctagggtactgtggaccatctgtaaaatggagcagatggcagttgctcactctcagaattgaagtgccaaagaatgcgaagtgtatgtcaaagatgaaaaaaatttgatttgaagctggttattctgaaagataaggtcctttacaaatgttcccaacttttcatttgtaaaaaaaaataaataaaaagcctaatattggtaacctttgatacttaagggaaaaggaggttccgtccccagctgagactggcgggaagttttagagcagctgtctatggttttctgagaggaggactgacccatctgcaaaacagttgcttaaagcttgagtgcaggaattgcattctgagataaagatgggggkgtatggtagctggggacacggtcttctgaggagttttaaagagttacagcaattaatagataagaagacaatttgtagataaacaagagggttaaaaaaattatctgtaatcccactacccacctacacactgttaacgtcttggtttatgctgttctaaaggggtttaagtggcaatgttatgctggatttttaytccatctccacttcctcctctctgtaagtactgatagakcaatgcaatacaataatcttttctttgttcttggaagcttggacgaaccttgacaggatgggtgcagcgaactttccagagcacccaggcagctacggcttcctcccggaactcctgtgcagctgacgacaaagccactgagcctctgcccaaggactgccctgtctcttcttacaacgaatgggaccccttagaggaagtgatagtgggcagagcagaaaacgcctgtgttccaccgttcaccrtcgaggtgaaggtaaaggaaggctattcacatgtctgaaagtgcgctccctcctcacctgctgctgctaccctctgactgctttcccttcagcttactcccagacctctcaatccagtgattaagttatcttacttgacacctctgtggtatttgacactatttacaccaatgataattgcttccttcctgaagmkcttcctgaagctcttcccttggattctgagagagcttttctgggaataatagttctttcactgtcctcagatcttcttccgtcacagcctgtaatggcaaggttgaacagaatattactttcagcccccttctcttagccattctcacagctaccgctcccacctcctctctggtccggatctctgtattgaactccttccagatcaacgagttaaactccttacgggatattgccacaggacttcaaacttggcacatctggagttcagttgccagccacctgctcaagtggatccctcctcattcctgccttttaattattggcattcctatttaatcaagctaaaacacaaaagaatcatctttgatttctccttatgtcacgtgatgtaacaaggcttttgtcaaaaatgaatcttgcctcattcctctgctttgcctctccctaaaggttgggagctcatctgctgcctggactattgcagttaactcctaactggtcactcctactcactcttctcaccaaatcacctggcagctgcaatccaagtgattttttaaaactcagatgtgatcatgttactcatcctgcttcttttcctcctgtactttgctaggcgacccccactaccccaccaccccccgcattgtttaggataaagtcttcatggtattcaagatccttcacaatctgactcttgtctgcatttccaggattccccattccagttattgactcatctgttagtacagcagattagcaggtgttcatttctggtcaagtccctctatcctctaatattccaccctggttttcagcagactttataagacaaccatataaggcagctaagctagactactcactgtttcttcacaagccctgcatctttgcccctacctaagtctcttccatccatcttcctgtgccctttagtctgtagtttaaacctaccaccacctagcttcaatgacacctttcacaaagtcttccaggatttccctggcaacaagtaatatctctctttttaaaaactcctagtggtggccaggcgcggtggctcacacctgtaatcccaacactttgggaggctgaggcgggtggatcacgaggtcaggagatcgagaccatcctggctaacacggtgaaaccccgtctccactaaaaatacaaaaattagccaggcgtggtggcgggtgcctgtagtcccagctacttgggaggctgaggcaggagaatggcatgaacccaggaggcagaggttgccgtgagctgagatggcgccattacactccagcctgagcaacagagtgagactccatctcaaaaacaaacaaacaaacaaaaactcctagtggtttttatctgtaacgttcttatatccagggcctctatgggctggtgttcaggttctatactgcataaggattccayatctaagggaccactttccacattgtagacacagcctagactcctattaataatgggttacaaatgtatctttagtgtccttaaatttttcctgaatatttacacttttatttgtaaagtggattgaggaaagaagttctgtaacagcattgtcgtggtcttcagaaatattgcctaccatgtaccagggctctagaggtattaatataaaagatcttcctttctatttgaagagatttgatgttcacatagaaacgaagaccaagtatcttattccagtcgactgacaaggcagttgaagtgccaggaaagaggaatgaccaagggctggccagttaagaagtcctcttgaagaaaatgactcctgagttagacttggaagacagggaaatagaaaaagtaataacttctaattgttctgaaactatctttggttctgatatttggaatttgatgagaagattaatttatacaccatccacatgtttttaaaaggcatagtagtctttttaagtcttttcttgaaaagtcccatcccctaaccattttaattgggtgaaattaaaatttaaatccaagcaataatttatccttctacttgtctttaaaatgatagactttcatatcatgcgattttacagaatcagaattctcagaggtaattttgagttctttgtcacttgatttatgactttagactttgtcatttcatggacttgtggaaaaagtaccatgctgaagtcaggagtctgggattaattaggtatttgataaaaacttgatagctagtctcggttacttagctatttgaccttgtacaagattccacaaatttctgggccacagtaaaatgaagatattaagaggtttgctagtttgctatctacctaacaggattaaggattaatctaaagataaaaggttacatgttaagtattttaaaggacaamacaacaacttattatagttgtatggatccagtttgccaattacattccaaaggtactttgtcggtgtaatagttgtagatatcagtaacattagcagtattgatttcattcgtctggttctttttgtttgtttattcttctttctctttctctctttgattctagacaggaaataatggttatttctgtttcatgccatgtgctaagcctggttttgagggagaagaaagtaaatctaagacatgcatggatcctagcaagcaaggccatgcctcgtagtagagaagaatgacacatatattaatcagtttgggaacaataaaagaaaaaataatgtagtaaactgtccataggcaatcagagcagaagatgttggaagatataagtactagagaaattttaaggaaaggaatgtggaacataattgttgggaagcataattttttaaagctctgtgactttttgttctgcaaaatatagtaaatatctgctatcaaatatatatatatatagatatatatttttttaagatggaatctcgctgtctcgcccaggctggagtgcagtggcgtgakctcggctcgctgcaagctccgcctcctgggttcatgccattctcccacctcagcctcccaagtagctgggactacaggtgtcccccaccaggcctggctaatttgttttttttgtatttttagtagagacggggtttcaccgtgttagccaggatggtctcgatctcctgacctcgtgatccacacgccttggcctcccamagtgctgggattgcaggggtgagccaccgtgcccagcctcaaatatgttttttgttttgcttttgtcttttaaaaataaagcccttgataaaggaccttttataaaatacaagattaatcaagattagtgtaatataagcttacagctggataaatacatttctgttgtcatttcttagccttccaaagacagtatttaaaaattcacttggcaaacctttgtaaagggttttaggctttgaaagaatataaaggttcaaggaatgcagacatacctttgcaacagattattaaaagcatcatatgctaagcgtctaatatagtgttcatcatcttgcaaacaacttggtgaatgattgctggctcatttagcagggttataaaggaagtgtaaacaatttctagctatctcttgtaaaacgtattgtgccctgatcatttgtactttgcccaacctttgccagattataaactctacaagaaaaaatcacatttgttcaaataacctttttctcccaggaaggtttaatttatcaaggcaagcttcaccctgcacaaatagtcacggaggatactttggaatgagtctggcaagacagcataactctgcatctgctgtaacccagtgttaaattttcaaaggcttcttgtccctagtggattgtaggagatgtgcctggcatgagaaggaggaagtggtgaatggatgagtagtaccagcatgtatctgagaggaatataaagagtcattattatcctctttctggttgctgttgcagaaattcctaggagtagaaaacagtggagtgcttttattttgttttttgaaagggtagcttggtctttaaaaatgtttaatgatgataacatttttcattagtccagaaattcagcctgctgtttgcctatagaccttagtaaaagagctaattaatgattcagaccccaggcgtcagcaaacttcatctttctaccagataataagtaatttaggctttgcagaccatcggtctctgttgcaactactcaactctcagctgtgccattgtagtgcaaaagcagccatagacaatacgtaaacaaatgaatgtgcctgcgttcctgtaaaactttatttacaaaaacaagcagcaggccaaatttgcctatggacctttttttaccagcctctgtttaagactttcactggcatcattcagtttttctaaagacctgtttcttggcttattccttattcaccaagctaggttccagcgtaactgwtgtgaacctggatattgaactaaccagagatgggtccactttcatatatttgatatttgtcagactgagataaaaatggaagtcgagacacaaaatctagaaaagatattgtttttgacattaaagagctaaacatctagacatttgatcagtcttgatgagtaaaagccattgggacaatttgaacttgttaagcaattccagtcttaaaagtttttgcacatctagttagaagtgttcaaaccagtataacatggccaagtcccatgatgtattagggacactctttgagtaacagtcagagaacttgagttctagtcctgcttgtccagatagctagcaagcatgtgacctgccagagcctctttccttacatgtgaaataagcatatgagaacttgccctgtttctttgataggattgctgggaaaccaaatgagaatatccagctaaagtagacacactgtgacacacttgagcccattaccaagttttacacctttctagtacttattgctatctgaaattatctgatttatggtggagactgtcatatctgacatgatcaggactagtagtttgtcagttcatcaattatataaataaacatttttaaaatacctgctttaaccagttttaaacaaaaatttaaattaaaacacttaaaacatttttaaacttaaaatatatcaatgtacattgctttgctaatcttttgatgaaggttcaaggctttttcttagagtctggattctctgattggcgttctgcttcatttagcttgaaaaatgggaagatgcatcacgtacatttctcaatgtatttatgattgagaaattgactaagaacttagacatttggaaaacaatctgaatgcagaatctgtctagrtttttacatttttgaaaaccaatattttggccgggcatggtggctcacacctataatcccagccctttggggggccgacgcgggtggatcacgaggtcaggagatygagaccagcctggccaacatggtgaaaccctgtctctactaaaaatacaaaaaattagccgggcgtggtggcatgcgcctgtaatcccagttactcagggagttgaggcaggagaatcatttgaacctggtgggaggcggaggttgcagtgagctgagatggtgccattgcactcctgtctgggcaacagagtgagactccatctcaaaaacaaaaacaaacaaacaacaatatttaacagctgttgcacctaccctattcaacaataatttttagcaaactgattgagccattttaaagcattcaaatgttttctctttagttgtcttctaaaatacacatagccctggaaactttctaaattttttttcagttattaaaaatttgtgaatttgcttatcatatcacttccttgtatgacaaaaagacttgaagagatgtgagagctgaatggattagaaaaaggagaggtgtggttggtatgaggcatattgacagggaattaccaaaggcagatttgcactgtcacacaattttggcaagtgttaattctgttgaatgggaaaatcaataatgtttttttttttctttttctttttctttttctttttttttttttgagacagagtctcgctttgtcacccaggctggagtgcagtggcacgatctcagctcactgcaacctctgcctcctgggttcaagcaattctcctgccttggcctctgaagtagctgtgactacaggcacgtgccaccatgcctggctaatttttgaatttttagtagaaatggggtttccccatgttggccaggctggtcttgaactcctgacatcaagctatctgcccgcctcagcctcccaaagtgctggggttacaggctgagcaaccatgcctggccaataatggggttttaagagaaataaagcatatttgaaagtatgctcctgatcttaacggggcaaaatatctttttttttcccttcacaaaatatcttgaggtgctattttctagacagaattctgagatgcatggatagcccatggttttggcttagtataagtgcttttattctcttatgctagtttgtgtgttctcttgtttcattttattgaggctctctaatagaagtgctatgtcctgttttgtctgcaaagcatggcaaaaaaactggccaagaggattccaagtctgtctgaaggtaaacatgctgttagtggttggccatgagatctcaggcaggaggagcaaaaggcctcaaaatatcaagatgttttagagttcttcattcaacagatactgagtgtctgcccagagggcttatgtgctcaatgctagggatcagcactgaacatggagtggttggagtctcaattccaataccttatacaaagagctgtttactgcctatgaacctatcatgagctgtatttttctccygtaagtattgtgtttatttgcttctacttccaggccaacacatatgaaaagtactggccattttaccagaagcawggagggcattattttcccaaagatcatttgaaaaaggctgttgctgaaattgaagaaatgtgcaatattttaaaaacggaaggagtgacagtaaggaggcctgaccccattgactggtcattgaagtataaaactcctgattttgagtctacgggtaagtgatgtcagataactaaactgccagtgtctgaattttcaatttctttcttaatgtgtaaggggaaagctccaaaaaatttcttggagagtcctttgctttgctagttcttgaaaactttaaagatttatttaggaatggtttggtccatgttgatatgattaagatgtatacattctaaactccattccatctcgtggaatctccttgaaatgacaagttttcctaaactttatagccatttccttacataataacagtggattcgtttaattttcctcaagaacagaaattaaaaggggaatagaaacatttccattttatttttaactgacattgctgcatgactgttcttgtgccttaggtcactgttctaatttctagttttagattgatccttggctcaatttttatcttgtgataccgatagtcctttaagagctgtgtttctgtatagcaagaaaggagcttacaaatggtgaaagcttggtggttcaagatctctttgtacaaggactttattccttcacttttttttcttttcttttttttctgggcttcccccccaccacacaattcatgttaacaatctagtatgtgttattcgaattttttgctattttcatatatatatacacacatgtatttctagcaatttttttaaccaaaaaaagaggtaatattatatagacattttttgtttgtttgtttgagacagagtctcactctgtcgcccaggctggagtgtggtggcacaatctcsgctcactgcagcctttgcctcttggttcaagtgattctcctgcctcagtctcccgagtagctaggattacaggcacgtgccaccatgcctggctaattgttttcgtattcttttagtagagatggggcttgaccatgttggccaggctgctcttgaagaggatcaagtgatccgcccgtcttggcctcccaaagtggtgggattacaggcatgagccactgtgcctggccctatatagaccttttttgtcttggaaattaacactactgaagttgtcatggaattttttggtctgacaggtttatacagtgcaatgcctcgagacatcctgatagttgtgggcaatgagattatcgaggctcccatggcatggcgttcacgcttctttgagtaccgagcgtacaggtcaattatcaaagactacttccaccgtggcgccaagtggacaacagctcctaagcccacaatggctgatgagctttataaccaggtgagtccctaattataggctagcttattactaacttttctaaatgatccacaaagagtaagatagagattctctgataccttgtatatattatgcattttagaaaccraaaacatcatcttatttttaaaaagtgattattttatgatgaatatgataagagtaaatgatcctatgataataataataatggctaacactttttggtgcttaccttgttctgggtcctgggttaaaccctttatttacatcctcaatcctgtttgtttttcacaacaaccctaatcatactgtagtatcattccattagatggggaaaaacttgcctacaggtgtaccactgttcattagtggaaccagaaaagtcactagactgaagttcactttcttcttctagaaaaagaacctgatctacagttcaaattcacagtaaaatgaaatgtatgtcccttattaaatcagttaccatttgatcttttatagaaaaaaatttwaaaatcaaaatagcttctgggtttaaagacagaaataaataatgaattagttttgccactcccaatcaaatttggcaggggaaacatggcatctcgttttatggtatgagttaagctcgggaccaaattccttttctaaaagaacagaatgacttcatcctgtttactttccgtacggttcatggaatattctcagaatcagttactgcctctgtatcactttttttttttttttgagatggagtcttgctctgtcacccagactggagtgcagtggcgtgatctcggctcactgcagcctctgcctcccgggttccagcaattctcctgcctcagcctcctgggtagctgggattacaggtgcatgccaccatgcctgacgaatttttgtatttttagtagaaacggggtttcaccatgttggccaggctggtctcgaactcctgacctcaggtgatccacctgccttggcctcccaaagtgctgggattacaggcatgagccatctcacctggtgtgtaccatttttttctaagtacatagtgccccttcatcctcaggggatatgttccagactctcagtggatgctgatactgaactctatatattttgttttttcctgtacatatatacatacctatgataaagtttaatttacaaattaggcacagtaagagmctaacaacaataatgaataataaaatggaacaattatataaatatactttactaaaagttaggtgaatgtggtctctctgtttctctcaaaatatcttaatgttttgggacgacagttgactgaaggtaactgaaaccatggaaagtgaaatcatgggtaaaggaggactgttgtatcaggaaattactataatgctagtttcttgttttattgttgttttggtttatttatcatggacccgcttctttcccaggcatgttttagtctagaactgagtagtaatattttgggaaatgatgttaaactaattttcttagtactgtatgccttatgaataattttctcatgatccagtgcattgtgtgtgttcattcttgttccaattaggattatcccatccactctgtagaagacagacacaaattggctgctcagggaaaatttgtgacaactgagtttgagccatgctttgatgctgctgacttcattcgagctggaagagatatttttgcacagagaagccaggtgaacgcaggctgcctctgaaatttcacactatattattgtattctttacttccaaattaaaatattttcatcctaaatttttttcaccttgaatatttttagttttctagacatagaaccaaatatttatcgatcgtatgtctttcttttgttttcaggttacaaactacctaggcattgaatggatgcgtaggcatcttgctccagactacagagtrcatatcatctcytttaaagaycccaatcccatgcatattgatgctaccttcaacrtcattggacctggtattgtgctttccaaccctgaccgaccatgtcaccaggtaagagatttcttgggactctggaaaagcaacagaatctagtaactaaaataattgccacttttattttaagcacttccatggttcctaatggttctaaatgacagattcagcagtactcaacattattatgatcaaacattggattccttatggcttattacaagatgtccaccatgcagaaatatacatagttgacacaataattagtatgggatcatcagactttggccacttgctgttgtcagagcctcaagtttgtgcatatgtgtgtatttttatcaaacgatggtgttataacttgcaacagtggttccacagcagcgaattttggacaagatcatccttgcatggccagggcaatgccactgggcagtggttgtattccctctacagtggggtagcctccctttggccaaccctgctctgtagggaaaagygaagccactgcactgcagctggtctatccccttcacctgcagcctcctactttctgtccatagcctcctacttccagttaggtgatgagtgattttctgttacttgcaaggctgcagtacaacttttaaaaaccactgttatactgtgtcactgttcatttctgttttttatttttaaacccgatgaccatgactacttattcatttcattttattatcatttattcgtatagtaagtgggtatgtgaacacagggacggctaagttgtaaaaggtcactaaggacaatatggttctttgagaatgcatagctaacaactgtctttataccatggtcctagatacaaaatgatgggcaagaagtagaaggactgtgggtttgatgtagtcacatttttgttttcttgtaactaaataggaaatttttcaatttttaaaatgagaatttcttaaggacagtatctttggttttttaagtctctgaaacctgagaaaagttaagactatctttaaaagctgtaacatttctgttactttttaactttaatctggggattttatgtacatttttaattaggattcagacaaaatcacccaaatgtttagaaattttaatttctttcttttggaagctgagaagacagcttctcaaagagaattattactgataagggctattagagactaataataataatagtatatgtagatttaacggttttgggggttttttttggtcttacagattgatcttttcaagaaagcaggatggactatcattactcctccaacaccaatcatcccagacggtatgtttactttcatacactgttagactaaaataattactttagtgaccaaggatctttctcctatagagagcagcccaaatgttagcagcttagagaatgtgtttcctcagtaaggtgtgaagtggtgcttgggactgtgagcatcagaacaaggctgggacttgtgtttgcaactttttcatccatagaaaatgaagtaaggagaagacagaataaaacaacatcacgtaaagcaagatatgactktttttttttttttgagacagtgtcttgctttgtcacccaggcttgagtgcagttgtgcagttgtgcagtcacagctcactgcagcctcaagactcctgggctcaagtgatctttccactccagcttcctaagtagctgggactacaaatgcaggccactatgcccagcaagttatttttttttatttgtagagatgatgtcttgctgtgttccccagtgaggcaccatctctgggcaatagtctcaaactcctaggctcaaggaatcctcctgcctcagcctcccaaagtgctaggattataccatgcccagccaagatatgacttttaaaagaaaacagggtgaaattcaaatgtataatgagtacagattgattcataccatttatagataaattgttttaagattaaaataaatgttcacatggaaagtgaactactgaaagaactgagctgtcactttaatattcttcacttgtaaatccttgctttaaacaaaaatgatagcggacatggtttaacagttgttgctgtttttagatcatccactctggatgtcatccaaatggctttccatgaatgtcttaatgctagatgaaaaacgtgttatggtggatgccaatgaagttccaattcaaaagatgtttgaaaagctgggtatgtacaacaaatgaaacatgttgtcatacatgaaaacgttaaatgagaagaactaaagaaatgacatgctaggtttgataaatggtttgtctaattcaattttgattccttttagaggcaccaagttattatttcacagaaagtcagtatttttattttcaacacacgtagccccaacaagttggagatgcrtcctgagctcctgagacatccccttaacaataagtttataaatcttatatgacttagccaacgttttggtgcccatgtgcagaaaaccacccctttgcaggtgagcagatagcttgttcagcccttcttcaaataagaaatcattgtgggtcctttaaaagtgtcctgtcatcacatatttcaaaggactcaaaagggtacggatgcagaagtgacttttatgtgtgataagcatagttaacaaagtagcgaaatgcaagaaagtgtgtcagtaaatcattcagttttgaactgaagagcaggaccaggttttacttaagtagtttacttatcctgatattcaaaatttagaccaatgattctagtattattgagaaaaatgttgaagggaaaggattttcatatgagctattataaaggggtgtgtgtgtgtattttgagacagagctgtgtcgcccaggctgtagtgtagtggcgtgacctcggctcactgcaacctacactttctgggttcaagcgattctcctgccgcagcctcctgagtagctgggattacaagcatacaccaccatgcctggctaattttgtatttttagtagagaggggcttggccaggctggtctcgaactcctgacctcaagtgatccatccacctatgcctcccatagcaytgggattatgggtgtgagctaccatgcgcgactaggaaagtctttctgaatggctcatgccaccttcctctccctggctataccaatggaccctttagtgactttgtagcctatcctcctctcaaaataattagctccttgaggaagaataatagattttctttttaaaaccccactatatctaacacaacagattcttcctaaataccattggttaaataggccatgcacatcatagccttgtcattacagatggtaccagattaaactgattgttggatttgctttggtacctgtataaccatacaaacccagatattaaaacaccagctctgttccattgtttccttatggtggcctggtgaagttaatctgtatcagataaactctccttatatgtgaatatgtaaagtcagctttttaggtcagctaaattttgctttgcctactaaattaacatggtaaaattagaaacagtctgacaaagtagttaatgtataattctaaaaggccttgagattttagtacttgaccattttgaacatttggtaggtacatctgctcagtctattgacttgtgaatagtcaatagaacaaaacttcagagttctctgttgactttttggagaagattttatattagcagatgaaatatagttggtgaaaataaaattggaagagaaaatactattctgggttgggtatccttaaggattagaaccacaggactcctccaagtctgtaggcctactttctctatgagaatcgtcatgttagtccatctaactgacctcatctctctttcaatgcaggtatcactaccattaaagttaacattcgtaatgccaattccctgggaggaggcttccattgctggacctgcgatgtccggcgccgaggcaccytacagtcctacttggactgaacaggcctgatggagcttgtggctggcctcagatacacctaagaagcttaggggcaaggttcattctcctgctttaaaaagtgcatgaactgtagtgctttaaacaatcatctccttaacaggggtcgtaagcctggtttgcttctattacttttctttgacataaagaaaataacttctgctaggtattactctctactcctaaagttatttactatttggcttcaagtataaaattttggtgaatgtgtaccaagaaaaaattagtcacctgagtaacttggccactaataattaaccatctacctctgtttttaattttctttccaaaaggcagcttgaaatgttggtcctaatcttaattttttttcctcttctatagacttgagaatgtttttctctaaatgagagaaagacttagaatgtacacagatccaaaatagaatcagattatctctttttttctaaaggagagaaagacttagaacatacacagatcctaagtagaaccaggtaattgtctctttttctaataaggaatttgggtaatttttaattttttkttttttaaaaaataacctagactatgcaaaacatcaragtgaattttccatgaatgtttttaatattctcatctcaacattgtgatatatgctactaaaaaccttttcatatacatcttacctcatttcaagtgaattattttaatcttttyctctctttccmaaaatttacaggaatgtttagtgtaattggatttcgctatcagttcccatccttaagttttgatattcaatatctgatagatacactgcatctttggtcatctaagatttgtttacaaatgtrcaaattatttagagcatagactttataagcattaaaaaaaactaatggaggtaaaacctaaatgcgatgtgaaataattttagtgttgatacygtatgtgtatttttattctaataaacttttgtgttccagattgaatttggcattggtctagtcattttagtataagtaaattataggaatgtggctcttggtacagaattctaattctctaaaataatcaacatattcatcacaaaagtaaacctaatacattcagaaatgtttagcaaagtcagatttttgtttgttaattaattcactcattcaaaaatatctgaatatcttctgagtataaggagtaatcctaggccccggaagggaagagtctctgttcttaagttgctgcatgtttttttcttgaaaaatctgcatagaatgtgtactttgaaatgaatcacaggtttcaactgtacccttactaacgccttgaactcctttgcatcctggtgttccttttacatccattacagaaacacctgttagtcctacacgtggactgaattctgcttgagaaatctatccagttgtttggattggtgcacattagggtatatatttgcaggcctaaatactacccaacaattctgctgcacagttctttgcgtcctcctcagtagctattccaaaccttcactacattttcttagctgatcatattgtttcatttttcacaaaggagagagagaccatcaggcattagttccttcagtttacratcccctatagatttatacacatttgcatattctggttaagtttctttctcctttcctttacagtaagtagttctcccttatcctcagggaatatgttccaagacccccggtgaatgcctgaaactatgggtagtaccaaaccctatatatactatgccttttcttatacatgcagacctatgataaagtttaatgaagttaatctggtgcaacacatggctgtcagtcgggaacatgttttctcttcatgtcttgcaaacaaaaatgtaatgccttttccaccttaactaagcacttatcaatgctctgtgaccataacttttgccatgtgtagtgcgacagcaaaactagcatgcatttctttttcctttatcacaacttcacagataggagattcgttcttaccatggatctcagcaacctcaacatacaactttttcttttcttgttgagaacttccacctttcccttaaagaaagccacttaggctttactttggtatgtccgaattgccagcattaagacttgcacttgagtcattattaagtaaaataaggttacttgaatacaaggactgtggtctgataacgaggtggctactaaatgactgaagggcgggtggtatatacagtgtgatacgctggaagggggaggattcatgtcccaggtggagggagtggagtgggccagtgcaagatttcatcacgcagctcagaacagcgtgcaatttaaaacttacgaattatttatttctgcatttttctatttaatatttttggaccatggttgaccactggtaactgaaactgctgaaagtgaaactttggatgaagggactactgtgctacctaagcttccagagaaaaaaatcaggccttcatctcattgcatgcatttgcttctcaaccatgtataaagggtcttctctcgctgctacagaaaaagaggtgaaacttctcaccaactctaatccacacaaccgtcctttgatcctaatctttctcttttttcagaatttgctacatcaattatcatctttcttgtaactccagcaccaccaccgctctgtgtgtgtgggagggagctttccccctcagaaaatagtcatgctcaaaacaatccacagtgcggtctacatccctgatccgtgatcaaggccttatcatgacaaaatgatcactcctagtttgagagctaccacttgctttgcaatatcatataatcaaatagataatcaaaatgtacatacagattccacacatttttaataaccagttggtttggacttatacagatagctcaaccaaccaaaaattctatcataagctttctcatatatttgaactaactttacaacaattcatttgcctacctgatctgtagcagtgtgtagtatgtatctgttgagtgattacaaactataattattgttgctgaagtcaaaatatgcttcaggccaatcctgctccatagggataatatgctgaagggaatttagttcaatatcccaatatatttgattgttaatatcaatattataagttttattagcttctaaaatattaattttacctcatgtggtctacccgccccagcctcccaaagtgctgggatttacaggcatgagcacgtggttttattccttccaattttctattaacccattactttgaggatgaaaagtaatctgataagcctactaaatgtgatgttttggcccctaatcctgtggaagtcttatagttaattataaatggtatcataaaggaggagaccttcatgggattttataggaagttggagggacccacaactgctctcttcaaactgcccagggtgtacaaatcccaaggcagataccaaggctggaagtagtgtgaggccagtgaagtactcaccatgtccacaaaatttagggggaccaaaaaaacctcggtaatccagataataataatgcagtattttttaagcatcaaaattaatgaaaaaatccatgatgaacaaaatatcaaaatgttaaatgaagacaagatcastattactgatgtttcttttgcctcaggttccaatgtggcttgacacggcactgactgtacccaggaactagaggtgaagtggaagtaaaccggcccttgtggtccgctatccagctgccattcaaatttttcaggtagcccagaaaacctctagcctaggtttggatgatacctgattgcacttgacctccaagatgtccacttggccctcttccaagtgtactttactttcttttcattcctgctctaaagctttttaataaactttcattcctgctcaaaaaagaaaaaaagaaaaaaaaaaagacgatacctgaaaaaatgtaacattcatctaggcttcaaattatttctaactataaaatctcaaatacagagtcctccacacagtcaaatacagacagatgcaggaggagaaaatatccctctagcaaaacaacattcaaaagacacatccacagggactccagataccagatcgtcagacacagactataaagcatcagcctacagtgaaaccccatacctattagtatagtagtcactccatttctcgcctgtacccccaagtcctaggcaaccaataacctactttctgtccctgtcattttgtctattctggacatttcatgtaaatggaatcattcrgtaagtggtcttttgtgatgaacttctatcgcttagcaaaatattttcaagtttccttcgctctgtagctcatatcagtacctcctgtattcttatggccaaatgaaatcccactgtatagatatacacattttatttatctattcatcagttgctgaatatttaggttatttccactttggggctattatgataaggctgctgtgaacacttacatacaagtttctgcgkaggcatatgttttcacttctcttggggtatatacctaggagtggaatttctgggttatgtggtaactctgtatgccctacagaaaaaaagttatattaaaaaagtaataagaataaatataagcccactattatgccaacttagtgtatgatttgtatgattcgtttatataattatttgtataattttagtatgatttttaaaaggcaatgaaaatgatcgaaaggatgaagtggctcccatgtgaagacagactaaaaagattacaattcagtctagcaggaggaaagttgaggaagttacaaaatccaaattattaaaattgcagtatagtatcttgatcgatcagttaacttctgatttaattaacaactttcaaagcacctcagtaagggaatacaaccttgattaaagaaaaaatagttcgagaactaaataacaaagctacatgggaagcaataaacttgtttttcacaaagcaaataataagtatatatgaatatttattaattaactcttgagaacctactgtatgctaggcatcatgctggtgcctttaaaacattctttatctcatttgactgttctaagaaacatcaagataggtattattttccttattataaaagaaagaagaaatggagattaagtgctcatgatcaagtcgcacctattttaaccgaaagtcttctcttaaattacatcatttctttcctcctttttagagccatatttcgcaaaaagatggcttatactttccatatttgttctctcaccttcaattcactacttgatccacttatatctgcagtttttctcacattgtccaactgcttcctctgagttcaacaaataactgatagttgcagtgactgtcttttttttttttttgaagcagagtctcattcttacagcccaggctggagtgcagtgtcttgatcccggctcactgccatctcctccccctgggttcaagcttattctgctgcctcagcctcctgagtagctgggattacaggcacatgccatcatgcccggctaattttttgcatttttagtggagttggggtttcaccatgttggccaggctggtctcaaactcctgacctcaggtgatccgcccgcctcagcctccctaagtgctgggattacaggcgtgagccaccatgcctggcccagtggctgttttctaggctttatcttgaaacaatcttccattcaccaaattatggcctgcagtcaaatctggactgccatctgtttttaacaggtccttcaagctaaaaatgttttttttttttttacatattctaatagttgaaacaaatgaaaagaaaaataatatttcacgatgcatgaaaatgacatgaatttcaaatttcagtgtccataaataatgtttttttggaacacagccacatgtattcatttgcatattgtccatgtctacttttgtgctccaatggcagattgagtagttgtgatagagacactgtagggtgctatcactactttgcaatgtggcttggcatgccacaaatcacagtgacacagttatcacttgacagggtttcaagtgtctcatgtgtcactgtacctatgatattttatttttttattaccagtctatacccatcatgtcaaaacagaaaagaaaagtaaatgttactgtcatacttctaaggcacagtggagtgtggattattctgattaaattaaacggcaaaacattgtacaatgacattatacctgcgctgaaagaatacatgttgacaataccagaagtactcatcacaagatttccaacttacaggaaggcaacagtcagaaaaaaatagaaaatttaaaatgaaatatctcattacagcaaaatgtcttcacaaaaataaaaaatgaaaaaaaaagtcttcaacctttttgtaggtaagaatcccaatggctcatttgttagctaatcaaggaaagccatttactaatggctagttaattaaatcatgtttggttgctgaagaaatgtgtccagaagaaacaaactgcttaaaattagtattagcctttggcatgcagggttgctctctgagttgaggacaatgggagcgacaataatcaattaacacaaatgatgtggagtggttttccttcgatcttggtgaatcaacatgggttactgattctgctcagttgtggattgttcaaggaatcaatactgagtctttagtgggaactgaggaattgtgtgaatatcctgacttgccccaccacccccacagcagtcaatggttcagcaatggtaaggttttattgcaatcttttgagcttggggctaggattgaagtttttttcaaatagaagagctgcccgcaatcactgttaattactttagaattagcttttgctacagacttgatgtttcttaataaattcaatctaaaattatgaggcaaaacagtgcttatattcaaaa

SEQ ID NO: 95804 - DNA, 115455 bp, Homo sapiens
tctagtaaggttgggaaaatcaaattttacatatatactttaatcagaagatttatataaggaaagaaaaaaatgtcatttacaatagcgacaaaaagaaaatatctaggaatatactcaacaagatatatacacaagaaaactttaaaacaacaccaaatgatataaatgacctgaacaaatgacatgctatctcagtttttataataaagaatagttaatatcacagatttaaacccttcctgaatttatatatttaattcaatctcatgagaaaaaacaaacaaaagaaccccagacatgtggtggtgtgcgcctgcggtcccagctattccggaggctgaggtgggaggattacctgagcctaggaggtggaggttacagtgagctgagatcacactactgcactccagcctggatgagagtcagacccagtctcaaaaaaaaaaaaaaaccccaaccaacccagacaaagcaaatctaaagctctaatggaaaaagaattattaatagccaggaaaactgaaaaaggggaagcaggatgggggaaatcccacaagctcttcccccaaactaagcattacttcacgtcgtgtacatctgactataatgacactgacagaaatggcaaataatcataatagcaatgaaattaaaaggagaccaaataactatatgtatatactatgctcacttttaaagcttttataagtcttgatattccaatttaatcaactacacagcattaagatcaaagttaacttaaaaatctttcacaatattgggcttagtggttcagaaattaatttccttagaatggtgattaaagtaaaaaattccaaaaggtgccttaatactcaagtttattccaatatgtaatgaatgaatctgaaaccaagattatccatttagaaagagatcatgttgtctttttcttactgtgataatcaatcttgattttattttattttttttaatagactgcttccctttgtagacatctcaagtctttttcacacccatcaatatcattaggcttggatggggataagagatcttgctcctcgacgctgtcctagactattatctctccctcctccctaaaaagttttgcatctcaactatctaactgctttagttagtagtgaccaccagatcactccctttcattctttgaagatttcagcccctgttaactttcacacactcttttacaactcctgacatagttctcgatttcaatatgctcacagatgaccctcctgtcctctcatttaacccctctcctcaaacagcttgtcttctaccttaccacagccattcattttttctggttacatcctagaccttatcattaccagtaattgcaatccttctataacctcaacttcaaatactccattctccaaccaccattcttatctttttagttcaccccctactacacaacaatccaacaactctgattcctccattcttcaaacctttcattatctcttgattctatcatatttccactgtccctcagctcttggtgtttttattttccttctcacccagctaaaataccctaaatcacaatcttggttaaattcgactcttcacctgcacacatagagctgaaaatggtaggtgaaaaaaaaacacaaaacctgctgactagtctccctttaaattcatcatctcaaatggacccttatgccaaccagcaatgacactgtatgtatttccctggctaagaccatttgtacactagaagacattccataagaatgtcccaacaattctcccttctgtctttaacttcatcaattattctctccactggctcattcttatcagcattcaggcattctattatctgaccccatcgtctcccattgttttatttttccttcttcaagactacttcaaagagttgcttatactcaatgtctcaaatttcttgctacatgctctctggaatccattctaggctctagagcccatcatttaatcaaaacttttcgagccatcattgttcttcacatggctaaaacaaatggttatcagaccttaattcacctgaccaatcaattgcatctgacacaaataaacacttttcctactagataaaaaccctttcttaacttggttttaggatacaacactaatctggtttttctactgttttcctggtcactcatcttcatctcccaggcttctaaatgcagagtgctctaagacttggtcatttttttccacatatactcattccccaagttgttctattctggtctcacaggtttaaattccatttatatactgcaaatttccaaatttctatctttagtcagcatacctctcttgaacccttcctgcccacctaacatctctggaaggcttaagaggaatctcccaactaagctcctgatatcctcaccaaaatttcagcagtcttgcccattttgttagatggcaactccagtcttccatttgctcaggcccaaatccttgaagtcattttcttttccacctaataacagcaaatcccactgaagctataaaacatccagaatctgatctcatgagtttggtgtaagctatcactatcatctcttaccagcatcactcaaatagcttcctaacagatctctttgcttttaccctcacctctttctactctaaccctcaacagttcattctcaacacaggaaccataggaagccttttaaagagtaagctagatcatgtcactcctctatttaaaatcctgcaatggcttcattctcaatctgagtaaatgccaaagtcctgaaaataatcaatgaggcattgatcagcctctgttaactttctgatctcatctccaactactctagctcttgtatggctccagctacattggctctttgttgttcctagcacatgccaggcatgttcttgcttcaagatcttggcactttctgcctgtaatgctattccccctagagagttacatggcttactcctttcaatctttactatttctcagtgagccttttgtaactacactaccacaatatacactaccgaaaaatacacccaactgcctcttcatccttctttcttgctttatttttctccctagctcaactatatgacatactatatattccatatatatattttttttatatatatctggtgtatatgcacacatctatcgtgggtgtgtgtatgtatattgtctctctacaaacacatacacatttttcccctccccaagtagaatgtactccatccatcatgagggtaggaatttttgttcattccagtggctgaacctgtgcctagcacacaggagatcaagcatttctgctaaatgaatgagaatatgaatttaaatatagtaaataattttcctgtaggttataacaactttagaaatcttgcaagttaccaatattttatagtgacagttgtccactaaactacatactgaaaaaaaaaatcattcaaaaggagactaaatgttcatgtaataagtacagggttattccaataaacaggttgactctattcctctaaaaactggtccaggtcttgtaaagattagaagaggaagaaattagatggcttgaattgtcacaaaaaagctattattcgggaaatgacaacttcctaggaaatgaagattcttcagcaagctattaaaactggacaccatgcattctaatttaaatactgaatgcctttctacaattactcagtgaaagagcataatgaattcccctccaggggataaatcaccacgaaattgcttaaactttatttctgttaaactactaaaatatttaatttttcaaactattttaaaaaccaaaagactgtaaaagacaattttttaaaaagacacagggatcttgctatggtgtcctggctgagggcagtgatcacaggacactacagactgggactcctgggctcaagggatcctcttgctttagcctcccgaatagctgggactataggtgcatgtcactaccctggcttgatttttacagtagaataaaaacataccagaagtggttaataaactgatttatataaaaatagtgataaattgtaatgcatttaagaaaaatgaacatggattctttgtagaactgttaattaactgtgtgaacacttttaattcaatttctgtatcagtttcaataattggggcaaggggattccctacttgtttttcaatagaaaacctaggcacagtaaagcttggagaggaagattatagttaacaggctcctgcaaacaaagaaggatttgcggatatttcagattcgaagacaaaagtgttcaaaattgacactagaacaatgaccctcagtgtcattcttacagctgagaggaaaaaaggaagtgaggaatacttagaagcatttacagtctaaagccaaaataattgtaacgctgtgtaaaagcatttcaaagactgctgttaactaatgatgtttagtatcacatgaaatagtctaacccatgcttattgtagtttattagtcttacaaaacacgtagaagttaggagtggtacacggctctgatttcaaagagttttaagtttaagacatttagaagaactctaacttaatattgttttctccccctctctcccaattgttagatgctcttccaacaaacaaacaaacaaaaaaactcccttttttaaaataggggagaactaagttctcaaaaagctcacaaaccccaaacagcttttggttcaaatacaggttctgagcctttggttacactaacaaagtattagtgtcaggtggctggtatacaatgaatattctcagaatatgggacaaactactgcaacataaatgccactatcataaatgactagttagcagtcctgttgggaaagagtaaaaaaataaaacatgttatttggacagttcttcctcttatagatttttaccatcaaaaaagagaaaataagcttatgtagttaatgggaggtgggaattcggctttggctgtcattcattcacaatacgtattaaatgcctacaatgtacgaagccctgaagagataataaaggtattctgagtaaagacatcaaccttgatctcaatgagtattagatacaataaaaggaaaaacgggtaaggggagaaagtgcctagtgctacaaaagcgtaccaaaaaaactataggatttctactgggaaactacttgggacaaccccagtcatagctgcgtacacgctgttctgagaaaagcagagtgacatgtgggcatcatttctataaagcctgggagtggacagcgagtattcgacttcatggcggcaagatgccatgactcattccactcaacaaaacgtggaagccacgacttcccacaaccaaatatgcacatgtgacaatatatccattttgggtgctggaggagtgtgggggtactagagagtgctgtaagttctaaaggtgccttcctctccagcaggtttagcttcagggcgggagtggggtaaagggggagtggagactacggcatctaggtccattctcgaagtccctcgcgggtgtggcaggcaacagcggcgacagccgggtcggctggaggggaagaccgaggcgcccccaagctctcggcgtcgcccgcgctccatcagttccagctgtcccgcaggaaccgctgccacgcgctgctgctgtctccgccacctaaggcctaaccaaaggctctcggagaacgtccctacattctttccaacctggcagatggcagctaacggccaaacctctccgggstattcacgtacctggagaaaacgatccccttgcggaggggagcacagaggccaaatcagctcttgccttcacttttcagccacacagcgtgttctcacggccaccggccaaaatggcggtgcccagccgccgcacgcgcaagccataggacgtagtgcgcgcgcgcgacatagagcgtgagrcggaaccctggaggtaggtagggagatatgacgtcattgagctgcgacccttgttcaacgccgttggcgaagccagctgctggaggtgccgagaatctgagtttcggcaagcagccaggtctggaaactgtgagtgtgtgggcttttctccgacgtcgagcgtggtcctagcgtaaacagatgcattcgcctctccggtttcaatctttttttacgtttgcgctttcctcaaggccggtgggtcaggagtggagccttagtcattctaacgctggaggtgtcagtaggaccaacagagtctggtgccgacacggcttactgttgcgcgctcttctaggcctcaacttcctctcaactgtgtggtcagttcagggccgggaatccaatcttttccgagctccatattttatccacttggtggcgtccagtcccaagtccggcagttgaattctgccctaaagatgggctttatttctatctttttttaggtaacaggacattcagttagtaatgatggttgcaggttgaatagtctcgccctagatctcacctaacttgcaggcaagtgacaactagttcatractgaacctattcatctgtttattcattcagtaaattacttattgagcgtttaagcctcargccttgccaaagtttacagtccgttgtgtctgccgttatttagtaagtatcaagtgcttgtgtgccgattaaagaacaacttcggatacaatgggaggtgtcaaggaaacggtatgcagaactattgcacctattttgaatagcatatataacaatgttcagtagcagtaactgcgctaccaaagcagttttacatattgttcacgatccagtattgaagtgttttttcacatatgaatagacttagtaaaattaacaaaagatgtgaaagatgaggtcaacctttttagaatgggccagttattcacttcaaaatcttgaagccattttcctgaccttatcttctayggtaagagcatatgtaagtgaacttttaacatttttttcttatttttgtgytttttgggacagtgtcttgctctgttacgcaggctggagtgcagtagcacgatctcggctcactgcaacctccgcctcccagttcaggtgatcctcctgtctcagcccccctgggactacaggtgtgtgccgccacaccaggctgattttttggaatttttttagagacagggtttcaccatattccaggctggtctcgaactcctgggctcaagcaatccacctgccttggcctcccaaactgctgggattacaggtgtgagccaccgggctgggtcttaaataaaacttttgacagctagagggcaggtatgactgttctctgcatcactcaatgaatatttaaaatgaggatcttagtggggtgatgggatcacacctgtaatcccagctacttgggaggctgaggtgggaggatcgcttgaagcaaggtgttcaagaccagcctgggtaacatagctagatcctgtctctaaaaaaaaaggaattaagtaaataaaatgaggatcaatatttatatattcctagaataaaagtatttcagtctgacttttctagggctaaaagtcatttgaattttcaggcacagaattatagaactgcatagcattgtagaagtaaaaatcatcaagtgaacctctttaacaggagaggaaataaagcccagacctactcaaagtctaggctgattaaaggagatactgaagccaaaactttgattctgtgctcttttgactactrtagctcactgctttgcatatctggtcatatgaaacaaaacctgaattcctaagatttttatttatttaaaaatagagatggggtcttgccatgttgtccaggctggtcttgaactcctgggctcacatgatcctcctgtctcagcctcccaaagtgttgggattacaggtgtgagccaccatgcccagcccctaagatttaaattacagtgatttaattatattaactgcattcttcagaataaatgattaatgtcagggtatatgagttccattaaatttttcttggtaaaaaacttttgtagaaagatgcccagttcctgatacaatgtgtgcattcttgttttctacatagaatattttaaaaatgactacaccaaacaagacacctcctggtgctgaccccaagcagttggaaaggactggaacagtacgggaaattgggtcacaagctgtttggtcactctcatcttgcaaaccaggtaaaaactaacaaacaaaaaagctgttggaaatagtcacttgcagtttccttgtacaggcatctccccttatcccaggggatacattccaggactcccagtggatgcctaaaaccatggatagtactgaaccctttctrtattaatactatgttttttcctatacataaatacctgtgataaagtgtaatttataaattaggcacagtaagagattaacaataattaataataaaatagaacaattataacaatagaagtaataaagtaataaaagttttgtgaaagtggtctctctcgctctcaaaatattatattgtacccttcctcctgcgatgatgtgagagataaaatgtctatgtgatgagagcgagtgaggtgaagaatgtaggtgttgtgatgtagtgttaggctactattaaccttctgacaatacttcagaaggaggagcatctgcttctggtgattctggatcatcaagccacgatgatgttgatgattggatatcaggagcagatgatgttgatggctaacggtcaggtagtatacacagtgtggatatgctggacaaagtggtggatgtgctggacaaagtggtggatgtgctggacaaagtgatgatttatgtcttgggtgggatggagcaggatggtgagaaatttcttcacactactcagacagtacacagtttaaaacttaccaattgtttgtttctggaatttcccttttaatattttgaaccatgattgaccaagggtaactgaaactgcggagatgaaactgcagataaagatactactgtacactggtctgattttaatattccttttgtttagatgctttattttaattctaatgcactgaatttttttttatcatatatctctgtccaatttctttactattccctagttagatttaattacatatgtcataaggtcttctcttttcctcctctatctctactatgattcagttgttattcatttattttttttggccgtttctctcaattggataaatgagtgataacatacgccaaaatactttccttttactctttgttgggatagaattcttgggtggcagtccttttctctcaaaaatttatgaatgctctttcactatcttcttttgccatgttgtggatataaaggcctatgcctacctctcttttttttttttcctaagtaacttgtttttttctggaagcatctaaggtttttctctttattcttgagttcatggcatttgccagatatcttttctcacccttgtaacccataattttataggcagttttcacctgcagactcaagcttggagaaatttctttagcttgagggactttataatgttattagtttagtagtcatctttctttcagaaacttttattatttgcacattatgactcctgtatccatcctctcaaccaagcctcttctgtttcccctcaagattcccttctctgtctttctatgagcactttcttgaggtataatttacatactataaaacttaccctttttaggtgtacagttctgtgaattttacagacatgtacagtcatataagcagcattataatcgaatatataacattgccatcatcccacaaagttccctcatgtctctttatggtcagtcttctgggcctttccaagcccctgacagctcagttttgggtccctttggtttcgcctttcccagaatgccgatataaatactgtatgtagcttattgggtctagtgtctttcatttagcataattcacttgtgggttttgctggggcacatatctgtagtttattcctttttattgttgattactgttccacaatatgggtgtaccagtttgtttatccattcaccagattagtagtagctagctttcaaaatggtccccagttatccttgccttctggtattcatgcccttctgtggaccgcttccaaattgtgtcaggattggtttctgggaccagtagaataaggcaaaactgatggtatatgacttttgagactaggttgtaaaagacattgtgtccattatttcttcaattatttcttttgccctattgcttctctattatctttctaagaatctgggaatccaattatacatatgctagaccatttgttattatcccacagcttttgggtactctattttttttcactttttttggagttgtgtttcaattctggtatttttcattggcctgtcttcaaatctgctgcattcatctttggctttattgaatatactgataattctgcctaagaaatttttcatctgtgatattatattttttatttgtagctcttccatttgactcgtagaattttcatctctattgaaattcctgtctgttaacacatttcatctacctttctaggtttttgttttttttttttaacatcttactcatagttatagttatttaagattcctgtctggtagttccaacaactgggtcatctctgggtctgtttctgtttatgataattctgtttttctttttgtttgtcttttttttttattgagtgccaaatatgtgcagattagtagatactgagataaatagtttttacaccttgaaatgggtgccttttttctatcatttgtcctttattgtgggatttgcattagttaggaattgagctgagtttgagttttgttattgctatggttaccttcagtgtctcacaggcttcaaattcctctaaagatgccctgtgcttactgtgagaacattgtgccagagacattttcttatttttctatataatagttccactccagttttcctgtgctttggcgcacacttgtgctacagagggtgcctcttgccatgctcttgccctacctccagctgtagaatactgtgtttcattactcagttcagggtatgagaggcaggttagttctctgttttcctagtgcagctacactcttaggtaggctgtatgtgcctggcctcagcattttggcccctgctgttcatgacagccttgtatctgtggctggtcttttgtggtaaagagttttctgcctcactctgagaaaggactgttgtttgcccctctctcaggtatagagagttttttcttttactcatctttcagcaaggatggattgtatttgtgtcctggggtcaacagggttgattctcctcctacagtagcttaagtcctttcctctatgggagagaagggtttggaaggagggtagaacgttttgctttccttcactggtggtcagtcccctcctctgtatctgtagcactgacttaggctgtttagtctcttcccctctcccagtctttatgtgtaaagtgagggcccttgcaaaagagtctgagagtcagtgtgaattcaccttgtgttttgggctctcagtgttgctgtactattatgctagcctgcatttggtctttgtcaaattattaaagttatacttggtttcttcttatgtatttatttggtcttgttccttcctcctatgctctactacagttgggacaatctgtaatctttttttctcctgggaatgggggctgccccattcctggatttcaggctgtctggtaggagtttgtagtttatccagctttttctgttgtttggatggaggtgattttttttaatttaaattttaagtttaagttctggggtacatgtgtaggatgtgcaggtttgtgacataggtaaatgtgtcccatggtgatttgctgcacctatcaacttatcacataagtattaagcccagcatgcattagctatttttcctaatgctctccctccccctaccccatcctgacaggccctagtgtgtgatgttcccctccctgtgtccatttgttgtcatygtttagctcctatttataagcgagaacatgtggtgtttggttttctgttcctgtgttagtttgctgaggatgatggcttccagctcctgaaagggagaggcagggtagttctctgttttcctagtgcagcagcagtcttaggtaggctgcatgtgcctggcctcagcattttggcccctcctattcaagatagccttgtatctgtggctggtcttttgtggtcttttgtccaagtccctgcaaaggacattatctcattcctttttatggctggatagtactccacgtgtttacagtgttggtggaaatgtaaattagttcaaccattgtggaakacagtgtggcgagtcctcaaagatgtagaaccagaaataccatttgactcagcaatcccatcactgggtatatacccaaaagaatataaattattattttacaaagatacatgcacatgtatgttcattgcagcactattcataatagcaaagatgtggaatcaacccaaacgcccatcagtgatagattgaataaagaaaatgtacatatacactatggaatactgtagcggtgatttccccctccccccgttttttaaaagctttttcagctttcttttgggttctttggaattccttaatatccattatygtatcaaatattcctgtaaatatgattaaattgaacatctttcactgtttgatctattagtatgactagactggtgccatattgtgtcagtaatgagatacaaatcagtgctagttgaactcctttggtaaagtttaccttccttggtaaactagcactgaatcgtacctcattactatcacaatattgcaccagtcactggtttgaagagagcaacacatgtcaccagtttcctgaaaatgccccactgctctgacatcttggaggtgcagaagagatcaatagttactgctactagaggagtggcaggatcacttaaaaatgtgttgagtatgaaattcatgaagttcagtagtgcaatgtcatatgtcttacttcatgtgattttgagctttgagtctatcagtgaaatatcattatatgattagcattttacatattaagaatgactactctttataaacaggaaactgcatgagaaagtgattgctcgatctttgcttctctagggtcagatatttttcagtttaagtcagcagatagttgctgagatttgtaactcaaacttgttagagattgaaagacaaaaaagacacaatctttactgtcaaggacttcacaatttagtggaggaagtatagctttaaactattactacataatgtaataattaataacttttatttagtgcttactaagtgatagatgctgttctaagaactttacatgcataaaataaccagttatctcagtaaggttttcaaaagttatatatgaagttgtactatttcttttaccattttccaaatgaggaaactagtacagaaagattaagtaatttgacaaagatcacatgataagcaggaaattctggaattcaagacagactccattacacaatagtgctttccactaaatatgggctcagtgtagaactagcccaaagaagaaagtgatttactttgcttgaaacgatcatggaagtcttcatggagatgatgcttattctgtatgatgaagcaagaataagatttcactaaggacataaaagcaagggaaatgggacagttagccttccatatctgtaggttctaatttcatggattcaactaactgagggttgaaaatagttggaaaaaacccacaaaaaataacaatacaacaacaaaaataacacaaatagaaaaacaacactgtacaactttttacatatttacattatattaggtattataagtaatctagagatgatttgaagtatacaagaggagccattttaaataagggacttgtgcatcagtggatttcgttaaccacagaggtcctggtaccaatcctcgttggatgccaagaaatgataatatgtgcagaggtatacaacttaaacaaaacatggcttagtcaattaatttcatgtagtaaatgagactagaaatagggaaatggcgtatgtgaagctgtatagttaggtagaagcctgattatagaagactttattaaacaattcatactttactgtatagataatatgagcagttgaaaaggtaagtaacagagtaaaacaatcagtgtttgttcatatttgagaagtgtggaggatggattgaagtgaggcaagattagaaataaaaaggaaatcaggagacgcgataaatcagataggaagtgatataaaggagaattttaagaaattttcaaaatgttaatgtcagtctttgggagatacagatttacttgcctgctacaggatggtaggtggcacatggctttgcaaaaatctttttgtatctttgaaataatggttcaatatttcattcagattaaagttggaatgtgtttagtagattcagcttagttgaacacacaccacaaaacaatcttacaattcagcacaattgttagtctctacctaagagactggaaaaacaaaagaacaaatttgtgttatgactgctaccgtataatagggtcttttaaaataatttaatcatttcataagcaccaaattaatccaatgttgaaaaacaaatttaggggaaaaataagtacatctgctgtgcttaactctatatttgatacaaagaagggattcagtatggctgtattttgtgaacatcttacagggcttatatgctatttgttccctgtttttttttgaagacattgagttaattcttagaaggttaatgggatgttgtaaattctgtttttcttaaaataaaaatcactaaatttttattgaagttcatgctataactgacaattatggcctttgagttaaaggatttctgagttgaatagtgatatttgctttgcagaaaataagacagcaatataatagaaagtaactttaagtgggaggctacattagtttgtgggattatggaaggcctcttttataagtgaaatttgcacagagacatgaatgttaagaagaattcattgtgcaaagatttcagagaagaactttcttgacaccaggaagttagttcaaaggctctaagttagttgatttggcattttagaggttcagaaagaaggctataggggctggagagcagtgagtaaggaggagaaatggtagagtggattggaaatgtaattagacatggtgggacagattatatgaactcttgtaggccctgaaaaagagtattgattttaagtacaaagggaaaccactggaggtgttaagcaggagaggaagatgatctgatacagaatttttaaaagatgactgtgtccactgtggataatggttgatagtggcataatggtgaacaccaatggaggaaatgatgttatagtaatttatgttagagatgatgttgatttggactaggattaagaactgttgatatggaaaggaatgatggctttgggatatatttttagaggtggaataattacgattcacaggaggaaaccttcagagtgacctttctggcagaacaactcatactgtttcctgagttgagaaagaaggagggagtggagggagtaaatagattttgggtcaaaaaataaataatttaatttatatatgttaattttgcaatgcctatttttctagttgaaatgtttagtaagcaattgactgtagaggctgggagctctgcttgaagttctgggttggagatacaaatttgaaggtcatcagtgtgccaatgatattctaagggaactggactaactcatctagggagagaatttagagaaaagaataaagctttgggacacttgaagatgaagagatctggcagaatagtggaagaggtgtcaacaaaggatactaagaagtggctagtgaactaggaggaaaaccaagagagtgagaaatcatggatagaagtcaagaggaaacaagtgtttcaggaagttagttaattcttcatttctcttttatttttattctttgaggtggagtctcgctctgttgcccaagctggagtgcagtggtgcgatctcagctcactgcaacctccacctcccgggttcaagtgattctcctgccttagcctcccaggtagctaagattataggtgcgcaccaccacactcagctaattttttttatttttagtttagacagggtttcaccatgttggccaggctgatctcaaactcttgacctcaagtgatccgcccacctcagcctcccaaaatgctgggattataggcatgagtcattgcgcctggcctcatctctttattgttgtactaatacttcatattataatctatttgcttaaatctatcagtgctgtccattagaacttagtgcaccatgcagtgaggtaactactagctacatgaaactattgaacatttgaaatgttactactgttactgaggaactaaatttttaattttacttcgtttaaatgtatatagccacagtgtaggtctagtgcatgatatggatgaacttctctacagagaccatttgtatctatctttaggtcttcatagttaagacatttgcctcagttaaaatagccccctagcagagcctaaggaggttgaggctgcagtgagctgtgatcgtaccactgtactccagccagggcaacagaatgagaccctgtctcaaaaaaaaagaaaaaaacagccccttagcaaatgtgaaagtagttgtgttaatagatatgcttgaaaggaaaatgactgttttattcataaaggcagtctaagctgggctgctcaaatatgtctctagtggtgttgtgttagtgctcttgctccactaatgctgcttaacgaacaaccctagtctctcagtggcatgatcagccaaatttactttgtgctttggtgatggctcggctttaggctgtgagtcaggttcaagtctgctccatttgtccaggcatattctcttagtggagtgcagagcattcagaagaccaagccagactttgcaagcacatttaccgcctctgcttgtgtcacagtgtattgactgaagtaagtcatgatttagccccgttattgactggagtgcagaatcgtatccctcccatggagagtggggagagaagcatgaatatttaccaaacaataacaataaccatagatgaatactgattttcttttctttagggcagttgctctcaccaggggatgcttttaccctccagggtacaaagtctggagatatttttgattgttgtgattactggggacatgagggtggggggagttggggagttgggggagtgtttctattggcatctagtgggtagagcccagggatacagctaaatacctttcaatgcactggacatcccctgtactgaacaaagaattattcagtccaaaatatcagtactgccatgattgagaaaccttgccttagaggagtaattctaacattttagcatgcatcagaatcacctagaggatttatcacaacataaactctcaaaagggctgagctctcaaagtttctgatacatgtctagaattcctaacaagttcccaggtggtaatgatgctgctggttcaggaacgacactgtacgaaccactgcattagagaaccagtacatcatataataactgcattggagaaccagtacctcttataaaagtttttttctgtgtaatattgttatttgtgtggattttctggatacctgttaaagcagttatcatagatacgtctttgttttagttcttttgtttaaattaaaacaattcagggccggacacggtggctcatgccagtaatctaagcactttgggagactgaggccagtggatcacttgaggtcaggagtttgagaccaatctggccgacatggtgaaaccctatctccactaaaaatacaaaaattagctgggcgtgttggcaggcgcctgtaatcccagctactctgggggaggctgaggcaagtcttcactcttacgtccttcatattttagacttttattttttgaagctctgccccctgcaaaggtgagcttcagccacctgcaacagtcacttctgggaattgcttgaacccaggaggtggaggttgcagtgagctgaaatcgcgccactgcactgcagcctgggcggcaaagtgagactccatcttaaaaaaaaaaaaaaagaaaaaaaattcaaatacaatactgagtgggaagctttggaaaagaggttgagacgggattggcacataaggagatgtttgtaagaggttccgtttgtaaggcatattgaagaagcaaaagttggtaatcatacttagtatttcagacataaagatttagactaatcagtacttgaagatattagacctgcttagttgtactatgatactttctaagcaataaattagagacaaattttaaatgatcagttttgaattataggacatttcttattctgaataaattattcagatttgtgtttaattttttttttgcattttaagaacaaatactattttgttctttgaacctctttgagcacatacataataaagttgtgaaatggaggagaaaaaaaacctagctgaggtagccaaaataaaataactgaaaaaaaaaaccttttaatcaatagaacattaaactgtggagcttttacggaagaatcgtgatttagttatcctttactagggaactcaaaaactagtactaaaaagaaaaagagagttaagacctataactctttatattggaggtaaaacagttatttttatttttatttttatttttttgtccgtttctcgcactgttgcccaggctagagtgcagtggtacagtcatggcttactacagcctcgaactccaggactcaagtgatccccctgcctcagccacatgagtgccatcacgcctggctaagtttttttattttttgtatagacagtgtctcactatgttgcacaggctggtaaaacagctttttatcttgtaacttgcattacctaatattctggattagctttagcaatattgtgtaaagaacgaagcatgatttgaagcatgactgtccaatagaatatgtgacgtgaaatatatatacaagtttcatggggaattttatagtagctacgtttaaaagggctaaaaataggtgaaattaattgtaataatatttttaaatctagtataactggactactattactaatgacatattttacattttgtcctaatcttcaaaccagtgtgtattttaacacttacagcacatctcaatttggacttgctatatttcaagtagccacatgtggctagtggctaccgtattggacagtgcagatttaagagttacggaagaagtaatagcccaatttttacattttatcgacatatatggcccaggacagctttgaatgcagaccaaattagtaaacttttttgaaacattatgaatttttttttttttagctcatcaactattgttaatgttagtgtattttatgtgtggcccaagacagttcttcttccagtgtggcccagggaagccaaaagattagacacccctggtctgtgtgatctggctcctttgatatgtctggcttatttcctgcttcacaccaatgtattgccttagctctcaaaggacccactgttgttttccatgtatgccatttttcttgattcatgacattatatgcttatctctttgctgaatgcccctgaatcttaccattctacctctttatctagctaactagtaatttgaaattcaatgcaaaactcattttctctggataaacttcttttatccactagtatgcacaataaaggcagcagatgcaaatttaagatacaaatccattcatgtttggattacgtggaacagacatagtgttaatatccataatagtgactgaatgtggtggcacatgcctgtggttccagctacctagatgactgaggtgggaggattgcataaacccagcaggtcatggctgcagtgagctttgatggtgctactgcattccagcctgtgtgtcagagcaagaccctgtctcaaaaagaaaaaaaaaaaagatctgtaatagtaaaagtgttatgaataatcaaaagacctaagtttattgaaaatataggaggatatgaataagcatgaaaatataaatattaataaatgtgaaatacaatttttttaatctatcaggtgagtaaatatttaaaagattaactgcatttttgcctgggtgcagagcagtgctatccaacagaaatgtaacacaaaccacatttgtaatttaaaattatctagcaacaacgttaaaaaaattttataaaagtgcaattattctatttttctcagtatgttcaaaatatcccttcaacatataatcaatataaaaacattagatatatatttaaagtttttgtcatacaaagtcatcaaaatctggtatattaatttcagaacataccaacttttactagccattgagagggaataggtattcttttacatttttggtgaggaaatgttttagaggacaatttggcaatatttatcaaattaaagattcaaatgacccaggattctattcctagaaatctattctctagaaataacatatatttaaagattgtagacagctaggtgtttattgcagtattgtttgtaatagcaaaacattggaaacaacctaaatgttctgcagaggtgtggtgagataattatgatatttccagacagtggtagaatatacaaccttaaaaaatatggaagctgtttatgttgttatatgagctaataaatattagattatttaacatatataaaatgtttagaatgcgcctggcacatagttaatgtgatatcagtgtttgttattgttattattgttgttaatttattgatatggaataaatattcgtatggtaaaaaactccagatatgttaagtaaaattaaaaaacaccaacatgcagagctatttactgtatgctatcatttgtttaaagaaaagggaatagaaagaatacatatatgactgcttgtatatgcatatagtatctgtgaaagggcatgcaataaactgaaaacattaactatatttggagagaagaatgagatggtagatagtgacttttcactgtgtcttgttccttttggatttgttccataatgaatatattacttagtgtaaaactgaaatgtaagttaaacttatttctcttattaaaaagtctgcattttaccattaaatcagattcatttctaaaattagtatgaattattgtggttttaatcaggaaaaaacacaggattgtacaacttcatttatgtagaatggatggagaacatgggattctgggtaaatttaattttgattaatcagaattttaatcagaagcatttggcttcagaatatatatgccttttgaaaatattttaagtcatcttttttcttgtctcagtaagyatggcatattgaacttattagaatgtgtttatttttgaggattttgtgcttagtcatttttactatcagcttgcaaaaagcacaagaaactgagtttaaatacatacgttctttaaaatgtatccggctgggcgtggtggctcacgcctgtaatcccagcactttgggaagctgaggcggctggatcacttgaagttgggagttcgagaccggcctgacccacatggagaaacgccttctctactaaaaatatgaaattagtctggcgtggtggcgtgtgcctgtaatcccagctacttgggaggctgaggcaggagaatcgcttgaatccgggaggcggaggttgcaatgagccgagattgtgccattgcactccagcttgggccacgagagtgaaactctgtctcaaaaaaatataatatctcctagaagatgttttttaaaaaggtgacaacaaaataacttgatcctaatatagggtttgtatgtgcaagtgatatttctctaataagagttgagctctgaataaaagggtagaagaattctggttaatttaagtttcacagctgggtgctatggcttatgcctgtaatcactgcactttgggaggccaaggcaggaggatcacttgaggctgggagttcgaggccagcctgggcaacacagcaagaccctgtctacaaaaaataaataaaaaaaaattaatatttctgacctttctgtttatcaaaatttctggacaaatacatatgttaattttatgttttgcatgtatagttgtttctttttcacagggatttattgacacttttggtgtttttaggatttggagtggatcagttacgagatgacaatctagaaacttattggcaatcagatggttcccagcctcatttagtgaacatccaattcaggtaattaatacattttcaaatttttcatctactgtaggttatagacaaataaatctattttattaacataaaaattaaagatagaaattacaatgaaatacacttaactttttaaactctgaagtcttatagattatttttcagttcagttagattattagcattttaaagttactctgtcttattttttatgaattttcttatggtatgttgcatagttccttttatgtagatgtttctcaaatatacttttcaatataatttattttttgcgggtactttcagaaagatatattttgcttatggcccaatacaataccttaatgtatcatattaagtaaacctggagtgatcgtaagttttttagctgtggaatattcatataacttctcaaatttttacttttatttggaaaatttttttttttttttttacttagaacctttaaggacattttcctttttgataatgctttttgaggggaaaggaaaaacagccacatgtttttcaatgctttgaatgtatttattatcagatttttaaaattttaaataagagacagttggccgctatgttggccaagctggtctcgaactcctgggctcaagcattcctcccacctcagcctcccaaaatgctggggttccaggcatgaaccactgggcctggctgaatttattgacatagttggaaaccagttaactcagctatcttgttccatttataccatctttttttttttttttttttttgagatggagttttgctcttgttgcccgggctggagtgcagtggcgtgatctcgggttactgcaacctccgcctcccaggttcaagcgattctcctgcctcagccttccgagtaactgggattacaggcatgcgccaccacgcccggctaattttgtatttttagtagagatggggtttctccatgttggtcaggctggtctggaactcctgaccttgtgattcaacccgcctcggcctcccaaagtgctgggattacaggcgtgagccactgtacctggcctataccatctattttaacattctatagcattgtatttttagttgtttgcttttattgtcctagagtacaaatcagcaaatttccaacaagccagatagtgaatattttagactttgtgggccatctcatctgttttgcagctacagtgctcagttccactgttatggcacaaaggtggccctacacagtgcataaatgacagaatttagctgttctaattaaattttatcttacaaaagcagatgttaggcaggatttatttattttccttctgacttttattttagtttaagggagtacatgtgcaggtttgttatatgggtaagttgcctttcgctgggttttggtgtacaaatttcgtcatccaggtagtaagtatagtacctaataggtagtttttgggtcctcaccttcttcctttccttcacctcaagtaggcacccatgtctattgttccctattttgtatctgtgtgtattcaatgtgtgtttttttttttttttttttttttttgagacagagtctctctctgttgcccaggctggagcgcagtggcgtgatctctgttcactgcaacctctacctcccaggttcaagtgattctcctgcctcaggatcccgagtagctgggattacaggtgcctgccaccacgcccagctaatttttatatttttagtagagacaaggtttcaccatgttggccaggctggtctcaaackcctgacctcaggtgatctagccgcctcggcctcccaaagtgctgggattatacgtgtgagccactacacctagccatgtattcagtgtttagttcccacttataagtgagaacatgcaatatttggttttctgtttctgtgttctcttaggatgccggcctccagctgcatccatgctgctgcaaaggacatgatttcattcttttttatgattgtgtggtgttccatggtgtatgtttacaatattttctttatccagtccactgttgatgggcatctaggttgattccttgtctttgctattgtgcgtagtgctgcaatcaacatatgtgtgcatttgtcttatggtgaaatgatttaaatccctttggatatatacccagtaatgggattgcttggtcaaatagtagttatgttttaaattctttgagaaatctccaaactgctttccacagtggctgaactaatttacattaccaccagcagtgtataagtattccctttttttcacaacttcaccagcatctgttatttttttttgactttttagtaataaacattccaacttgtgtgtgaaatggtatctcattgtggttttgatttgtatttctccagtgattagtgaggttgaccatcttttcatatgcttgttggctgtatgtctacttttgaggaatgtccgttcatgtcctttgcccattttttaatagagttgcttttttcttgtaaatttaagttccttatagtttctggatattagacctttgtcagatgcatagtttgcaaatattttttcccatcctgtaggttgtctgtttactccgttaatagtttcttttgctgtgctgaagctctttggtttaattaggtcccacttgtcaatttacatttttgttttaattgcttttggagtttttgtcatgaagtctttattaggtcctatgttctaggtatttctaggtatttcctaggttttctacctgggtttttatagttgtaggttttacatttaggtcttttataaatcttgagttgatttttgtatatggtgaaagggaggggtctgatttcaatcttctgcgtatggctagccagttatccctgtacaatttattgaatagggagttccttcccctttgcttgttattgccaactttgttgaagatcagatggttgtagatgtgcagctttatttctgggttctctaacctgttccattggtctctgtgtctgtttttgtaccagtaccatgctcttttggctactgttgttttgaagtttagtttgaagttgggggtaatgtgatgcctccagctttgttctttttgcttagtattgctttggctattgaggctcttttttggttccatatgaatattagaatagttctctaattctgtgaaaactgtcagtagtttgattggaatagcattgaatctataaattgctttgggcagttatgaccatttttttttaaacaatattgattcttcctatccatgagcatgggatgtttttccatttgtttgtgtcatgtctgattttcttcagcagtgttttgtaattcttgtagagatcttttgcctccttggttagctgtattcccaggtgttttatttttttttttgtggctgttttgagtggaattgtgttcttgatttggcacttagcttgtatgttattggtatatagaaatgctattgatttttgtatattgattttgtatcctgaaactttgctgaagttgttcatcagatctaggagtctttgggcagagactatggggttttctaggtgtagaattatattgtctgcaaacaaagatagtttgacttcctctcttcctatttgaatgccttttattttttctcttgcctgattgctgtggctaggacctctagaactatgttgaatagaagtggtgagagtgggcatctttgtcttgttctggttcttaagtggaatgcttccttccagtttttgctcggtatgatgttgtctgtgggtttgtcatagatggcccttattattttgaattatgatccttcaatgcctagtttgttgaggatttttaacatgatgattgttgaattttattgaaagccttttctgcatctcttgagatgatgatgtggtttttgtttttagttctgtttatgtgatgaatgacatttattgatttgcatatgtggagcctatcttacatccgaggaataaagcctgcttgattgtggtggattagcctttttttgatgtgctgctggtttcagtttgctagtatgttattgaggatttttgtgtcgatgttcatcaagaatattggcctgaggtttcttcttttactggatctctggcaggttttggtatcagagtgatgctggccttatagaatgagttagggaggaattcttcctctcagttttttgcaatcgtttcagtagggttgataccagctctttcatatactctggggttctctgaatttcctgaatttgaatgttgacctccttagcgagatcggggaaattttcatggacagtatcctcaaatatattttccagtttgcttgttgtttctccctctctgtcagggaccccaatgagttgtagttttggtctctttacataatctcatatttctcagaggttttgctcattttttcaaaaattctttttcattttattttattctatttatttattttttttgagacagagtcttgctctgtcgcccaggctggagtgcagtggcacgatctcggctcactgcaagctccgcctcccggtttcacgccattctcctgcctcagcctcctgagtagctgggactacaggtgcctgccaccacgcccacctaattttttgtatttttagtggagacagggtttcaccgtttcagccagaatggtctcgatctcctgacctcgtgatccaccygcgttggcctcccaaagtgctgggattacaggtgtgagccaccacgcctggcaaattcttttttatttttgtctagctgaattgatttgaagaaccagtctttgttctctgagattctttcctcaacttggtgtgtactgctgttaacactgctgaatgtattatgaaatccttgtagtgagtttttcagctctaccagrtcagtttggttctttcttaaaatagctatttcgtctttcagctcttgattcattttactggattccttagattccttggattgggtttcaacttccatctgcatcttaatgttcttcactgccatccagattctgaattctgaattccaaatgtctgtcatttctgtcatttcaatccggttaagaaccattgctgggcaactagtgtgctcatttggatgtaagaagacactctgtgttttagacttgccagaattcttgctctggttctttcttatctgtgtgggaaaatgttcctttaatctttgaagttgctgtcctttagatgggacttttttgcttttatcttctttgatgtcatcgagggttttactgtggtacaagttgggtttagttgactagtttcatttctggatgatttcagggtaccaaggctcagctcagtgcttgtgggttgcatgctgtaatccagagggcctttgaacagacccaaaaccttgttctctggcccttcaagataagcaactgctgtactggagkggccacagtgtttccagtgtgctggcaacaacactccaatgaggggtgcagtcaaagcagtcaggggaagtctgtgggcaaatgtatgctggcagcagcccatctgctaaagctttctgttggttaggtggggtctgttggtgaaaaagctatggcagtggctgctgggaagcacccagtaggtcatctgaggctgtgctgcaatcagacatggccaagcagggaccctgggagagactggcagacaaagtgttgctcagatcagactggcccccatcccatgggtaagacagccctatattgtgcaggtccaacagtcaacaaaggccaaagccacctagaggtacatgacaagccttaagggacaggcatccctggctgtgctccactgtagccatttccatgccaaaccctctgggctccacacaggctggggtcctatgcctgctaactctccaagcagcactccctgctggttcagatgcctgggggggttgtggggcctcctgccactagaattctggagatacatggtgagagtggactactccacacctatttagttaattcttccccaggagctgctcagggccagaaatgagtcctggtgctcagcaaccccattcacrgttcctagcttactcccctttcagcccagggtctgcttggtcctccctctgtccactctcaatgccttccttctgacagtctgcttaaagtatgcttgtcttcttgatggtctggtttctcggtgaatgaagctcttcctggccacatctagttggccatcttggctctgatcaaccctgagattctttttaaataaaagttttatttaagatggttgctaaaattaaaataaaaggtactagtctctttattagtaaataataaatgtaatataaagttatagttctacatttaatccacttctcttccttccttttgaagagtgtaaactcaagatgggaaaggaggacaaagccagaagtgtgaaagatatttaagcagttttagttgacagtgagtttagtttcaattaacagtgtgatgtggttgctaaaaaagctagtatgattttgggatgcaataaggtaagcacagaatctatgaagacctcctggtgtgttgtattccatgtcggcttcccctgctaacactgataaagaaggtctaggatgtgctcagaagggagtaggcagaataggggattgaagccaaacaataataaaaaaaaaaaatttggaacctatggtctgccgaaaactttgggggacatggtagctttctttccgtaatttgaaggatttatactttgtggaggaattagatgttttgtatgtgtcatctcataagaaaaaacttagcccaaaaggtaagagctacacaaagaccagttatggcttagtataaagaaaacttttaaaaattggaactgatcaaagataatttaactgcttgatagtaatagttgctacctgtcagaaaaattttgaacctggttatttatttgtatagatggtggttagattacatgatcctctaagctcatgtttagtcctaatggttctgattaggtctaattaaaatacattatgcttcacttgctgaatgtttagcatgctttttttgtgaaatagctttaaatgttagaatgtgaacataatttaaagtatgaaatatttccaaattcaagaatagacacactagcaattaagtatcacatagggctcatacattgaaaatctaatttggaaaattttcatatttcttggtttttctttggaggaaggtgctgttctatcagccatgcagaaaacttacaaagaaatgatcttcataaaaatttgaatagaatatattaaaaacttacctattacataattaaatgaagggaaaaagccctctgccctcctcaaaaagagaggtaatttttcttggcagttaggagaaataagtcctaacgtagagagggggaaggaaaaaatataataagaaaatgaaatgttctttgaatgtgtaattttgtacttaaatggaaaatagagaagctttttgcttctctattttatataatatatgttttatatattttataaagtgaattattttctgtttgtaaagggctaattctcttgggaagaatttcaaaattcgttaataattttttaaggaatattgggaataatattttaaggaaaattggggagtaatttagtttaatatggattatagggactaatgtacttgtttgctgatttaaaaggataaatactgaaatattaaactgagtaggaacaargcaaaatttgtgcttttgtttgatctgccttcatcaaaatttctacaaattttattaaatgtaatcttgctatttttatcatggtaataacattatacaacatttttaattatattaaaatgatttctgtgtcgcaaagaaatttattgaaatagaaaaggacacaagaatgctgagaaaaatattgaaaagttgtgctggtttgcttcattttaaagagaaattttgatagtttaataatgaaagataaattataaattttaaaaaacctgtatttactaaagcctgggttgaatgaaaacattgatagtaataaactccattrtcatgtaaagcactttgaacagaaagtactttataaatttaataaaatcctatatatactttaataccaatatatgtatggatgtaaattgcttaagccaaatcatacaaattagtttatttaccctcctccccaaattacactgttcataaattttaaactttataattttgtgacatttatacttttgcttaatcatctctttggattaattttaggtttttaaaaaatatcaggtaacaggtgaacaacaggacctattgcctggtagcactacagtttcagcagcttaggtatctttgtaaaaaagcatttgtgcaattatagaatactttattgcattttccccttatttttaaaagtagagcaaatggaaaaattaaagtgctgatgtcatttaaaaaatagtagattgggtgcagtggctcacgcctataatcccaacactttgggaggctgaggtaggaggattgtttaaagccagaagttcaaaactggcctgagagataaagcaagattctgtctctataaaaaacttaaaaaattacctgggtgtggtggtacacacctgtagtctcagctattcaggaagctgacatggatcgcttgggccaggagtttgaagctgcagtgaactattgtcatgccactgcactccagcctgggtgacagagcgagaccctgtctcctaaaaaaaaaaaaaaacagatacgtaatagatactaggcttaatcacagtgtattaatacttgtgaatacattagaaatcattagactcaactagatattcattggactttactagtcacctacatattgaattatgaacaccaaaaggaaatgttaaatatttattgtcaaagattgtgactgaaccatctggtataatttaggattgtgatttaggattgggtagatttttttagcacttgagagctaactttcctacctctattgggtagatttttttagcacttgagaactaactttcctacctctattatataagttcagggttcagctttcttccatttgatcttcatccatgttttcatgaaaacattatgtactaatggaagaaattcctgtattcaaaaaattatattacaaacaagtttgaaagaggttcaatttggagtttatattttgttaaactatttggttccttagatgttttttcttcacatagaaaataagcaactctcgatttatgtagcagtttctcagctagttgagaaataatttgtatgtattactgatctgttaaggtgaacatatattgtaacatatataaagcaacattattttatatctcattgtgttttaaaattagaacaagctctttctctgctctggatgagaacttggtggggagcatatagcacactttttggtaacctacccagttttatgtttatttcaaatggcaaaatatattttagaaatagaagtgttcagttctagtgagtagtgaaagcctcaatcttgctttaaagtttctttaagttttattcctctccctaaacttgggcttgttgcaagttgggtgtagtttgcttctcttaccctacctagtttttttttgttttttttgtgttttttttgtcctttcacatttctgaatttgttagatctgctagtatgggaacgaagaagaggtaagaaaagaaggaaagtctgtaattgccatttgtatcttggtgatatagcattgatgttctctgtacttggctgtatgtttaaagctgactattatcttatggatgcttttgtgggttgagagaatcagccacccacattcacttaatgctatggatgatttatctgcagttctcttgttgagggtatattaatcatcttcttttttacatggtagtacctccagcttcctgatgaggattattcatcctttctagaaagaaactaagataacccttcaggttatcaggttataaagttcccttttcccagtttcttgagacatttttggattttctcaaatgccttttctgtatctgttcatacggatcatatggtttttctttattctgttgagatggtgaataataaaattcaatattatttatttaatattctgttgagatggtgagtaataaacagtaaagattttttttatttgtagtgaaatataaatataagtttactgttatagcctttttatttatttatttattttgagacggagtttcactctcgttgcccaggctggagtgcaatggcacgatcttggctcactgcaacctctgcctcccagattcaagcaattctcctgcctcagcctcccaagtagctgggattacaggcatgcatcaccacgcctggctaattttgtatttttaatagagatggggtttctccatgttggtcgggctattctcgaaatcccaacttcaggtgctctgccctcctcagcctcccaaagtgttgggattgcaggcatgagccactgttcctggccagccatttttaaatgtacagttaagtatccttaagtacatttacagtgttgtgcaaccactaccacctccatcttcagaacttttcatcatcctgtgtggaacccattaaataataaccacccaatttccttttctctccagcccatgataatcgctgttttattttttgcctctgtgtatttcactgttctggggacctgatataagtggaattatataatatttgtcctttggtgtctaacttttctcacttagcctaatgttttcaaggttcattcatgttgtagcatgtgtcagaatttcattcctttttaaggatgaataatattccattgtatgactgtgccacattttgtttatccattcgtcagaggacattgggttgtttctacctttcggctgttgtaaataatactgttatgaacattggtgtgcaaatatctgttcaagtacctgatttcacttcttttggatatatatccacaggtggaattgctggatcatatggtaattctatgtttaagtttttgagtcacctccatactgtttttcacagtagctgtaccattttaccttcccactggtaatgcccagaagttccagtttctccacatccatgccaacatttgataatagtcatcctaatgagtctgtctcattatagttttgattttcatttccctaatgttttgtgctatcaagcatttttttcatgtgcttcctggttatttgtatatcttcttcagagaaatgactgcttaagtcccttccctctttttacattgggttgtctttttgttgttaagctgtaagacttctttatatgtcctgctgcaattgctcaactttgccattgtagtattaaagctcccatagacaatgtgtatatgacggagtgtcacttagtttcaataaaattttatttacaaaaataggtggcggtccacatttagcctgcaagctgtagcttaccaagccctgctttagagcagaagttcttaaactttttagtctcagtactgctttaaacttttattgaggacttcagaaatctttatatatgtatctcattatttactattttagaaattatagattagggactttaaattatttagttattcactaaaaataaacaataattaacctattatgtgttaacaacataaataacaattttatgaaaaataactgtctcttcccaaatgaacaacaacaaaaatagtgagaagagtgtcattgtttacattttttgtgaacctttttggttcacaaaaaatagctggagtctcatttctgcttgttcattaaatcttttacaatatcccatgtcagcctgtggaaaactctactacatactcataagagaatgattctgaaaaaggcaaattacatcttagtaatattaagaaaatagttctgaccttgctgatcctctgaaagagtcttgaggtcctctgtaggtccccagaccactctttaagatcatttctcttgggcaagattagcctcattactaaggcttgactcatctgggatctcaaacgaatgtcttaggtatttgaagaggacttaccacttcggttattgggagctttaatgattcccagtcctctgtgcccactggaaattgtttggcttactgctttccagtaattgttctttccccagtgcttgttctttgcctatccttgtgaagttttgctgtatgcatgttcatattgtgttcaggcatagaatgaaggggaccccacgcatatttctggagttttttctttgtgtagcttattccttatcaattcagtagactactagattctctttggcatctccctcttcacattgcagtcccaaaattgcctgcagccagaaaactcagttgtttgtagggctcacctcatttattttctttctctcaggacctagaggcctgtgctgcctgttgctcagcatctctggatgcttcagatatgttctccagtattctagttgtctgtagtgggaaggcaagtcatgtagcagttaaccttcatgagcagatgtctcggactttcttgttttattttattttaagaccgtatctgctgaaaattatgcattaaggtctcatatatcctttcaaaacatggtctttgttgttgtagtcttccgcgaaaactttcrtcttagcatctagttaacattgatacagaggacatttttcacttcttattttgagatggagtttcgctctgtcaccaggctggagtacagtagcgcaatcttggctcacagcaacctccacctcctgggttcaagcgattctcctgcctcagcctcccaagtagctggtactacaggcacatgccaccatacccagctacattttgtatttttagtggagacgggatttcaccatgttggccaggatggtctcgatctcttggccttgtgatctgcctgcctcagcctcccaaagtgctgggattacaggcgtgtgccactgcacccggcccccatttttcacttttataccaggaacatatatggaagaatatagttatttataaatatttgcttctgatttaaacaactatgtggactgtgtttattttgtctcaacctcctggtaatatatctagcacgttaagaagaacgattttaaaaacatgttttataactattttgttttttacatttagctttaaatgtaaagctatcgtctatcacatatatttagttttaagttttgtaccttarggtttattagttactcttatataatgtagtcacatagacctggattaaattctggctctgtgctttactagatgtgtaaacaaggaccacttgcttaacctgatgtgaacctcagtttctgcatctgtaatacagacacagtaatgctgtattaattagaaatcagaacatatagtagcagagcttttgataatggtgttttctacaaggtggaaatttatttcttctacctcttcgtgtaagaggagcctggcagtccaggagtggtatggcagcctcacagtgtgtttgtggacccagtttccttctctttacattccttcattcttagcttgtagattttatcctcaaggttgtcttatggtccaagatgcctactggaattccacctatcatgtccatatcccaggcagcaggaaggagtagatgagaaaggtaaaaggggcatgtttttcttttaaagaaactttctttagtacacaccatcattttgtttaaatcttactggccataacttagtcatatggctctacctaactttaagggaagttggatcttttagccagatgttatgaagaaagaggggataaagggattttaggttaggcaactaggaatatgtcactaatgtcttcaatcagaatttcatgggttccaaacccaatgagaaattattcagcagatgctcgtatctgtggtagcaggaggcggccaaaatatcaactttataaaacagacagaactgatatttgagaaatataactgcattatatcttagtcaagtgtgtttcctaatattgaaccttagaattaaacagtcttacccatccagttataccactagaccaggtagcatgtgcctctattaaattagtggcctgaaggaacaaagcaaatgtttggttcctgccagaagctctttctcaggagaaagcgtgtagtgagtgaggggatagagagtgtccaggagtgttacttatgtcatcagaaataggaaagtattgccctcttccttccccactcttgtaatatcttatgctacgaatatagcacgatgcctggcgtatagtgagcattcactatggagtgattattattataatgatggttttgagcagtttgagctactgcctctatgtgtaatagtctgtatgtttaatcttatgacatgcattgctatttgaaacatagcatgcttttccatgaaatattatttttaaaattcatcatgagataaaattgataaatgattttaaaattttttactctaccttttaattattttaaacttttggtgaggtcacagtttcctatgcaaatttaatgaaactatgtatatagcaaattatacgtacgatttctgtgggtacgtgaaccttacgataataactcatggcttagaaaaaatttaaaaaactacagacacctacctattactgtaaactcgtatcaatgactattgaatgagctaagcacaattaattaaaaggaagttttggttaaaatcatgtgaggtcgacagacacattttttaatttcaactgttccctcctactagctttttgaccttarsccagttattaacytaagtgttatgttttttttttaaatcagaaaaatgaagaaataaaagttcytatttgacaacactgagaaataaatgagacaatatgtatagagcattacttctgggccagacacaaaatattcacttgctctttgctgttactgtgtttattatcattagtgtttttagtattctttgcttttctaaacttgccctgatcatcttgaaggcagtgaataagtgtacctgaatttcacaatttagaaacgtaattattctgagcaaaacacttgatcctttagatctgcctttcttttcttccttaaaaaaaaaaagttcttaagagccatcttcgtgatctttgatctctccataagaagaaagaccatttacttcctgcttatggctcatcaaggaaaaaggtcttcaaaaatttcctgtccttctttgcttcctctcctgtctcctttctggctcagcagagagaaagatgtcagtttgatacctttggcctcttttaaaaacctaataatggtctttatcctgtcagcagttcctgggtatttagtgttttacctcttgatccgaggaaaagtgcttaactttccctattcctttctaatgaatagcttaggctacagaagtttggtctccttactaagagctacagagcccctgctgtttttataggctgacttttgacacagagtacttctgttcaaggagctcattgttacaaagttagtgccagtttatactagaacttaacttttaaagcrcatgtaaatagatttcttaatgggtttttgggtttttaaaatcacctagattttttttttcctggtggccaaatagcacatgctcattctgaaaaattgttcagaaactttaaaaatcataaagaagaaaataaagatctcctatggtcccatcccacgaaaacagttaattttactatttttgggtaattccacctaggtctttttctatatacaaatatagatttacatgcctttaaaaaattgttgttttcccccaaatgtgattcttctgtatatattgttttataatcttttttctactgtaactatatatgtacatgattattttaaatagttctatagcagttcgttgaatggctatattgtaatttatttaaccaattctctattgtcatggatatttaggctgtttttaattttctagtgatttaatcacaggacaagatttttctgcatccatttttttctccaaggccagccttcattagacatcaatttttgagtgattgtgttactgtaktttaatgcattctcagaagtttgaattagtaggtcaaaggttgtgtttctactaactggtgatgaaagcacctttttctaatcaaatttgagtactatcagttgtttaaatattttccaatatgatgataaaactaatatctctgtgtgttttaatttctctttctttgattattagacgttgaacacattttcatgttttgttggccacttgcattttttctgaggttcgttttctattatgtgtttcttctttccctaggatatgtatattttaaaatcaatagcaaaagaaagaaagaaagaaagaatcagcagcagaattctatttcttgcattaaaactaggttgttgtattttttaggaaaggtagttttctctttgctggacccagttcctcacttagctagttattttcaagtatttaatataggaaatgaagtaagtacttagtaaaggaaaccaaacttatgagaataatttctttgtctaaaatacaaatgaagaggatggaaatccttaatgcttgtttgcatgataaagtacctaatttggcttaactgatccttctttgcttgcatctggctcttgaccatgttctacataggtgtctgtataattaacatattatctgggcctatatttaacatactatctggacctatatttttacatttttcatttttgttgaaattaaaagatatgaaaatgttgattcaaatactccttttagcaaactatgatttttaaaatcagaagataagatgcattggaaatcttttcatatgatgaagtgcatgttatttttactttattgcttttagaagaaaaacaacagtgaagacattatgtatttatgcagactacaaatctgatgaaagctatactccaagcaagatctcagtcagagtaggaaataattttcacaaccttcaagaaattcgggtatgtctttcaaatttttaaaaatatgtcatcctttaacttttactcattagaagatagtcacagttgacattacattagacaggttaaaatgttaatatataagagaaaaatattggagaaaacatgtttgagtgtaaaatttttttcttctgaattctgattgttctctttattttttccacaatattttattattgaaattttcagacmtacagaaaaactcaaagaattgtacagtgaatgccagtatactcacttcctarattcttcagttgktaatattttgctatatttgctttattacaatctgtccatctaatttttttgtgcatttaaaaataacttgtgcatatttgtccatttcaccccaaataccagtgtgatatatwggtagagttatcaacatttgcttaattttcattttttaagataaaatttatgcacaattttgcataatcttaagtatattacttggtgagttttgacaaacacatacatttatgtaatcccaactcctgttaaaatatagaacatttccaccactccagagaattccatcatatctgttcgcagttcagtcttcatctctatcctaccctcagaaataactattatactgattttattgattgattgattttttatcatagatccatattgcctgttttacaatgtcatatgaacagagtcatacaggatataacttttatgtatggcttctttcactcagcctagggtttttgagatttgtccacgtagttgaatgtgtcactgcttcattcttttttacttctgagttgtatttcactgtttgaatataccacaatatatttatcctgcatgaagttattaggacagtgctttagtcctgaagtatttcagaggtattttcaatgactttgaactacataattgtgaagctgtggctgttgacattttttggtcagaaaatcattaagcccaaataatcattaaaatctggtggttctgagagatttgggaagcacttgtgatctttgaaaggcctccagttaatttgtggtcttggctcttatttgacttagtgtttatattaagaccgtgtctctaaatttatatgtttaatctgagttagtaataaaatacttaatagaaatcacatgtactttcattgttttcttattaagtaagtgttgttctcgtaaaacttgcatatgtattgacaaataagaacaggtgaggatattgtccaaggtatttttgttgttgttttgtcttttgagatattcattgtttttaaaaaaattattaaatattgtatgtatcatgtacagtatgatgttttgaaatatatatactttgtagaatgactgaataaagctagttaacatatgcattacttcacataccacttttttgtggtgagaactctcaaaatccactctcttagcaatcttcaagaatataacacattgtttattaatgtagtcactgttatatactggatctcttgattttattcttcctatctaactgaaattttgtaccctttgaccaacatctccccaatccctccttccattatagcccctagaaactatcattctccttctgcttctgagttcaactttttaatattccatatgtaaataagatcatgtggtatttgtctttctgtgcctggcttgtttcatttaacaatagtgttctccagttccatccacgctgctgcaaatgacaggatttccttctctttagggctgtataatattccattgggtatatataccccacagtttatttacccattcattgatgaatacttaggttgattctatatcttagctattgtgaataatgctgcagtgaacatgggagtgccatcttgctgacatctgaactcaggttgtttgttactttgagataacttcttggtcttgttatagacaattatcttaatttactttttttttttcttttctttggagacggagtcttactctgtcacccacactggagtgcagtggtatgatcttggctcactgcaacctccacctcccaggttcaaacaattcttaaacctcagcctcttgagtagctgggattacaggaatgcgccaccatgcccagctaattttttctatttttagtagagatggagtttcgctgttttggccaggttggtctcgaactccggcctcaagtgatctgcctctctcggcctcccaaagtgctaggattacaggcgtgagccaccatgcccagcccttacttttaagaaacccttcttgaaaactaatttcagcttctgaaaaattgaaaaattgttgtaaattagttttcttttaatttaaaaacatttcttcttttgtctgacaggccatgctggttgatgtgtacttcctgtgcttgaatagattaataaataaatcagctcttagtcttcttaagtttttctattcacccagtgcttcttaaattcagaatattttaaatttttttatcataatcttttttttttttctttttttgacagagtcttgctctgtcacccaggctggagtgcaatggcctgatctcagctcactgcagcctctgcctcccaggttcaagtgattctcctgcctcagcctcctttgtatttttagtagagatggggttttgccatgttggccaggctgatctcaaactcctgacctcaagtgatctatccacctcggcctcccaaagtgctgagattacaggtttgagccaccgcgcctggcctcttatttttggaccaattgacagcccttcttttagtcacatatctgatacatttaatcagtgtttagttctctgatgacttgacgtattaaattgtattttattaaaaatttcacattaccaaatgattggatcactcatattggtaagccttttataagtagagttggcttgttttgatttataactaaagatttatcatatagctcctcaggcagttgtgataagtgaaacactagcaataaaatgttttgatttgatatacgtggtatatatttgaaacctcctctagatgtcactgttgtcctttattttctagtttcgtagcctatttgtactaagttcaagacctcatgtaatcttagttgtacttgtttttcctggagaatatatattcaagaactctttgatgcatttttgggaagtgtacatattcatatgaaatttctaggtatctgtattaaagatgttttgtattctattgtaaattttactgacattaaataaggattttgagaagttaacaggagaaactttaagcgatatttggaccttgtaaaatacttttaatctagtctttgcttctattatgtcatctaagtgctgaaacattagccatatagaaaaagagctcttataggtagtctcttaattttttctaagtgtgtttatatttctatttagtgaccacatagcctcatgagaccagtaatacaaaatattatcaggtgataatgtgagttgttttcctggaaaacttaatgaacatactacttttctgccatagttctcactcaggaactacaatttttggatgttgctttaaattgttagtgcctagcttttgcagctcgtgatatgaatacttttatcttttaattatacatctttgtatgagatttatactgtttacctttttttctttctaagttaaataggagcctgatagcactttgctttttaaggaaagatgaagcagatcatgattttattttttctgttattctaccacaatatctaaatatataaaaaaaactttgctgcttctgactcatatactaaaacaagttattaaaatagtgtgaatttttatgaggttttcagagtcatcatttcattagttatagtactgatttaactgagtggaaaatccacctaaatcttttttatttttccgtggatgtttgcccactggagggtgtagtgtagtgtgtattgaaatgttttaatagattttcctttttttttcactagaaattatgaatttgtttacttgagatgcttattttttgtaattgttgatttgaagtagtaacttaaaaaatagtctaagttgagaaaagcatatagctgccttatttagcaataaattattctttttctatcctatttattttccttcattttagttatgaagcatgtattgtatctagatctttgttacttctattgataactctctacaaaggcatcagacccttcctttaataccctagaatgtgtattttaaccactatacctgaggacttaaattgaactttctgctgaatagtcacaagatactaaaactggatttggccaaacagaatatttttaatgacaaaattgaaattatttatgcttctcgttctactttcttgtattcaaaatatcctattccacataaattgaaaaccaacaatttaagaacactttataagatgtttgcaatttattgcttctacacaagagactatttctatatagaagtgataatttagcatttctgagtctacactgtctttctttgcagaatgcttcatctcagttgggttacttttgtgcatgaattcatgttattcaagagaaattttcaaatcaagatggtagtttttaaattcttaaatcccttgcgttttagcattatgttttgatttaatgttgttcttttcttttgctctcagaaggaaaaataatgtgtgagattttttttttatcatttagagcaatggaccaaagaacattatattttagatgtgatcattatagcattttagaaaatatctctagctgaaattcaaggatacttaaagtccttttcagtttgctaactagttattgttgtttttaaaaattattgtagaatattttgtacttaaatatgaaactaaagtgttttttagacacactgtgacagttctcaaattatttctatattgttatatgagaaacaacttgttaaggttaagtagacactttcagcatatgtgaaagttgtcctttggtttattgcttctaaaatttgtggccatgaaaggataaaatattgatagagcacaagagcacaagatcgagtgcttaagtgaattttaagctctgtttttgtcttcagataataaagctgttaccaagtgattttttttaaaaggaggcttgaaataagtcttcagtgttagagagagctgtaatgttttcccatggtttcatgtggcctttcgctctctacttgtgtcttatttcagtagcacaaccatgtgagtccatatatggtactttgacagaagtggttagtatgtcagttcttctgataaaataatatttcctattaaaatttgagttcccctaatgtatgtgatagagtaagaagatgcagacaaaagttctggctctatttgttgatcccaaaatctacttatatttgctttcttatgaggggcctattttaaacaatttgatataaagtggaatggcttaggcagtatctataaacataaattggtttgataagacagaaagtgtaatttatcaagtctttggaaaaatagtttttgttgaatttagctagtttaaaagatttttttaaaaaagtagtttcataactaactttagttcatctttgaagtcattgtagaatgttttggtgtgatacacataatttttaggccaaaaaatgttaccttctaaccttctctaaaagcaatatatagaatttttgaaaacttttatttattattgtatgcatcacttatttccaaaatggagttgaggtaactatgcatttggggcatatttccttttggaactaaaatatgttatacagaaaagtaacatctgtatttttaagaagaagtatcatctatattttttagaaacttaattgtatcttgtttttgtttgaccacaaacttatactatagattatttaagagatgtagtctggcatttcatacaaaacagattcatgctttattctgtgaataatgctgtagggcctgctaagtgccaggtactgtgttagatactggggatacaataaagtcacagtttctgcctttgagcacttcatagtctcatggaagagatatgcaaaaaattctcagttgccatttagtatagtaagtacctggaggtggctatgggaacacaatattgttttgtggtttttaaagcccagtggtttaaaaagctgaagaggttgatggttcaactgactgtttaggataaatacaaagcctattcaggtgcaaaatcaagtggaggcattctagcagggtcatgatgtacataaaggtatggaagcacagtagcatggtatagtgacagaagtgcaagtaattcagtctgccatggaagctggataggtctgagggagtggtaagaaagactggagaagtatttattcattcaacacatatattgtgatgtaacatggttcccatacataagtttacattcttgtagggaaataaatatagtatataattgtttcagtgaaaatgtatagtcagattgtacgtaatggcagacattaaatgaggaaacatcaacacagcttaatcatgggaatgggggagctggagcacctagagaccaggtagatataatattagccaggtaaaaattacgaggatttaattaaggctatggcagttgggttccctatatttgaaataaattaaaaggacttgtgactgattgctacctggggtatattcagaatattgggtaggatttgaataagcagaaaggggcatctggaattctcagcttaggcaactggttgaaagttggcatttactagtaatggcmtacagagaaggaacattctgagggggaggggcagagagaaagggacttagataatgagattaattttggtcactgatatctggtatctcttcaaatggagggattttcagtaggtagtccatggatagtagggtatggtatatggatctgaacctaaggaaagaagtctgggttagagatacagattttggaatcatcagtgtgtaaatagaagcttagatatgaaagaagagtgctagggctggaaccatgaagatgccaatattcgagagttggataggaaaaggttatccagtgaagaaagctgagaggaactctcagaaagatgagaagaaaattaagagaatatgttgtcatattctcatatgaagtcatataaagtcaggattatctaggcagatagggactgaaacacttcctgtatttcatgttttaataggcagtttacttaatgtaatttacttaatgcaattctgaactaaggtagttcttaaaacttgtttaagcactctttggagtaattgtttytaaatttatagattggggactaatgaaatgatttaatagcaggaattctatcttttcttattataatatttgtgccaaataagatgattctgaggaggattcttgtttggtttcataatgtgttgatttggaaggttctgtactgctaatgcgtacttaaacttagaagttgatgaattttctttcaagagcattgtcctgtaaggtcacttttttcaagtgatcttttgcagcagttatagaagacctgcactgtttcttttaggcaaagtggcaatggtaacagcctagggcaaagaagacaaaaaacccacaaaatctaaaaaccctttatttaaccatatgacaggatatgattcaatagaaatatgcattttacttatgaaaatgaaaatgacatggttttagaaatgcagattatcaatccctcttataaggaaaacatactgggaatatagcctgctggtcagagcaggggtgagcatttggctgagagcctagcatagtgtctgaaacagtaggcatttaattaaaaagttgttaaataaccacactgttacaggaccccaccacttacccaaacttgttaacctttgggtcggggatttccacactatagtcccttcagtggtcgccagaaagatgttacaaggaaaggggtcccaatccagaccccaagagggggttcttatatcttgcgcaagagggaattcagggcaaatccataaagtgaaagcgagttttttaaggaagtagaggaatgaaagaatggctactacatagagcagccctgagggctgctggttgcccatctttatggttatttcttgatgatatgctaaacaaggggtggattattcgtgcctcccctttttagaccatatagggtaacttcctgactttgccatggcatttgtaaactgtcatggtgctggtgggagtgtagcagtgaggactaccagaggtcactctcgtggccatcttggttttggtgggtttgggccagcttctttactgcagcctgttttattagcaaggtctttatgacctgtatcttatgctgaccttgtatctcatctggtgacttagcatgccttaaccgtctgggaatgcagcccagtaaatctcagcttcattttacccagctcgtattcaagatggagttgctctggtttcacacgcctctgacaataccagaagttcataggcttgccattgacccatgcttgtgtagtttgcttcaaagagattatctgggcaaatcagattccctgtctcagacattttaaaaacttttttaattgcaaaaaacatataccacaaaatttaccacctgaaccattttttatgtagttagttcagtagtgctacatatatggtattcacgtggttatgaatacacatttccagaacttttttgtctttcaaaaccaaaaatcatagtcattaaataacaactcccagtttcccccttctccaggccctggtgagcactgttctagtttttgtttctatgaatttgactgctttagatacctcatataagtgaaatcatacaatatttgtccttttttgactagcttacttcacttagcataatgtactcaaggttcatgttgtatcatgtgacaggatttccttttttttttatttaattttttttttatttattgagacagtgtctagctctgtcacccaggctggagtgcagtgacgtgatattggctcactacaacctctgcatcctgggttcaagtgattctcatgcctcagcctcctgagtagctgggactacaggcacacaccaccatgcccggctaacttttgtatttttagtgtagacagggtttcaccattttgggcaggctagtctcgaactcctgacctcaggtgatctggccgcctcggcctctcaaagtgctgggattacaggcctgagctacctcactggcctccttttttttaaagaccaaagaatattcagcaggtgcaaaaggtatgtatttcattttgcttatctattcatctctcagtggtcacttgggttgttcccacctcttgcctaatgtgaatagtagtgctgtgaacagtggatgtacacttatcttaagatcctttattcagctcttttgggtatatatgcagatgttggatttctggattacaagttagttctatttttaattttttttgccttagaaatttaactcagaagaaacagaagcaaagttagcatcggcaagatctgatactgagagatagtgatatggaaaagggtgggtaaggtgaagggccatgtgcaaactgaagttataaagtagaagagtacaactataagatacgggaagacacagaatggtgtagaatgaataaaatagatgcgagggtagatacataacaaggagaaagaacaataaacttgagcaagtggctggggtctcttatagtcttcatttactgacctctttcatacttgaccactttttcctgagttccatggacacatgcacacacacacatgcacacacacacaggcacacacacaggcacacacacacacatgcgctgcacgcacgcgcgcgcgcgcgcgcacacacacacacacacacacacacacacactattcagtatgtcccctcatcctgtggtaagtttttttttttttttttgagatagagtctctctccattgcccaggctggagtgcagtggcgcgatctcgctcactgcaagctctgcctcctgggttcactccattctcctgcctcagcctcccaagtagctgggactacaggcgcctgccaccatgcccggctaattttttgtatattttttttttagtagagacggggtttcaccatgttggccaggatggtctcgatctcctgacctcatgatctgccctcctcggcctcccaaagtgctggaattacaggtgtgagctaccgcgcctggtgtggtaaattttgcgtaaatatttctggcgactaacatgttgctgattaaaacagtagtaatcaggctgggcacggtggctcaggcctgtaataccagcactttgggaggccgcagcgggcagatcacaaagtcaagagatggagaccatcctggccaacatggtgaaaccccatctctactaaaattagaaaaattagctgggaatggtggcgagtgcctgtaatctcagctactcaggaggctgaggcaggagaatcgcttgaacctgggaggcagaggttgcagcgagctgagattgcaccactgcagtccagcctggtgacagagagagacttcatctaaaaaaaaaacacacacacacacagtagtaatcagctgaaagtgctgcagtaaatcttgctgaaactacctgctgaagcattttatcataatttaaaagtatatcttaatagaggtgagcctagtcaggaaccttttttttttttcagcctcatgttttacatgtgaatgaagaatcaatgaatcttcaagtctcaggataaaggaatgagaatattgaagcagaaactgcaaataaaagacaatgcatacttttctgtgtccatttctccttcataaaggaattaagagaattcttcctacaaggatttgtagatatttgggaatctttcctcttgtatttgaaattatagttgatggtacaaaacagaaaccgtagcttagccatctcacyacttttttagaatctgttgcctactttgtaattagatagctaattaataatgataattagctaattggatggcctacagctagtcttgatttcttatacttaattaagtaggacagaggcagtacgtagaggaagctttctaagcacttaccatgagaaaagatctagatttagactaagtggtaccataagtatgaggcaatagtagggaaattgttcagataatatgttagctatctattttaatctttattgagcctaaagtctttagatttaatcttgttccaaattaacatgtttcctgagtagctatgtgaattttctgttacttatttttgataatgaaaagattaaattcttgttctggttcttatatatctcctaagttcccattctttgccactacataaacaaaacataagggcaagtccctcatattgaaaatatataatcttctctgaatcttcttcctcatcagtcaggataaggtttcttagggtttgcctggcacacttagctaaaataataatagtatttatagtacactggcaactgctgtttttcctacttcttccctgagactgtatatatgctgctaaagaaatgtgatttttataataaatgagtatcccttttttttttttttttgagacagagtctcgctctgttgcccaggcaggagtgcagtggtgcaatctcggctcactgcaaccttcgcctcccaggttcaagcgcttctcctgtctcagcctcccgagtagctgggattacaggtgtgcaccaccacacctggctaatttttgagacgggttttcactgtgttacccaggatggtctcaatctccggaccatgtgatctgtgcccgcctgagcctcgcaaaatgctgggattataggcatgagccaccgcacccagcccccgatattttttttaaataggaaaacctccctaattttacaatagaaatcaatatagttatttataattgaaacttataaccagtaacaacaaaaatactattttattgtattagtatatctattttatctgtgagaacaactaaaattagaaaatacgcggattccacctctgtaaactggttaggctagtgttattttactaatttttaaatttagttttttaaattgacagaaaattgtgtatatttatggtgcttataatgatgttttgatatttttatacattgtagactgactaaatcaagctaattaacataggtaatacctcacatatatgtcattctttgtggtgtgaacgcttaaatctgtcttagcaattttcaagtatacaatatattattattaattgtactcatagtgatgcacagtagatgacttgaacttatttcttatgcctcaccgaaattttatgtccttcgaccaacatctcccaactgtcccccttactcccagccccaggtaaccatcatcctactccctgcttctgtgagttcaactttagattccgtgtataaatgagaagatgcagttcttttttcactccaattttttaaaatgttacttaaaatcatattttctttaacatacagtttttcaattttgtaggagttaacctaagtaatcagactatgtgaaatcctctgaggttgactaaaaggtactctgcgattatttaatagatagtgtccttagactaaattaaatttttcaggaaaattataatattcttcaaagtcctgttggctccttctctcatttcacttaattatggtgaatctggccaatccatatatatagtttatatagaatgtctctttacaataactgtatgcaataataactatgtggctgttggcttattcctctaactgcatgaatttttcatgaattctttgagattcatgaaaaaaaagaatagttctttaaaaattactgcatccattttcattgtatactaagtactatacaggcctacctcattttatgcttttcaccttattgcactttatagataactgcattttattacaaattgaagctttgtggcaactgtgtcaaggaagtctattggcaccattttttttaacagcttgtgctcaattcctgtttctatcacattttggtaattctcacaatatttcaaaccttttcattattattatatcttttatggtgatctgtgatcggtgattcttaatgatactattgtaattgttttgggacgccatgaaccatgctcatataatatagcaaacttaattggtaaatattgtgttctgactactccaccaactggctgcttttttatctctttctctctaattgtgttttcctgttccctgagacacaacaatattgaaattaggccagttaataacctaattaattggcttgattcaattaggcctctaactaatgatgatggtctctaactatttaagtgaaaggaagagtttcacatctctcactttaactcaacagccagaaagaattaagcttaatgaagaaggcatgttgaaagccaagatatgctgaaaactaggcctcttgctccaaacagcgaagttgtgaatataagggaaaagttcctgacggaaattaaacgtgctactctagtgaacacatgaataataagaaagcaatacagccttattactgatatggagaaagtttgagtagcctagatggaagattaaaccagctacaacattcccttaagccaaagcctaatccacagtatggtcctaattctcttcaatattaggaaggctgagagaggtgaggaagctacagaagaaaagcttgaaactagccgaggttggttcatgaggtttcagtgaagaagccatctgcataacataaaagagccaggtgaagcagcaagtgctgatggaggagctgtaggaagttacccagaagatctggctaaaatagttgatgagggtagatacaccaagcaacacattttcaatgtagacaaaaagccttctactggaagatgccagctaagattagagaggagaagtcaatgcctggcttgaaagcttcacaggacaggctggctcttttgttaggggctgatgcagctagtgacttcaagttgaaggcagccctcactattctaataatcctagggtccttaagaattatgctaaatttattctgcccatgtgctataaatggaagaacaaagcctggatgacagcacatctgtttagagcatgggttcctgaatattttaatcccactgtaaagacctactgctcagagaaaaagatttatttcaaaacactatgcttgttgacaatggacatagtcacccaagagctttgatggagatgtacaaggaggtaacacaacatgtattctgcagcccatggatcaaggaataattttgacttccaagtcttatacatttctttaggcattagctgccataaatagtggcaaatgatctgatggatctaggcaaagcaaattgaaaatcttctggaaataacttaccattctagatgttactgagaatatttgtgattcacatgaaaaggtcaaaatatgaacattaacattagtttggaagaagttgattccaagcctcatgaataactttgagggtctgaaggcttcattggagggagtaactgcagatgtagtggaaacagcaagataactaccattagaaatggagcctgaaggtcaggtgcattttgggagcctgaggtggaagaatctcttgatcccaggagctcaagaccagcctgggcaacataacaagacccccatctctacaaaagaaattcaaaaaaattaactgagtgtggtgatgcacatctgtagtcccatctacttgggaggctgaggtgggaggattgcttaagcctaggtggcggcggttccagtgagccatgatcatgccattgcacttcagcatgggctacagagagagaccctatctcaaaaaaacaaaaagaaatggagcctgaagatgcgaccaaattgcagcaatctcattataaaacttgaacaggtgaagagttgcttctcataaatgagctaagaaagtagtttttagtgtgtgaaggtgctgtgaacattcttgaaatgacaacaaagaatttagaatattgcatcatcttagttgataaaagaagactgactccaattttaaaagaacttctactgtcagcaaaatgctattaagtggcattgcatgctacagagaatatttttcatgaaaggaatattgaataaatgaggtaaacttcagtgttattttaagaaattgcttcagccacctcagcctttagtaactaccaccttaatctgtcagtagccgtcatcattaaggtgagatactctgcctccaaaaaaaattacaacttgttgaaggatcaggggattgttagcaatttttagcagtaaaatatttttttgtgaggatatgtacattgttctttagacataatgctattacacacttaatagactacagtagagtgtgagcataatatatgcactgagaaaccaaaacattgtatgactgactcactttattgtgatactcactttattgctgtggtctggaaccagacccacaatgtatctgggatatgcctgtacttattttagatataattgctaaaactttaaaactttatctcaaagttgtattttcctatttataaattagagcaaagaggtattacacacaaaacttgcataagaaataactgagatactgatagtttcagttattcctgtatctttggactattcctccaatggttgaatttcctttttttttttaaattggggctgcttgaaaaacatacatgttctttagcaattttgaatattattctttggcagcattgttttagaaaattgttttcatagaatttcttcttagtatccatggacctatattgagggaggtggttgggggagaaatatgtcagcgctgtcaactaccagtagatggtattagtagttgcttctatagttaaaaatcgacacatgtgattaagtagacttaatgatgaccctttggaaatgaatctgtaagtagaagaatctctatactgtgtcagaaccagtaatgatacccacttcgtgttgactgtcaggaagcttagaaccaaatttgtgacccatgtggtaacaattgtatatatttatttctatacactaatcttggccctcagttatttattttgtcatattatggcatatttcttttcagggcccacaaatctttgatggctttggttagcacaaggacattacctgtcttgatcatcttgatcactcatgtagctgagtacctaccacataggtgctcagttaatatttgtgcaatttatttctgcagtggcctttgatatttattttaaagatagtggaggggcgtccgttttagctttactgaggaaaagaatccaaggcagattagttctaaaattgattcgactctagcagcctactttctgatataagcatgtgatcttagagaagataataatgactaaagggaatgtaatatagctttggggaatatagggcaatcctaatttgcctcttatcatagcccagaggttatgagctctggctaaatatgataagcaaggtactttagggaataaagagagactgaggaatgagaagaaatctctttctgccttcactgttctaccttagtatttaggtagccacttcacatttaagataataaaagggtaaaagttgagtcaaagttactgtcagccagtttgtaaaatctagttgaacaataatctcatcaatttaaaaattttatcatttctctgaggaaatttaatgaaaggcattgagaagtgttcctgactttaagaaacttattgtgaatgaagagttgccttgtgttgagagggaattgtctctgaggaaatttaatgaaaggcattgagaagtgttcctgactttgagaaacttattttgaatgaagatttgccttgtgttgagagggaattgtctaaggcagatatggaattcaaatttgaaacttttctgttgaccaggttcaggattatcggtagcatggaattatcatgactcactgaactccatttaacctgaagttatagtcatttgaaacttgctgatattcccccagagtcatattgtactcgccattgaacgcagagttctctaaccttggcttacagacggaaaaacccagtctgtttcataacctgcaatctgggttttaaatattgttttcagagtaggacagaagggtgagacctaagccaaataaaggaacatgtttctagattgtctttgccacatgctgctttaatcatggggtttggagcctgtcagatcagagttggaatcttggtattatcacttccttgagagagagtacaatttctctgttttttctgagcctctgtttatttactttaaaaaatgaaaattacaatgcctgtcttgtttgggtggttgtgaaaattagataagcagtgtaaaaacatctaccatgaacctaatatgtatagattcttagtcaatataactttacgcccatccatactacttttctctgttagctttgtaatggctgcttgctttatccttactcgtacatgactgtacaaggttggaaagtgctagataaatgtgtcttatgtatattaagacatgctcaagttatggaaaatggataggttgtcttggattcaattccttactatcagatctaagcatgaagtgttttttttaaggttgatatttggcatttcgatatcagtgttttctctgttgcaactggacagagagaacaacctatgtaggttatttggatttttaaaaaaattattttaatgaaatttcccctggcattcgagtagatatacagatttaattctttgaaactacagcatcagtggcattattttttgtggcatatgtaaagcaagaatttagcaattttaagcttcctagtatttagctaataacttcacatactggagcacatctttatccgttgtgtcaaaatattagatattttctaaggtaatagttttactaacgtggatacttcctttgattttgttctctgttcttgaaattgtttgtgcttatggaatttattttgttatatttaaaaaagtaaagctgactttataatatggatgactttgaattttacttcttagcccttatactttctatgcaggatgtatttttaaaaagaaatacaatatttacaggaacaaatttatagagtagggagtataaatgggcattttaaaagttatttatatacatcttaactgccatgacttttagccaagccagtattttcaagaaagcgctgtctatcctaattgcacaaatatttttgcagacttttccattaagcagtgaatgaagccctgaaagtcactgtagccaatgtgaaggcagaggatttgagagtagtaatggatttttagaaatgcttagggtgcgctcctgtaacagggcatttgcttttagggcagtttggcccaacaattgaacaaattagttatgtttgaaaatttataaagcaaaagcatagataatcataatataatttttgctagaacatatgttaagttggcttattagatcagatcgttttttaaaattacagtatgaaaaagttattcaacttattttaaaaattcttctttgcaaagaaattgataccttgatacccatggcattaagacagctttttacttctttgtgggctggcataatggacagacagtactttagccttggaaatcaggagtattgacgtgtgacattttagatgagtatgtgtgtatgtgaacaggtacatgtggatgcaagcatgtgtgtagaagatcacgtatacattcatatatgtgagagtgcatttgggttagaagtgatatgaaaaaaagtggagtattgtatcttagtaaacttttacttcattaatctccttcaagttgttgatcattaataattggatattcttttgtagaatggctttggaacttggcagtattctgtaatccagttttacaagatgacatggggagatgaccagggaatttactcatattttttttaggccgagtgatgttgatagaccacagtttggcaaagtagacagatctggtttcagatcttagttttgctacttactagctgtgtgaatcttggagatatatttggctcttttgaaacctcagtttcctcatatatagaataggtgaacaatgtctgtcttattggattccagaaagaattaagtaggataaagtttgcaaagtacttattcacattacctggtcacatagtaaacagtcagttaatgcaaattctctttttgggtgtgtttttaaaaaaataaataatattttacaacttaagccttttttgaatatttgaagtaaaatgcaaatttatttttacattagcttttggagagtattagtgctttctgcatcttgggagaaatcttattcttttatttagttgtataaacatataagcaaaagtaggcataatagctgattattgttttaaaaaaaaacttccgaatgtttatagtgaacttctataaaatgaaaattactctgtgcaacttatgtggcataatttacaaatcagttcaatttggggaaaatataatttatatcaaataatataccaccaatttgggggaaattatattactatagtgtaatataattatagtgtgttattaactatagtgtgtcactaagataaactaaaaagcccattagttagccagtattgtcatgtttctgaggttaattggctgcattcagttataggttatgaacggtaccacttgaatgatccaccaagctatcaggcagaaagaccaatagttcacaagactaattgaccctgtcagtataatagaaacacttacaaataaaattctctttgcaaacaacattgcgaatgaaaaccccagaagaaactgttatgtcctgtaactgtcctggaatgctatgattcagttagcagactgtgggtggaggtgggtcatggtgggtgggagttggggggaaggaaatgcaaaggatagaaaggagaattttggagggaaattaatcagacaaaacgttagagagaaacacacattttttgaaatgattttaaccttcttgaatctctaaaaagtactgtctttaaatttttcatttttttacccttgttctgtatcttaagcccttttgttagatttgatagtcattgttgcattgagctcttttctgaaaggtaagaacgtatttttgtcaaacacattgctataatgagtatgatgtgtggctgccattcttcagtctttcttcatttacatgtatcatcaatataatgcaaatactgtcaagggcagcattatctccttgaatctattttttgttttgttttttagtataggtttgtatttgtgctggtgcaggaggaagggggaaagtgttgggaagaaacatagaaagagagaaagaacatttactttctaacaaattttgacaatttgtttttctctttttttggtaatgatcaaaattatatattaaagaacttcccaaagcaatatatcagcttttattaaagaaagcaagtattttcaaatgctttaagaaacttggtgaactctagtataagggtttggttttcaaagggaaaaaaaagaattttatctggaaacattttaggtaatatggatcctccagttaatctatgggaaattatgcagcagatatcagccttcatttgtaatactgtaggagggtgataactttcctgttgcattttctttttgtaaaagacatcttttactttgtcagaaaacaacagtcaagttgtaaatggtcttcaaaaatagtaataaaaaaagatttataatggaaagaattgatggtwtatttcacctmaagtaagaaagacamtgtgtrataagggattttgcggttttacagctcagtgcatgtgtttgaaagctgttctctcagcaacgtgggtggcaggttatgctaccatataatgtattgtagttggctctccacacttgtcagggttagtgttcaaccattcggaaaattttcccattgttctatcatgtgaaccaagactagtgtagaattcccaataacttacaaaaaaaggattaattagaaagtttgaaatttgattacttattgttttaatacagtactatgtattttagtattttatctataattagaattgttttttagtcaaaataatgtatcaaaatcaaaacttcatcttattttttaatagattttacagaaatttgtatactgaatcctgcctcttttttttgtattaacactgtttccatcttaagcattttgctttagatggaccatagctcttggcagctagtgcatttttagcaaataatactgtttctagtaagagttgcagagaaaaaaaaaaactttgtgtgaggtccttgtaaactgaacctttggaacattactttatttcttttttcccctcttttgtgcttcttcgctatttgtgtaatggttataaattacatcgtttgaaaagaagaattaaaaacactttattttgttttttttttagacaattttttctttacctgttattttaaagatgtacagagaaataagcagttagggtattgaaattccattgtgccagcacctccagagcataatccaaaaaaaacagaaaaccgcctgctgggttgtctgcagtatgcttgtgtgaacatcagtgtctgctgttcacacatcattttttttttactgaaagttcctcttggaataaagactctgtgttttctgagtgtagtgaaacatttgttggttcttatatttttcratttgtgagggattctgtttataggataagttgtcatggctatatgttgcactaatgttattggcacatcaaaaaagtagagaaaaggcttgtgtatttatatactataaaataatgaaaaaatgaaattagaaagtattgaaggtgagaaattttgttgaagatatatgtgaagaaggattgatttaaatattgatgtttgccctttaaaatctattttatttataaagtatatcttggctggattatacatctgaaaatatcataaatgtcttgtatttcacttggaattcagattcttaagtatgttggcttcttgatagtattgttatgagttagtcaaatttttcaactgaccctacataatcaaggaacgttcaggaagtatatttatgggtgcttagaataatttttaatttttgattatgtttcatatcatttatttttactcttatgctactgagtatcacgttagatacaggcagcaaacttgtgaaatgtagtctagtgtgttggcagtctcaaccttcattcagattcatacagcatcaaaacaaaaaattatttaccagataatagggaacttaaggttaaaatttggtaaaatggatgttgtgatccacagtctccccaaaggtttattggaattattcaacattttttgtttttaactttctatatagaagttaataaaggaataaatatacatatctgaaactgggtttttaccattttgactattttttataaagatataatttcaggtttgtttgtctctgaatttcactctgagtttcttgatcaaaattcagatgcacgtttacatttcataattgttgtatgaatcttttaattattgtttcttgtggttatttaggataatattgctgtatatctggaaccagttaytaaattttagtcaatagatccaatagtcaatgaatgattcttgctcctcaatttgcttcttattagttgtcttattctctcactgaatccagaatatggaagagattgtcatctaagcaagacatatcttgcatatgccttctagaaggggaagtgaaagcaccaagtccttaatgtgtcagttttctaagggcctacgatgtctgagtttcttgattgccaagaagcctaattcttcacagggcaacctggcatacagccatttccacactgggctgttcgttggtacttgtgaatagaacaaaaacggtctttgctttttctcctcagttatcaatgattatcatttttggaaacaagttaaaacatttttctcaaaatgatgattattcatgtcaagatgaagtcaaacttcatgctatctaagctgtaagtaatagagttagttcagtattttaaaaattcatgtaaaataaaatttgttacttctcactccaaaatattcattttgtaaaatttcaccttaactattgttagacagatgttctagatttagctaaacacttttgaaagtaaattatgaggtgggtttttggctaatttttatacttctataagtaaaatctgttatatatgaattatgggaccactagaagtcatagatcctacaagcaaagtgtttgtgggtcattgggttggggagctacttcagttgttttttttaatataactggaggtgtatattggatttttacctctgcktagatctgtagtaagaactttgttcccattgtcatgcattatttctgtgcatattaactaataatataaaacaataagtattatgagactttcacccagttgaattagtttcttccttctcagtccccttcaaagttccacatctctttatagcatatgtagaattatggctttttgagttgtcggtatttattcacttgtacttatcttagaatatgttcttttatttttattctaggcatacatacatactttaaggttattacttcggtgatgttcaggattttggttgggtaattactttcaaatcctggctagctaggtcactagctaggtgacccttgggcagattgtataacctttctatgaacttcagttacctataaattaactataaattggagatatgatgttgggatgattgcaacaaatgttttaagtgcctggaacatactagcagctcagtgaatggtagctgaaaggagcaaagccattaaaatttgttatgtttttataggtcttaaaagcatacaataggctgggcatggtggcccacgcctgtaatcccagcactttgggaggccaaggcgggtggatcacctgaggtcaggagttcgagaccagcctgaccaacatggagaaaccccgtctctattaacaatacaaaattagctgggtgtggtggcacatgcctgtatcctagctactcaggaggctgaggcaggagaatcgtttgaacctgggaggcagaggtgcggtgagcccagatcgtgccattgtactccagcccgggcatcaagagcaaaactccgtctcaaaacacacacacacacacacacacacacacacacacatacacacacactaaaacaaaagcatacaatagtttgcttttctatataatctcatgaaattaagagttttcattacatctaactgtttatttctttgggttgttaaagatccaagagcatgggctttggagtcatctgctggagtttgaattcttgctctgccatttaaccatgaaccttggaatgttagcctcagatttctagtatctaaagtgaagattaaaagaatgtaccttggctgrgtacagtgacttacgcctgtaattccagcactttgggaagtcatggcaggcagatcacaaggtcaagagatcgagaccatcctggccaacatggtgaaaccacgtctctactgaaaaatacaaaaattaggtgggtgtggtggtgcgtgcctgtagtcctagctactcaggaggctaaggcaggagaattgcttgaatccgggaggtggaggttgcagtgctccaagatctagccactgcactccagccaggcgacagagcgagactgtgtttcaaacaaaaaaaaaagagtatacctcatagggctattgcaaggctggaaaaaaatcaatacatctatagttcttacaactgtgctygccaaagaaaaagtgcttccaaaatgtttattgttatttattattatctcatagaaaaggaaaaatctaaagcaagaaaacttgaatggagtcagccttaatcatgtctctttcatccactcctatataattcacactacttttcttcccaatctctttcagaattccacatttccacaaagcatatttagattatattgaagtcagaattgtrcatcttattcattacctacataggattgcgataaccttgcagtaagaatcgcttagctgtggaattctagtttgaaaataattttccttagaattttaaacacattttccacttcctcattgtttttattgtaaatgttgagaaatacaatgccacttttgatttctgatgctttgcatgtgacctatttttctctgtagaaagtgatgtctcgtcatcagaagtatctgttgaatttgttgcctgcttcttataggttttgccttagttagccttttttttttttttttttttttttttttgagacagagtctcactctgtctcccaggctggagtgcagtggtgcgatcttggctcactgcaaccttggcctcccaggttaaagcgattctcctgcctcagcctcttgagtagctgarattacaggcattcaccaccacacccagctaatttttactatttttaatagagacagggttgcatcatgttaggctggtctcgaactcctgacctcaaatgatcctcctgccttggcctcccaaaatgctgggattacaggcatgagccattgcrcctggctgccttagcttttttcttcttttttttctttgagacggagtctcactctgtcatccagggtggagtgtagtggcaccatctcggcactctgcaacttctgcctcctgggttcaagcagttctcctgcctcagtctccccagtagctgggattacaggcgtgcaccaccatgcctggctaatttttgtatttttaatagagacggggttttgccatgttggccaggctggtcttgaactcctgacttcaggcaatccaccyaccttggcctcccaaagtgcgaggattatagacatgaaccaccatgcccggccctagttagctttttaaccrtccttttgaatgaccttttatctattatttatttttattttgtagagatagggtctcactatgttgccaggcttgtctggaacttctggcctcaagctatcctcccctttacgcctcctaaaatgttgagattacaggcgtgaaccaccaggcccagtcataaaatggccttttaaaggcttcattgttatcagttgtttaaaaggtaggttggtgtccatgtatctttctgcttcaactggattttttttttttttttttttttgagacagggttttgctctgtcacccatgcttgagtgcagtagcgcaatcatggttcactggggcctagaccttctaggttcaatcgatcctcctgcctcagcctcytgagtagctgagactactggcatatgctaccatgctctgctaatttttgtgttttttgtagagacagggttttgccatattggccaggctgctctgaaactcctgggctccagggatctgcctgccttggcctccgaaagacatgggattataggtgtgagccattgtgcctcgccttcatctggatttttaaataagcaattgtttacttaatagttaaatgatttatataaaaagtgttttatagtgactttttggcattttgaatttatgatgcccccacctgtttctcagtgggttgtaatccagtggcatgatatcaaatagcctgttttcttagatatatttctgacacgtttacttaaaggctagttttaacctttctttcttttcaatatttatttactgttaaaatttatggtgatagggctgggtgtagtgactcatgccagcataataaaacatttaaaaaattatggtaatagaatgatagtgtactttttaatttaaaaattactcatacatgtgaacagtctaaatttctatatgtttgcataagattttctcatacctgccatacatacaattctgtttcatttttgttctaagataaaagatacgtttcaatatcatgtagcagcaaatcgtgatgttacctggagtatgaaggacttggaaaaaactaaacctcatggatagcatgaggagctccgcaactgtgttctggagtttctgttgggtccttagtgtttccctgctctccagagtccataaaacacacattcatgcatgcacacacayacacacacacacacacacacacacacacacacacacacacacacgttatctatttggtataagaaatagaacattatgagtatctcagttcctgtcacaaaccttcccctaccctttagggaaaactatgatccttcctttttatgttaactttcttaattgtctttatagttttaccactgtgaatatgtacctcagcattaattgagtgcttgtttttgaactcgaagtagtttagacttggtattgttaagtttctgcctttctttttttgttttgctaacttactaagtcatagttttttattttcagttatactaactttgagtttttgtaatttaatgtttctttttactacagtaaaacatgtatgtaggttaaaagcgtgaaagagctgggtatgatggcatatgcttatagtaccagctacttgggaggtgaagcagaaggattgcttgagcccaggagttcaaggccagcttggacaacatagtaagaccccaatctcttaaaaaaaatagtgtgaaatatttgcagtagcacttgcaacaatcatacttctcaccctgtcccacactcttgcctcactctttgggagcaatcctgttagctatgttagccaatttttgttaaaaaattgtagaaatatttactttcatatttctaaatgcatgtacgtagatacctgtattagatgtgtacaattctaaataacgtgtacgtatctatatttaaagctgtgatctaatcatatctgctataacacatcaggatttagctctataatcccattccttctctcatctacttcccttatcttcatcttactagtgtaggtttttgtggtatttgctgaaatcattatgcatgttttcattattatgatcgcataagtatttttatgcctgaatcataccatgtcctaatgcttaaattttttttaggcattattttgttttcctggaattaatactttaccttgtttcttaatttttaaaatgttggttaccaacatatgtctaaattctctgacagattataaactctttcttgaaacagcaatacgtaactctcagttccacattttttctgggtaacatccctcctggacttccagctcatctgctaccagtggaaggtccatcagaaaagcagagagtgctgaggaagaccaggggtgtatagtaagggatttactacagggattttacctttcccaagtagaagttggttaaataaattctgtaagactgttgttttcacatctgatgtaaacagatgagcgtgaagtccatagggcaggaagttgaaagtgaagatttatgtaaagtggtggggaacaaaaacaatctggaacctatgagcacaggctggaacccatgaagatgaactggaatcattcatgttcactgcctccaatcttgtgacaagtgtcctgcagaagaagttgatttcttttttcttagagctaaacactcacctgacctaggagttggagagcctgcaggaagatctaagggaatgagggtcagttgtaggcctggctcctgccccatgacaatggtgtgaagcagtagataatgacaatgtatatgatctataaaagcgcctgcttgtcttgaatgtaaaaataaaatggctgctgcctctcttttgctctccaaaatcttgagagcttgtttggggattctgtgagggaagcacagctactcgtatattcttgaccaaagagtggtcctcctctattagggagggtcgtcctctttgaccaagcacacagctttgggagagatgcacacagagcagtgagggaggaagttaataccaatctagccagctagatcagctgaaatcaactctggtgattagtggggtgacagatgtcgcagccggattgccctcacatcctgctttccaaatcttgcatgaaaagaactcttgtgtctcacctaaccagaattgtgggtaagggagtcttgagaaatgtactttagactagcttgagttgacacattacaaagtcgccacaggtgtccatgagaatgttcctctcagatctctgcccacaaacagtaactgactgatggctccagctgctgctctctgaaatccatcaccatgtttgttccaaggccatgcttcccacattctgacccagtcagtggctgagcacaacagggacactaaagcaggctcattcctgggagacgttgagtcatctgacagacagtttcatcagattttccttagaccggcactgcagcctaacacacatccacccagcctgccttccttccctgtcccctgggtcgaacctgcatcaccatctgtattagtcaggtttctcttagagggacagaactaataggattatatacatataatttttatcctgtatataggatattatatataatacatatccttgttataatatatataggatatgtatgtgggatatatayayacacacacacacacacacacacacayacatatatatatatatatatataaaggagagtttgttaagtgttaacttacagaatcacaaggtcccacaataggctgtctgcaagctgaggagcaaggagagccagtcagagtcccaaaactaaagaacttgcagtctgatgttcaagggcaggaggcatccagctcaggagaaagatgcaggctgggagcctaggcccatctctccttttcatattttttctgcctgctttatattcactggaagctgattagattgtgcccactagattaagggtggatctgcctttctcagcccagtgactcagatgttaatctcttttggtaacaccgacacaggcatacccaggattaatactttgtatccctcaatccaatcaagttgactttcagtattaaccatcgcaagtctaccccttgtcaacttgaacctatatgtatctgctgagatcctacataatcttcatataaagacaatattgggtcataattatgcctaacataatacaactatcyttcgtacaaccagaaatgcatcaatccycaacccaaatactagtacatacatgaagttaacaatacttaaatgctgatgtgaagtctgtaaatcttacgtcacttgataaaggaaaaggaaatamaatgaagatattttcttagtacaagtctatacatgcataaacatgtttttaacaaaagcagaaggaactcatgacagttacagtcctcatttctgcagctggtcacaagattgtagctggtattgatgactgccttcttctactacccgttctgtattccctttgccttcagcaagcacctcatcaggtcatggattttttttcctggtggagtgacccaaagctttgttcctgaagggtctgggtcatttgtagtcctgcctggattgggctgttgtagtttcccattgaccttaatcacagggcatagtaatattaagagatgtcctaatggatctcctgtattccatgcatattcttccttacttccattgtggagtagtagactgatttcatcttgatagtccaggtcagtcatcccagccaacactgtaactccctttttagcctattgacttaaaggtaagaggagcccaaagtgtacaggtggcaatcttaacttccagtttaatggaatcgttgttgtgtctccaggtggcagcgttcctccctctgaaactaagacgtctaggccagcagaacgtaatgtcgtgggaacaggaagcaaaaatgttgccagtggatcaccaggggtgatggtggtaccattttcacttccaccccttgattcctggaactgtgaatcctggctatgggagaaactgtaccatatattggaccctgattcagagcatacacagccttctggagaactttgccccagtcctgcaaagtattgtcatctagttggcattgtgattgtgacttcaaaaggctattccaccattctgtctatccagctgcttcaggatgatggggaacatggtaagaccagtgaattccatgagcatgtgcccactgccatacttctttagctgtaaagtcagaggcaatgctgtgtggaataccatgacaatggataaggcattctgtgagtccacggttggtagtcttggcagaagcattgcatgcaggataggcaaaaccatatctggtaagtgtctattccagtgaagacaaacctctgccgtttccatgatggaagaagtccaatataatcaacctgccaccaggtagctggctgatcactctgaggaatggtgccacatcaagggctcagtgttggtctctgctgctggcaaattgggcattcatcagtggccgtagccacgtcagccttggtgagtggaagtccatgttgctgagcccatgtgtaacctccattcctgctaccatggctgctttgttcatgggcccattgggcgatgacagtggtggctggggaaagaggttgtgtggtgtccacagaacgggtcatcctatccatgtgattattaaactccttctttgctgaggtcacttgttggcgagcactcatatgggatacaaatatattcagcttttgaccactcaagagaggcccatccacatacctcttccctaaatttcttggtcaccaattttccaatcatgattcttccaagtccctgaccatccagccgatccattggctacagcccatgaatcagtgtataattgtacatccggccatttctccttccatgcaaagtgcatgatcaggtgcactgctcgaagttctgcccactgggaagatttcctttcaccgctgtccttcagggatgtcctagaaaggggctgtagtgctgcagctgtccacttgcaggtggtgcctgcatatcatgcagaaccatctgtgaaccaggtcctggtcttctcttcctctgccagttgatcataggaaactcccatgaggccatcggtgcaggctgggggagagatgtcagggtggcaggagtggagaacatgggcattcgagccacttcctcatgtaacttgtgccttccggacctgctcgagcctgatcacgtatataccacttccatttgataatggaatgctgctgtgcacaacccactttatagttagatgggtcagaaagcgcccagttcatgatagtcagttcaggttgcatggtgacttgatgacccatagtcaaacattcagtttccaccaaagcccagtcaagagatgtctctcaaaaggagagtagttatttgcaaaagatggcaggcccttgctgtgaaatccaagaggcctccactgtgattcactatgggggcctgccaaaggctccaaacagcatccctatctgccactgatacctcaagcactattggatctgctgagttatatggcccaagtggcagagcagcttgcacagcagcctggacctgttgcagagccttctcctgttctggaccccactcaaaactgtcagcctttcaggtcactcgataagtgggctggagtaacacattcaaatgagaaatgtgttgccttcagaatccaattagacccactaggtgtcgtgcctctttcttggttgtaggaggggccaaatgcagcaacttatccttcaccttagaaggaatatcttaacaagacccacacaactggacccctagaaattttactgaggtcgacggtcccggaattttagttggatttatttcccatcctctggcatgcaaatgtctcaccaataagtccagtgtatttgctacttcttgctcactggatccagtcagcacaatgtcatcaatgtaatggaccagtgtgatatcttgtggaagggaaaagtgatcaaggtctcttcgaataagattatgacacaaagccagagagttgatatacccgtgaggtaggacagtaaggtaaattgctggccttgctagctgaaggcaaattgcttctggtgggccttatggacaggaatggagaaaaaggcatttgccaagtcaatggttggataccagataccaggggatatattaatatgctcaagcaatgaaaccacatctggtacagcagctgcaattggagtcaccacttggttaagcttacgataatccactttctccaggatccatctgtcttctgcacaggccagatgggagagttgaacggggatgtggtgggaattaccacccccacgtccttcaagtccttgatggtggcactaatctttgcaacccctccagggatgtgatactgtttttgatttactatttttctaagtaaaggtagctctattggcttccatttggcctttcccaccatgatagttctcaccctaccagtcagggagccaatgtgggggttctgccagctgctaagtatgtctatgccaattatgcattctggcactggggaaatgaccacaggatgagtctggggacccactggacccagtgtaagtcagacctaagctaaaactccattaattacctgacctctgtaagcccctactttaactgctttaactggaggaccgaaatgactctttgggtcccctggaatcaatgtcagctcagagccagtgtccagtagtccccaaaatgcctgattatttccctttccccagtgcagttaccttggtacaaggccagaggtcttcttggggaaggatgggagaaagattcactgtataaattgttgstaatgtagtggggtccttccccaaggggacctggcctctccttcattcaaggggttctggtctgtaaactggctcaagtctggaaattgagaggctgtgattctctgtttttataattcagattagtcctttgtccattcgacctagaagttttctgtttgtataagttaagtaggaatgcagtaggcttcctatcaatttcacttctaggaacaccatgattaattagccaatgccaaagctctacacaagtcagactattctgattgctgctttgcctctgctgtccattacagtagctatgcctaccttgcctttgatgattgagtgctgccacttagcgcctgccaccttgggattcaattattcccattttatttaaattttgtagttgagtgaccgtggttctcatcgttagatctgacatacagagaagagcaattatagggctcttcaaaaatgggggtgctgccctcacaaatctgttttgcaaggcattggtcaagggtatatcttctggaccctcccagctgggatgagtaggtctaaagtgactaatccactaccccatcccaatctccctaagcttttggatcccttcctctacattaaacaaagggagatcaggtatttccacctctctcacagtgggccattttttaatccatatttcagctaaccaaggaaataacctattagaaccttttttaactccttgagctgcaacattaaaagcagagtccctacttactgggcccaaatcaataaattcagcctgatacaactcttatgttccttccaccattatccatacctttaatatccattcccatgcttgttctctagatttctgtttatattaattagagaactcaaacagttcttttcagttgtagtgcacctcctcatggatcacactctcaacttcacctccagggtcctgccaggactttagtctaattataggtctagaagcaaacaagggtgtcgggggtggctcctgaggagaatcaacattttcttgcctggcagctacctcagatcataactgttgcttcaggcagcacagggtttatcttctcagacaaaggtggaaagactgatggcagtgtgggtcggggaggggatgttgccactactggggatggtgaagctctttcttctggcaaaaaacctcatcagagtttacgaactcagtgtccccagcttcatcagagtcctcccactcttcctaattccaagtttcagggtcccattcttttccaatcaatgccctcactttaacagtagacacctggcgaggctgtacatgcatctttcgttgcaggtcagccactcacatggtaagagattgtgtctgtttttccacaatttcagctttttctctacaggagttaagactcccacttagggcagtcttagcagatttgaggggttaatacctgcttctgaagccaggagttagaatccctgagttcatcattttctttcatcactttgtccactgaacttaggagcaaccaaccagcttcattatgttccttggttctccacatatggtcaaaggtattatgtgtagtgtcattaaactccttgccgctcaagagtggtgaatcaagtgtcaaacacatttattttgcataactctctaaacagtttacaccaaggactatcagtattttccatactatttgaagtagagtccttagcagttttgggtctaatcatattaagcagccaactccagaaacctcaaaaccaatgaaacaaccccatccttaatattctgttcctctagaaccactcctggtaccaaaagctgtattagtcatggttctttttgagggaaagagctaatgggagatatgtatatatatgatatgagtttcttaagcattaagttacacacaaggtaccacaataggctgtctgcaagctgaagagcaaggagaaccagcccaagtctcaaaactgagcaacttgggagtcctatgttcgaaggcaggaagcatccatcatgggagaaagatgcaggctgggaggctaggctcgtctctccttttcacatttttctgcctgctttatattcgctggaagctgattagattgtgcccaccagattaaggctggatctgccttcctcagaccactaactcaaatgttaatctcttttggcaacacacacacaggcacacccaggattaatactttgtatcccccaatccaattaagttgacactcggtattaaccatcacaccatctaacagctctttcagcttcccctggctccctccccattttctcttacagatatttcccctactaaatttcttgtatttctaaccctgtcttggtgtctgcttctcagacacagctgtattcttaagacatccctttaagatcatcctgggaatttccttcactttttcttttgggagacctcttatttctggatcccaggtcttcatcattcttggtttacttcctttattggtggactacatcctccacatgggaggtaaattgttgaaaccttgcatgactgaaaactttattttaatctcaccctcaagggatgatttggctaggtatggaattctagtttggaaataatttgctctcagaattttaaacacattctccattgcctcatagttttggcgtaaatgttgagaaatacaatgccacttttaatttctgatgctttgcatgtgatctatttttctctcaagtagcttttataatctccttatccttgatrttctgaaaattcatgatgctgtgccttattgcatatgtgtttcctttattgtgcagggtgctcaatggtttctatcaatttgaagatacctgtccctgagtcctggagacactcttgtgttctttgatagtttttaatagttttctctgtgctctctatctgaattcacatttattagctatgataacctcctgcattagacccctaattttctcattttctacttcttttgttttcctgtcttccaattcatttaacttctattaaattaagaagtttttggccaggtgtggtggctcacgcctgtaatctcagcactctaagaggctgaggcgggcagatcacctgaggtgaagagttcaagactagcctggccaacatggcaaaatcccatctctactaaaaatacaaaaattagccgagtgtggtggcactcgcctgtagtctcagctactcgggaggctgaggcatgagaattgcttgaacccaggtggcagaggttgcagtgagccaagatcatgccactgcactccagcctgggagacagagtaagactctgtctcaaaaaaaaaaaaaaaaaaaaaaaaaaaaaaaaaatatatatatatatatatatatatatatatacacacacacacatatatatatatatatatatatatatgtatgtataggcaaaaacttcatttgtatatataaatttctaagacttcttcttgttctttgaccattttaaaaattaacattctgttcttgtttcatggatgcaatatgttatatcactgaggatattaatgatgctttgtttttgttttttaaattcttgtacttcttcactgcctctctttggagttcctttttttgtctttgtttgcttgctgctttcaatttctgtcttattttgtcttgtttcttacataccaggagatccttgactattttctcttatttaagagtgaggcacagataataagtttggaaccatttgtgttcatagaatttgttcttggtgggcctcctatagtgtagccagtctggaagcctcacctccttccagtctttgcacacatcactttctcattgaggcctattctgaccaccttatttaaagctgtacacatctgcccctaatacttcagctctgtcttttcctgctctgtttttttcccatgcactttttatacttatatgctatgtaatcacttatcgattacgtttattactagaacatcacttacaagagaacagggattttgttgttgttcttggtttcactgatatattccaaccaatgagaatagtgccctgcacaaaatagtcattcagtcaatcaataaatgttaaattgaggacattcacacatcattatgtataggtcttttcttacggattttcattttgcccataaaataataatgcattctctggcctggggcacgtggcaagggatgggaggtgagatttgtaggaaactacaaagtgatctgcctaggagtcagtgttctcgtagctgagcaagaggaagggaggtgagattttactgttaaatgtccagttgtacagttcgctttatattcaggtgctgccatctagtcttgttttacctgaatctagaccctctttaatctgtctaactggtaagaccttagttttctataagagtgggaaaggaaaccatcaactgcctgctcacactgggggcaggtaagaatctagggctttaactattccttacactacagacatacctcattttattgcacttctctttgataaatactgtgtttttacaaatcgaagatttgtggcaactctgcattgagcaagtctatcagtgccatttttccagcagcatgtgctcattttatgtcactgtcatattttggtaattcttgtagtatttcaaacttcaaactttttcaccaatattatacctgttacggtcatctgtgatcaataatctttgatgctactattgtcattgttatgggtccccacgaacttaagcccatgtaagatggcaaacccaatcgataactgtgtgtgttctgactactccagcacctaaccagccgtttcccatctccctccctctccttgggcctccttattggttgagacacaacaatattgaaattaggccatttagtaacttgacaatggtctctaagtgtccaagtgaaaggaagtgtctcacatctctcactttaactcaaaagctagaaaggactgagcttaaaagggggggggggcgtgttgaaagccaaaataggccaaaagctaacctcttgttctaatggaaaagttcctgaaggaaattaaaagtgctactctagtgaacacatgaatgataagaaagcaaaacagccttattgctaatatggagaaagaatgttctggatagaaaatcaaaccagccacaacattcccttaagtcaaagcctaatccacagtaagaccctaactcttgaattctataaaggctaagaggtgaggaagctgcagaagagagtttgaagctagcagaggttggttcatgagatttaaggaaaaaatccatcttcataacataaaagagcccagtgaagcagcaagtgctgatggaggagctgtagcaagttacccagatctggcaaaaatagttgatgagggtagatacagtaagcaatacattttcagtgtagacaaaacagccttctgctggaagaagatgccaactacgacttccatagctagagaggagaagtcaatgcctggcttgaaaacttcaccagacaagctgattttgttaggggctgatgcagctggtgactttaagttgaaggcagcactcactattctaaaaatcctagggcccttaagaattatgctaaatctgttctactcatgtgctataaatggaagaacaaagcctggatgagagtacatctgttgaaagcatggttccctgaatattttaatcccactgttgagacctactgctcagaggaaaagatttatttcaaaatattactgctcattgacaatgtacctagtcacccaagagctttgatggagatgtacaaggaaattaatgttttcatgtttgctgatacaacatctgttctgcagcttatagatgaaggagttattttaactttcaattcttattatttaagatatacatttcataaggcattagctgccatagtgattcctctgatggaactgggcaaagtaaattgaaaatcttctggaaaagattcatcccagatgtcattaagaacatttatgattcatgtgagaaggtcaaaatacgaacattaacaagagtttggaagaagttgattccagtctgcattgatgactttgagaggttcaagacttcagttgagaaagtaactgcagatgcattggaaatagcaagagaactagaattagaattggagcctaaaagatgtgactgaattgctgcagtctcatggataaaacttaaactgatgaggagttgcatcttattgatgagcaaagaaagtagtttcttgaggttgaatctactcctggtaaagatgctgtgaacacattgtcaaaatgacaacaaaggatttagaatattacatcaacttagttgaaaaagtaatggcagggtctgaaaggaccaactccaattttgaaagttttgccttaagtaaaatactactaaacagcattgcatgctacagatgaattttccatgaaaggaagagtcaatcattgtggcaaccatcattgttgtcttattttaagaaatttctacagccacccaaaccttcagcgacaccaccctgatcagtcagtagccatcaacattaaggcaagaccttacaccagcaaaaaggttatgactcactaaaggcccagatgattgttagcactttttagcagtaaaacattcttaaattgttttcttagatgtaatgctattgcatacttaatagactctagtatagtgtaacacagcttttatttgcactggtaaaccaaaaaatttgtgtgacttgctttattgcaaactggttgaaagtctacaggggccttccccgagagaatttgagggttcagtttgaaactgtcacaacaaatgaaatcttcatcgtgtaaatttatttctgcattactacagattatataggtaaaatatagttagtgaggcaaaggactgttcaagataaagctgaggaggtaagcagagaccaaaatcatgcaggaccgtgtcaaccattttaaggatgtgttattttataacaaaaatccttatacttcctgaaggctaacggttattctgactctaggatagattactttcactaaagttttgtttgcctgttgttatttgttggttttttttcactttgcatagatggaatcatattgtgcatactcttttgtgtctggcttcttttattcagccttatgtttgtgacagtcattggtacaattgggtagttaacaaatggttcatcctcactgctatatagtattccatgttgtaaatgtactccaatttatccacttgactattggtgtgtattttgataatctggctgttataactagcattaggagatatacctaatgtaaatgacgagttaatgggtgcagcacaccaacatggcacatgtaaacatatgtaacaaacctgcatgttgtgcacaggtaccctaaaactttaagtataataatacaaaaatacataaaagaatgactcatatattaatcatcctaaaatataaaaaaaagatgctgtttttaattttttttttttttttggtttggcagttttttataaagttaaacttgcctatgacccaacaattccagtgttaggtatttatccaagagaaatgaaaatacatgctcacagaaagttctatatatgaatgcctatatatgctttttaattaaaaaaaaattttccataggttattggagtacaggtgatgtttagttacatgtgtaagttctttagtggtgatttgggtgcacccatcacccaagcagtatacattgcaccaccctgtttgtagtattgtattcctcaccccccactttcccccaagtccccaaagtccattgtatcattcttatgcctttgcatcctcatagcttagctcccacatatcagtgagaatatacgatgtttggttttccgttcctgagtgacttcacttagaataatagtctccgatctcatccaggtcgctgcgaatgccgttaattcattcctttttatggctgagtagtatcccaccatgtatactgtggtatacataccacagtttctttatccacttgttgactgatgggcatttgagttggttccatgattttgcaattgtgaattgtgctgctataaacgtgtgtgcaagtatctttttcatataatgacttcatttactctgggtagatacccagtattgagattgctggatcaaatggtagttctccttttagctctttaaggaatctccatactgttttccatagtggctgtactagtttacattccagcagtgtagaagtgttccctgatcactgcatccccagcaacatctactgattttttgattatggccattcctgcagaagtaaggtggtgtcacattgtgattttaattcgcatttgcctgatcattagtgatgctgagcattttttcgtatgtttgttggccatttgtatatcttcttttgataattgtctattcatgtccttagcccactttttgatgggattaattttttttggctgatttgattgagttcattgtagattctggatattagtccattttcagatgtatagattgtgaagattttctcccactctgggctgtttactctgctgactgttccttttgccatgcaaaagctctttagtttaattaagtcctagcaatttatctttgtttttattgcatttgctttggggttcttggtcatgaaatccttgcctaaaccaatgtctagaagggtttttccaacgttaatcttctagaatttttatagtttcaggtgttagatttaagtccttaagccatcttgagttgatttttatataaggtgagagatgaggatccagtttcattgtcctatatgtgtctagccagttatcccagcaccatttgttgaataggctgtcctttccccactttatgtttttgtgtagttgttgaagatcacttggctgtaggtatttgggtttatttatgggttctctactctattacattgtcctatgtgcctatttttataccagtaccatgctgttttggtgactatgtccttataatatagtttgaaatcaggtagtgtgatgcctccagatttgttgttttgcttagtcttgcattggctatgtgaaatctttttgtggttctttatgaattttagtactttttttctaatgctgtgaagaatgatgatggtattttgatggggattgcagtgaatttgtaggttgcttttggtggtatggtcattttcacaattttgattctaccattccatgaacatgggatgtgtttccatttgtaggttgcttttggtggtatggtcattttcacaattttgattctaccattccatgaacatgggatgtgtttccatttgtttgtgttgtctatgatttctttcagtggtgttttgtagttttccttgtagaggtcttttgcctcctgggttaggtatattcctaagtttttttctttgtcttttttatttttttttttgcagctattgtaaaaaggattgagttcttgattcgattctctagttggttgctgttggtgtatgggagagctactgatttgtgtacattattcttgtatctggaaactttactgaattcttttgtcagttctaggagctttctggaggagtctttaggatttttgaggtaaacgattatattgtcagtaaacagtgacagtttgacttcctctttactgatttggatgtcctttatttstttcgcttgtttgattgctctggataggacttccagtactatgttgaagacgagtggtgagagtgggcatccttgttttgttccagttctcagagggaatgctttcaactttttgccattcagtattatatttgctgtgggtttgtcatagatggcttttattacattgaggtatgttcctttatgccgattttgctgagttttaatcataaagggatgctggattttgtcaaatgctttttctgcatctggtgagatgatcatgtgatttttgttttcattctgtttatgtggtgtatcacatttattgacttgtggatgttaaaccatccctgcatccctggcatgaaacccacttgctcgtggtagtttatctttttggtatgttgttggattcagttagctagtattttgttaaggattttagcatttatgttcatcagggatatgggtctgtggttttctttctggttatgtcctttcctggttttggtattagggtgatgctggcttcatagaatgaattagggagggttccctctttctctgtcttgtggaatagtgtcagtaggatcggtaccaattcttctttgaaagtctggtagaattctgctgtgaatttctgggcctggcctttttttttgttgataatttttaaattaccatttcaatcttgttgcttgttattggtctgtttagggtatctaattcttcctgatttaagctgggaggggtgtacacctccaggaatttatctgtctcttctaggttttcaagtttatgcccataaacatattcatagtagccttgaatgatcttttgtatttctgtggtgtgagttgtaatgtctcctgtttcatttcttattgaggttatttggattttctctcttcttttctaggttaatcttgctaatggtctatcagtttatcttttcaaacaagcagctttttgtttcatttatcttttgtaattttgttttagtttcatttagttatgctctgatcttggtcatttcctttcttctgctgggtttgggtttggtttgttcgtgtttctctagttccttgaggtgtgacctttgagtgtcagtttgtgctctttcagtctttttgatgtaggcatttagcaccatgaactttcctctgggcaccacctttgctgtatcccacaggtttttatagattgtcactattgtcattcagtctgaacattttataatttccatcatgattttatttttggtccagtgatcattcaggagcaggttatttaatttccatgtatttgcatgttttgaaggttccttttggaattgatttccagttttattccactgtggtctgagagagtccttgatataatttcagttttcttaaatttattacagctcattttgtggcctatcatgtggtccatcttggagaaagtcccatgcgctattgaatagattgtgtattctgtggttcttggatggaatgttctgtatatagctgttaagtccatttgttccaaggtctagtttaaatccattgtttatttgttgactttctgtcttgatgacctgtctagtgctgtcagtggagtatttaagtcccccactgttatggtgttgctgtctatctcattttttaggtctattagtaattgttttataaatttggggactccagtgttatgtgcatatatgtttaggattgtggtattttcctgttggacaaggccttttaccattatttaatgtccctctttgtcttttttaactgccattgctttaacgtttgttttgtctgacataagaatagctacccctgctcacttttggtgtccatttacatgaaatgcctttttccactcctttactttaagtttatatgattccttgtgtgttatgtgagtctcttgaaggtggcagacaattggttggtgaaattttttttttttttttagatttcgagattttgagatggagtctcgctctgtcacccaggctgagtgcaatggcacgatctcggctcactgcaaactctgcctctcaggttaaagcaattctcctgcctcagcctcctaagtagttgggattataggtgcctgccaccatgcctggcttatttttttttgtatttttagtagagatggggtttcaccatgttggttaggctggtttcaaattcctgacctcaagtaatctgcccgcctgagcctcccaaagccttgggattataggtgtgagccgcggtgcccggccagttggtgaatgcttatccattctgtagtactgcatcttttaaatggagcatttaggccatttacattcaatgttagtattgagatgtgaggtaccattccattcatcatgctatttgttgcctgtataccttgattttttggtttttgtttttgctttttaaattctatttttgttttataggtcctgtgagatttgtgctttattttatttatatatatatatatwttttttattatactctaagttctagggtacatgtgcacaacgtgcaggtttgttacatatgtatacatgtgccatgttggtgtgctgcacccattaactcgtcatttacattaggtataccacctaatgctatccctcccccctccccccaccccacaacaggccccggtgtgtgatgtttcccttcctgtgtccaagtattctcatttttcagttcccagctatcagtgagaacacacggtgtttggttttttatccttgagatagtttgctgagaatgatggtttccatcttcatccatgtccctacaaaggacatgaactcatccttttttatgggtgcatagtattccatggtgtgtatgtgccacattttcttaatccagtctatcattggacaatttgggttggttccaagtctttgctattgtgagtagtgctgcaataaacatacgtgtgcatgtgtctttatagcagcatgatttatattcctttgggtatatacccagtaatgggatggctgggtcaaatggtatttctagttctagatccctgaggaattgccaccctgtcttccacaatggttgaactasttcacagtctgaccaacagtggaaaagtgttcctatttctccacatcctctccagcacctgttgtttcctgactttttaatgatcgccattctaactggtgtgagatagtatctcattgtggttttgatttgcatttctctgatgaccagtgatgatgagcattttttcatgtgtctgttgactgcataaatgtcttcttttgagaagtgtctgttcatatccttcacccactttttgatggggttgtttttttttcttgtaaatttgtttgagttctttgtagattctggatattagccctttgtcagatgagtagattgcaaaaattttctccaattctgtaggttgcctgtttactccgatggtagtttcttttgctgtgcagaagctctttagtttaattagatcccatttgtcaattttggcttttgttgcgattgcttttggtgttttagacatgaagtccttgcccatgcctatgtcctgaatggtaatgcctaggttttcttctagggtttttatgggtttaggtctaacatttaagtctttaatccatcttgaattaatttttgtgtaaggtgtaaggaagggatccagtttcagctttctacatatggctagccagttttcccaacaccatttattaaatagggaatcctttccccatttcttgtttttgtcaggtttgtcaaacatcagatggttgtagatgtgtggtattatttctgagggctctgttctgttgcattggtctgtatatctgttttggtaccagtaccatgctgttttggttactgtagccttgtagtatagtttgaagtgaggtagcatgatgcctccagctttgttctttttgcttaggattgacttggcaatgtggactcccttttggttccatatgaactttaaagtagttttttccaattctgtgaagaaagtcattggtagcttgatgtggatggcattgaatctataaattaccttgggcaatatggccattttcacaatattgattcttcctatccatgagcatggaatgttcttccatttgtttgtgtcctcttttattttgttcagcagtggtttgtagttctccttgaagaggtccttcacatcccttgtaagttggattcctaggtattttattgtctttgaggcaattgtgaatgggagttcactcatgatttggctctctgtttgtttgttattggtgtataagaatgcttgtgatttttgcacattgattttgtatcctgagactctgctgaagttgcttattagcttaaggagattttgggctgagacggtggggttttctaaatatacaatcatgtcatctgcaaacagggacaatttgacttcttcttttcctaattgaataccctttatttctttctcctgcctgattgccctggccagaacttccaacactatgttgaataggagtggtgagagagggcatccctgtctcgtgccagttttcaaagggaatgcttccagtttttgcccattcagtatgatattggctgtgagatttgtgctttaaagaggttctgttttgatgtgtttccaggatttgttttaaggtttcgagctcctttcagcagttcttgtaatggtggcttggcagtggtgaattttgtcagcacttgtttgtctggaaaacactgtatctttccttcatatttgatgcttagtttcactggatacaaaattcttggctgataattttgtttgaggaagctgaagatagggccctaatctcttctagcttgtagagtttctgctgagaaatctgctgttaatctaataggtttacctttataggttacctggtacttttgtctcacagctcttaagattctttcctttgtcttaactttacattacctgatgacagtgtgcctaggtgatgatctttttgtgaggaattttccaggtgttctttgtgcttcttgtatttggatgtgtaggtctctagcaaggccaggaagttttccttgattattcccccaaatacgttttttcagcttttagatttctcttcttcttcaggaacaccgattattcttaagtttggttgtttcacataatcctggacttctcggagactttgttcatattttcttattcttttttctttgtctttgtttggttgggttaattcaaagaccttgtcttcaagctctgaatttctttcttctgcttgttcatttctattgctgagactttccagagcattttgcatttctataagtatatccaatgcgtcctgaagtttgattgttttttctttatgctatctatttccttgaatatctctcctttcacttcttgtatcattttttggatttccttgcattgggctttgcctttctctggtgcctctcgaaatagcttaataactaacctcccaaattctttttcaggtaagtcagggatttctttttggtttggatccactgctggtgagccaatatgattttttggggggtgttaaggagccttgttttgtcatattaccagggttggttttctggttctttctcatttgcatagcctctgtcagagggaaggtctagggctgaaggctattgttcagattcttttgtcccatgggctgttcccttgatgtagcactctccccgttttcctatggatgtggcttcctgagagccgagctgtagagattgttgtctctcttctgggtctggccatccagcaagtctaccagcctccggactggtactgggcattgtctgcacagagtcctgtgatgtgaaccgtctgtgggtctctcagccatggataccagcacctattccagtggaggtggcagtgggtgaaatggactctgtgagggttcttagctttgatggtttaatgctttatttttgtgctggttgtcctgccaggaggtggcgctttccagagagcatcagctgtggtagtatagggaggatcagacggtgggcggggggcctagaactcccaagagagtatgccctttgtyttcaactaccagggtggatagggaaggaccatcaggtaggggcagggtttggtgtgtctgagctcagactttccttgggtgggccttggtgcagctgctgtgggggataggggtgaggttcccaggtcaatggagttgtgtacttaggagaattatggctgcctctgctgagtcacgcaggttgtcagggaagtgggggaaagccagcaatcacaggccttacccagcttccacacaatccaaagggccggtctcactcacactgtgccccccaccaacagcactgagtctgtttccaggcagtgggcaagcagacctgagaacttgccccatggtacccacctccgagctatgaaataaaaggattttagttcttcctccacctgtggaggctgcacactggatgctggatttgggctctcccctgagttctggccaggagccttcttgactagttcaaattgttacaaaattcagctggagacttccttctccctgtggcattttctccgcaccgctggccgccctcctgaaggatccctgtgatgccaggcaagaatggcctgcctggggacccagcaagctcccagggccttttccactgctttctctacccctgtatttcactctgctccctaaattgattcagccccaggtaaggtcagaatcttcttcctcaaatgagaccttcagtttccccagtaggagtgtgtgcttgggggtggaggatcttccttttctgcttctgcagtttgggtactcagtatttgggctgtctcctgggtcctgcaggagcagaccgcttttttcagagggtctgtgggtcctcttgggattcctgatttattcctgcaatcactctggagctaaaattcacgatatgagcctccacatgctgctctgttcatccgagtcagagctgcaatctactgcctcccatccaccatgatgaagtctctgattatatatgaaaagatgctgttttttattaatgattgcattctgtttccaatttgctaagagttttaaaatcataaatgagtattgaattttgtcacatgggtttttttcatataatgagatgacagtatgagttttctcttttctactattaacaaagtcattacattggttaattttcaaatgataatccagccatacatacctagaatgatatattatcctttttatatattgctggatttgatttgctagtatttgttctaggtttttttcatttgtgctcatgagaaagattagtttgtaaaggttctttcttatactatccttatcaaattttggaacaaaaattatgcaggcctctgttattctgttcttagattgctgtaaagaaattcttgaggctggataatttgtaaagaaaagacacttaattggctcacagttccacaggctgtacaggaagcatgtctggggaagcctcaggaaatgctgaatcatagcagaagacaaaagggaagcaggcacattttacatggctggagttggaggaagagagggaagagggaggtgtcacacacttttaaacaaacacatcttgtgataactcactcactatcatgagaacagcaccaaaggggaaatccatcaccatgatccagtcatttcccaccaggcccccctccatcattggggattacaattttacatgagatttgggcagggacacagacccaaactatatcaaggccttataaaaatagttaaaaagtgtttctcccttttctattctctgtgttkgcggaaaatttaggttattttttaaatatttagaagaagccagtccaactgataaagccatccaggtctgaagttttgttgtagattttaaattatgagtcagtttccttaataaatgtcattctattcagatttttctacttctttatgttagcattgataaattgtatttttcaaggaatttatccattttgtcttatgatgtatgtataatctgctgttaaatgaatctgatgaattcttagttacagatattttagttttcaactgtagaatttttattaaaagtgtattctaattctcagatgaaattctttattttttctttttgtttttgcctcatttcttaagcatgttaatcatagtcatttctgattgtcagacactggaaaaatcttttttacactttaaaatatcttcttaacaaccttgtgtattcaaaacatgttcaagtgacaatattttcaatatgttaagtataaatttaatatcactcatttctttttaattttaatgtagctactagaaaatttatatatatgtatatatatgtgtgtgtgtatatatatatatatatatacacacacacacatatacatatagcttgtaattgtggcccacactgtttttctattagagctgctctaggtgatgttttctttttctagggaaagttcactttttctcccgctaagcagatagactgagatgctttactcctctcagtccctgagtggaagctgctttgcagtggaagctgctttgcagttcttgcaaggttctctctagttctgttctttaacacttctggggcctagcccctcaaggctttcaactaggagcctggtattttcatgctccttccccttggcaagttctaaactctagtgcttccctccttagccctgaaaaattgccaaaaactctgctgtgcttctcagaggcctcttgcttaacctttcagcaacctatcctaggcaacttcagaatgtggcaaatattgtgagggaaaaataggccatgtatttgaagcccttgaagtctctaattttgtcttttctgaaagaccctagtaatagctctgcatgtttctctgacttcaagaaacaactctctacctgggcaaagccatagtttttagcctctcgccctttaccagcatcaacaaatgctcctgttgttaaaatgggtgcagaaagaccattcacctccctgaggctctctcctccctcgaatcctggtctccattagtcttcattgctttttgcttgtctctgatacctataaaatgataatttttatgttttacctataagcattctcagcaggggcattggcttgccacaaactactccatcctcttgaattttattttattttattttattttattttattttattttattttattttattttattttttaagacagtctcattctgtcatccaggccagagtacagtggcgcaatcttggcttactgcaacctccgcctccagggttcaagcaattctcctgcctcagcctcctgagtagagtaactaggattacaggcatgcaccaccaagcccagctaatttttgtatttttagtagagatggggttccaccgttttggccaggttggtctcgaactcctgacctcgggtgatccacttgcctcggcctccaaaagtgctgggattacagacgtgagccactgcgttcaggcaatcctcttgaatttaaaagagacattttaaaagtccagaccttcttcatgtgacttctattgtggaagctttctgtcttgccgtgccttccgtggatacctggtcccttgctggtgccttcagaaagttgccttctaaaaaagagatgtatatttttgtttttttttccccatatacctctccttttattggttaaagatcaagcgatttatttatttattttttattatattttaagttctagggtacatgtgcacaacgtgcaggtttgttacatatgtatacatgtgccatgttggtgtgctgtacccattaactcgtcatttacattaggtatatctcctaatgctatccctccccctctttccccaccccacgacaggccccagggtgcgatgttccccaccctgtgtccaagtgttctcattgttcaattcccatctatgagttagaatatgtggtgttcggtgttctgtctttgcgatagtttgctcagaatgatgattttcaccttcatgcatgtccctacaaaggacaagaactcatccttttttatggctgcatagtattccatggtgtatatgtgccacattttcttaatccagtctatcaccgatggtcatttgggttggttccaagtctttgctattgtgaatagtgccacaataaacataagtgtgcgtgtgtctttatagcagcttgatttataatcctttgggtatatacccagtaatgggatggctgggtcaaatggtatttctagttctagatccctgaggaattgccacactgtcttccacaatggttgaactagtttatagtcccaccaacagtgtaaaaatgttcctatttctccacatcccctccagcacctggggtttcctgactttttaatgatcgccattctaactggtgtgagatggtatctcattgtggttttgatttgcatttctctgatggccagtgatgatgagcattttttcatgtgtctgttgactgcataaatgtcttcttttgagaagtgtctgttcatatccttcacccactttttgatgggtttgtttgattttttcttgtaaatttgtttaagttctttgtagattctggatattagccctctgtcagatgggtagattgcaaaaattttctcccattttgtaggttgccttttcactctgatggtagtttcttttgctgtgcagaagctctttagtttagttagatcccatttgtcaattttggcttttgttgccattgcttttggtgttttagacatgaagtccttgcccatgcctatgtcctgaatggtattacctaggttttcttctagggtttttatggttttaggtctaacatttaagtctttaatccatcttgaattaatttttgtgtaaggtgtaaggaagggatccagtttcagctttctacatatggctagccagttttcccagtaccatttgttaaatagggaatcctttccccatttcttgtttttgtcaggtttgtcaaacatcagatggttgtagatgtgtggtattatttctgaggcctctgttctgttccattggtctacatctctgttttggtaccagcaccatgctgttttggttttagtatattttgaagtgaagtagcgtgatgcctgcagctttgttctttttgcttaggattgacttggcaatgtgggctcttttttggttccatatgaactttaaagtagttttttccagttctgtgaagaaagtcattggtagtttgatggggatgacattgaatctataaattaccttgggcaatatggccattttcatgatattgattcttcctatccatgagcatggaatgttcttccatttgtttgtgtcctcttttatttcgttgaggagtggtttgtggttcctgaagaggtccttcacatcccttgtaagttgtattcctaggtattttattttctttgtagcagttgtgaatgggagttcactcatgatttggctctctgtctgttattagtgtataggaatacttgtgatttttacacattgattttgtatcctgagactctgctgaagttgcttatcagcttaaggagattttgggctgagacagtggggttttctaaatatataatcatgtcatctgcaaacagggacaatatgacttcctcttttcgtaattgaatgccctttatttctttttcctgcctgattgccctggccagaacttccaacactatgttgaataggagtggtgagagagggcatccctgtctcgtgccagttttcaaagggaatgcttccagtttttgcccattcagtatgatattggctgtgggtttgtcataaatagctcttattattttgagatacgtcccatcaattcctagtttattgagagtttttagcatgatgggctgtgttgaattttgtcaaaggccttttctgcatctattgagaaaatcatgtggtttttgtctttggttctgtttatatgatggattacgtttattgatttgcatatgttgaaccagccttgcatcccaagattgaagctgacttgatcgtggtgggtaagctttttgatgtgctgctggattcggtttgccagtattttattgatgatttttgcaccgatgttcatcagggatattggtctaaaattctcttttcttgttgtgtctgtgccagactttggtatcaggatgatgctgacctcatcaaatgaggtagggaggattccctctttttctattgattggaatagtttcagaaggaatggtaccagctcctctttgtacctctggtagaatttgtctgtgaatccatctggtcctggacttgttttggttggtaagctattaattattgcctcaatttcagagcctgttattggtctattgagggattcagcttcttcctggtttagtcttgggagggtgtatgtgtccaggaatttatccatttcttcttcatcttctagtttatttgcatagaggtgtttatagtgttctctgatggtagtttgtacttctgtgggatcggtggtgatatcccctttatcatttttcattgcrtctatttgattcttttctcttttcttctttattagtcttgctagcggtctatcaattttgttgatcttttcaaaaaaccagctcctggattcattgattttttttttttgaagggttttttttgtgtctctgtgtccttcaattctgctctgatcttagttatttcttgccttctgctagcttctgaatttgtttgctcttgcttctctagttcttttaattgtgatgttattgtgtcaattttgatctttcctgctttctcttgtgggcatttagtgctataaatttccctctacacactgctttaaatgtgtcccagagattctggtttgttgtgtctttgttctcattggtttcaaaaaacatctttatttctgctttcatttcgttatgtacccagtagtcattcaggagcaggttgttcagtttccmtgtagttgagcggttttgagtgagtttcttaatcctgagttgtaatttgattgcattgtggtctgagagacagtttgttgtgatttgattgcattgtggtctgagagacagtttgttgtgatttctgttcttttacatttgctgagggatgctttacttccaactatrtggtcaattttggaataagcgtgtggggtgctgagaagaatgtatattctgttcatctggggtggagagttctatggatgtctattaggtctgcttggtgcatagctgagttcaagtcctgaatatccttgtcaaccttctgtctcgtagatgtgtctaatattgacagtggggtgttaaagtctcccattattattgtgtgggagtctaagtctctttgtatgtctctaaggacttgctttatgaatctgggtgctcccgtattgggtgcatatatatttaggatagttagctgtgacctgtgcactggagctgttcttattcgtccatcttgggacccgcgcctcccaggagatgtatatttttatatcttcagcatatagccacttgaggtaccagaagtgatggacctggacagttatatacattaaagcctgtattgtgggactaattttaggacagaactatgaggaatgcaacatttaaggaacatacagaggagtctctgcagagacaagggagaagtgagagaggtgggaggaatacctgaagaaggtggaatcacagaggcaacaaaacaggacatttcagtagagattttgcaccaaatactgacagaaaaaaggctaagaaggttcaaactgaaaaggatcccatggatttagcaataatgaaatttatgttatcttactatcttaaatttctgaggaaagtataacaattatacagaaataaaattatcgtcgttttatttttgacctacaaaaatgacaatttgatatgattcatcctaatagatggagaaataaaggttagctagcataagtaatttgcttcaattcctgatcagaagtgaaattcaaatctaggtcttcttgtatcatctggtctgatgttctttctactgccctacattcttttattcattgctatcgttcctttcttattccttatttgaagacatgtattcaggagacccatatctcatgcaatgatacccatagtctgaaggtaaagggatctgcccagcaaatccctttatgtttgccaaacaaattccctttatcttttccacttgattggcagatttttcagataaaaagtctgggttgctataatttcagacaaaacaacctttaaaacaacaaagatcacaaaagacaaaaagggcattacataatggtaaagagctcaattcaagaagaggacttaactgccctaaatatatatgcagtcaacacagaagcacccaaattcataaagcaagttcttagagacctacaaagagacttagaaaaccccacaataatagtggggagactttaacaccacactgttagtattagatcattgaggcagaaaactaacacagatattcaggatctgaactcaacacttaactaaatgggcctaatagatatctacagaactctccactccaaaacagcagaatatacatttttctcatctacatgtggcacatactataaaattaaccacacaatcaggcataaaacaatcctaagacattcaaaactgaaattatacaaaccatgtccttagactacaatgcaataaagatagaaatcaatactaagaaaatcactgaaaaccatgcaattacatggaaatgaaacagcctgcttcgagtgacttctgggtacacatgaaattaaggcagaaatcaagaaattatttgaaactaatgaaaacaaagataaaatataccagaatctctggggcacagccaaagcaatattaagatggaagtttatagcactaaatgcccacatcaaaaagttagaaagatctcaatttaacaacctacgatcataactaaaagaactagggaaccgagagcaaaccaaccccaagtctagcagaatacaagaagtaaccaaaatcagagctgaactgaaggaaattgagacatgaaaaaccatacaaaggatcattgaatctaggagctggttatttgaaagaataagatagactgctagctagactaataaagaaaaaaagagaaaagatccaaaatacagtcagaaatgacaagagggatgtaaccactgaccccacagaaatccaaaatccctgagagactattatgaacccctctttgcacataagctagaaaacctagaagcagatacattctttttagccaggtatggtggttcacgcctgtaatcccagctacacaggagactgaggtaggaggatggctagagcctgagaggcagagtttgcagtgagccttcaaaaaaagaaaaggaaaaagaaatggatacattcttggaaatataatctctgaagattgaacaaggaagatattgaatccctaaacagatcaataatgatttctgaaactgaatcagtaataaaaagcctaccaaccaggaaaagcccagaaccacacatatccatagccaaattctactggttgtgtaaggaagagctggttactaatcctactgaaattttgaggaagagggactcccctaattcattctgtgaagccaacagcatcctgacaccaaaacctggcagagacacaacaacaacaaaaaagaaaacttcaggccaatatccttcatgaacatagatgcaaaaatcttcaacaaaatactagcaaactgaatccagcaacacatcaaaaagctaattcaccaacatcaagtgggcttcatccctggaatacaaagttggttcaacacatgcagatcaataaatgtaatgtaattcaccacataaacaactgaaaacaaaaagcatgtgatcatttcaatagatgcagaaaaggcttttaataaaattcaacatcctttcatgataaaaaccctcaacaaatcaagcattgaaggaacatacttcaaaataataggagacatctttgacaaacccacagccaacatcatactgaatgggcaaaagctggaagcattcctcttgaaaactggaacgaaacaaggatgccttcactcaccactcctattcagcatagtcctggaagttctagccagagcaatcaggcaagagaaataaataaagacatccaaataggaagatcggaactcaaactaacactgtttgcagatgatatgatgctagacctacacaaacaccatagttactctgccccaaagctccttgatctgataaatgacttcaacaaagtttcagatacaaaaccagtgtacaaaaatcagtagcatacctatactccaacaacatccaagctgagagtcacatcaagaatgcagttctattcacagtagccacagagagaaaaacctgcctaggaatacacgtaaccaaggaggggaaatgagaattacaagatactactcaaaaaaaataaaataaaatcagagatgatacaaacacatgagaaaaaccttccaggctcatggataggaagactyaatattgttaaaaggccatactgcccaaagctatttacagattcagtgctatacctatcaaattaccaatgacattgttcacagaattggaaaaacctgttttgaaattcatacggaaccaaaaaagagcttaaatagccaagatgatcttacacaagaagaacaaagctagaagcatcatattacctgacttgaaactgtagtataaggctacattaacaagacagcatgatagtgatacaaaaacagacacatacaccaatggaacagaatagagagcccagaaatgatgctgcacacctgcaaccatctgatcttcaacgaagtcgacaaaaacaagcaatgggggaaggacttcctattcaataaatggtgttgggatacctggctaaccaaaggcagaagattgaaactggatcccttccttacactgtatacaaaaatcggtaatactgctgttgggaatgtaaattagttcagccattttggaaagcagtttggcagtttctcaaagagattaaaaatggaattaccatttcacccacaaattccattattcggtatatacccaagggaatataaatcgttctaccataaagacatatgcacatgtatgttcattgcagctaatagtaaagacatggaatcaacctaaaagcccatcagtagtagagtagattttttaaatgtacatatatcacattttggaattccaaatttcacataatggaatactgtgcagccataaaagagaatgagatcatgccctttacagcaacatggatggagctggatgccagtatcctaagcaaactgacacaggaacagaaaaccatatactgcatgatctcacttttaagtgggagctaaacattgaatacacatggacacaaagaagggaacaatagtggctgggactttcttgagggtggaagatgggaggagggtgggaatggaaaactacctatcgggtattatgcctactacctgggtgactaaataatctttataccaaatcctcatgatatgcaatttacctttataataaacttgcacgtgtgcctctgaacctaaaataaaagttagaaaaagatatttagccttttacaacaaaaataatattatgtatataattttgtaagtttaaaaaatttttactatgtacatatgtatgtaactttttaatgatagttaaatatgattaatctggaaatagttttacttttttcagtccaaagattttctgtaatttcttcttaaaatgtgtttactatcttgggcttttgataaaattgttctttttaattgacattggcttcacatttattcagaattgtcatgcagatgagtagaacactctatctagttgttcttttgttatgcgtcttttttaaaaaataagttactttaagactagttaagctatataatcttaactctccagggacgacttctggagcagtttctctgtatagaaacttttccgattttctagtctaaaatgaatgatttgaccatgtttagcagggggactgattttgactttcaaagtcatcttcttaggtggtcgccttcttcactagggcagaagagcttgctttccatagtgagccttttgagttggagtctgtctttcttcttaagctgcttttgtggtagctgcttccttttaacacatttggaacttctgaagtttcttttggatcatattagaccttttttctccagaactaggtcatcattaatgttaacttgttcagtttctttctaagtgaaaggatggttaaaattctagaatctgctgcttcatgtgttgacagttctcgtagtaagattctacagaatttcattaagtcacagatatggttagtaaaggagaagtagtgagagtagggagaaaagagcaactactgaagcaactatcaagtagtttttccttccttcttttattttccatggcagtaggaagacatgtaaacagttttgtacttaatatttgacatgttttttattgatgaattacttcctttttttaatgtaagctttgtttatgctgcagttaatactgtaaatcagtgcatgcctagcgggttacatctgctcttaagtaagtcacagccagagtagatagtgacttaaaggttgctaataggaagcagaagatccagaagccagactgagagatgtcgatgtcttcatagagaaactctaatggatcctgtttacaccactgtaggtttcataccatagcagctgatatcaacgaaagaatattgagtgatgggaaaggtggtgggtggttcctattcagaagtgacctggcagtctttgggttggcagtagtgctgattttgtgacccattacataacttctcctaatgttagtacartagtatttaatcttacagtatttaagaactatacatcgtcaaaactcttcattttgtaaaactttaactctctaccatgtaaacaataaatttcaatttctctttccccttggcaaccactattctactttctgtgtctatgatttttgactactcttaagtacctcatctaagcaaaatcatgcagtatttgtctttttgtggctggtgtatttcacttagaataatgtcctcaaggttcatccatgttgtagcacatgtcagaattaatttcttttcttttcttttcttctttctttccctccctccctccctccctccctcactccctccttccctccctccctccctccttccttctttctttctttcattcatttattatactttaagttctagggtacatgtacacaatgtgcaggtttgttacataggtatacatgtaccatgttggtttgctgcacccattaactcgtcatttacattaggtatttctcctaatgctatccctccccctgccctgcaccctacgacaggccccggggtgggccctgtgtccaagtgttctcattgttcaattcccatttatgagtgagaacatgcggtgtttggttttctgtccttgcgatagttggcttagaatgatggtttccagcttcatgcatgtccctgcaaaggacatgaactcatccttttttatggctgcatagtattccatggtatatatatgtcacattttcttaatccagtctatcactgatggacagttgggttggttccaagtctttgctattgtgaatagtgccacaataaacgtgtgcatgtgtctttatagtagcatgatttataatcctttgggtatatacccagtaatgggaatgctgggtcaaatagtatttctagttctagatctctgagcagtcaccacactgtcttccacaatggttgaactagtttacagtcccaccaacagtgtaaaagtgttcctatttctccacatcctctccagcacctgttgtttcctgactttttaatgattgccattctaactgatgtgagatggtatctcattgtggttttgatttgcatttctctgatgaccagtgatgatgagcatgttttagtgtgtgttggctgtataaatgtcttcttttgagaagtgtctgttcatttcctttgcccactttttgatggtttttttttcttgtaaatttgtttaagttctttttagattctggatattagccctctgtcagatgggtatattgcttttctctcattctttaggttgccttttttgccttttcactccaatggtagtttcttttgccgtgcagaagctctttagtttaattagatcccatttgacaattttggcttttgttgccactgcttttggtgtttagacataaagttcttggccatgcctatgtcctgaatggtattacctaggttttcttctagggtttttatggttttaggtctaacatttaagtctttaatccatcttgaattaatttttgtataaggtgtaaggaagggatccagtttcagctttctccatatggctagccagttttcccagcaccatttattaaatagagaatcctttccccatttcttgtttttgtcaggttaatcaaagatgagatggttgtagatatgtggtgttatttctgaggcctctgttctgttgcattggtctatatctctgttttggtatcagtaccatgctgtttaggttactgtagccgtgtagtatagtttgaagtgaggtagcatgatgcctccaactttgttctttttgcgtaggattgtcttggcaatgcgggctcttttttggtttcatatgaactttaaagtagttttttccagttctatgaagaaagtcattggtagcttgatgaggatagcattgaatctataaattaccttgggcactgtggccattttcacgatattgattcttcctatccatgagcatggaatgttcttccatttgtttgtgtcctctttcatttcattgagcagtggtttgtagttctccttgaagagaagtggttgtgtagttctccttcacatcccttgtaagttgtattcctaggtattttattttctttgtagcagttgtgaatgggagttcactcatgatttggctctctgtttgtctgttattggtgtagaggaatgcttgtgatttttgcacattgatgctgcatcctgaaacatattggtctaaaattctcttttcttgttgtgtctctgccaggctttggtatcaggatgatgctggcctcatcaaatgaggtagggaggattccctctttttctcttgattggaatagtttctgaaggaatggtaccagctcctctttgtacctctggtagaattcgtctcttaatccatctggtcctagacttgttttggttggtaggctattaattattgcctcaatttcagagcctgttattggtctattcagggattcaacttcttcctggcttagtcttgggtgggtgtatttgtccaggaatttatccatttcttgtagattttctagtttatttgcgtagaggtgtttatagtattctctggtggtagtttgtatttctgttkgttcagtggtgatattgctttatcattttttattgtgtctatttgcttcttttctcttttcttctttattagtgttgctagcggtctatcaattttgttgatattttcaaaaaaccagctcctgtattcattgattttttgaaggttttttgtgtctctatctccytcagtcctgctctgatcttagttattttttgccttctgctggcttttgaatgtgtttgctcttgcttctctagttcttttaattgtgatgttattgtgtcaattttagatctgtcctgctttctcttgtgggcatttagtgctataaatttccctcgacacactgctttacatgtgtcccagagattctggtatgttgtgtctttgttctcattagtttcaaagaacatctttatttctgccttcattttgttatgtacccagtagtcattcaggagcaggttgttcagtttccatgtagttgagccgttttgagtgagtttcttaaccctgagttttaattttattgccctgtggtctgagagacagtttgtgaatttgattgcactgtggtcttagagacagtttgtgataatttctgttcttttatatttgctgaggagtgctttacttccaactatatggtcaattttggaataagtgcaatgtggtgctgataagtatgtatattctgttgatttggggtggaaagttctgtggatgtctattaggtccgcttggtgcagagctgagttcaattcctggatatgcttgttaactttctgtctcattgatctgtctaatgttgacagtggggtgttaaaatctcccattattattgtgtgggagtctaagtctctttatagatctctaaggacttgctttatgaatctgggtgctcctgtattgggtgcatatatatttaggatagttagctcttcttgttgaattgatccctttaccattatgtaatggccttctttgtctcttttgatctttgttggtttaaagtctattttatcagagactaggattgcaacccctggttttttttgttttccatttgcttggtagatcttcctccatccctttattttgaggctgtgtgtgtctctgcacgtgagatgggtctcctgaatgcagcacactgatgggtcttgactctttatctaatttgccagtctgtgtctttcaattggagcatttagcccatttacatttaaggttaatattgtgatgtgtgaatttgttcctgtcattgtgatgttagctggttattttgctccttagttgatgcagtttcttcctagcattgatggtctttacaatttggcctgtttttgcagtgtctggtactggttgttcctttccatatttagtgcttccttcaggaactcttgtaaggcaggcctggtggtgaactcagcatttgcttgtctgtaaagtattttatttctccttcacttatgaagcttagtttggctggatatgcagttctggcttgaaaattcttttctttaagaatgttgaatattggcccccactctcttctggcttgtagagtttctggtgagagatctgctattagtctgatgggcttccctttgtgggcaacccgacctttctgtctggctgcccttaatatttttccttcatatcaaccttggtgaatctgacaagtatgtatcttggtgttgctcttctcgaggagtatctttgtggtgttctctgtatttcctgaatttaaatgttggcctgccttgctagattggggaagttcttctgggcaatatcctgaagagtgatttccaccttggttccattctggccgtcactttcaggtataccaatcagatgtagatttggtcttttcacatagtaccatatttcttggaggctttgttcatttctttttactcttttttctctaaccttctcttctcacttcatttcattcatttgatcttccatcactgttaccctttcttccacttgatcgaatcagctattgaagcttgtgcatgcgtcacatagttctcgtgccatggttttcagcttcatggggtcatttaaggtcttctctttgctgtttattctagttagccattcgtctaatcttttttcaaggtttttagcttctttgcgatgggttcgaatatcctcctttagctcggagaagtttgttatttctgatcatctgaagccttcttctctcaactcgtcaaagtcattctccgtccagctttgttccgttgctggcgaggagctgcatttctttggaggagaagaggtgctctgatttttagaattttcagcttttctgctctggtttctccccatctttgtggttttatctaccttcggtctttgatgatggaactagagagggtgggttcctcccaggcaagcagcatggacaagaagctgtggggastgtggtcttctcatttctgtctcaacaacagcctgcagctggtcagttgggaccttcccaggggtgcatgggagcgccaagtctcccttctccctccttagaccagcacagcagcagcagccrtgtctctagatctccagtatctagattctccaagtggcgcccagctgaggttgctccaggatctgtgggatgcctgtgagattctgagtttcctttctggagtaacgtctctttacagtctgtagacagcttattatgtcaggcccaaggccctagttggtagagtgtttctgtcatcactaagatcctataagcctgtttcggagtgtagagccgtggggatatctccatatctctcatattgtttccccacatccaggagcctctcctggctgtgagtgagttccctgcctgggcaagctacctcgaaccctgtcgttaattacttctggtacttcccatctcttccctgatgaatcctagccttctttcctagattatctgttcaaaatatgagtatctacttagtattctggttccttttcatggaggaggcacatactacttgtgtctagtcagccatctgtgtttcacatatttttaaaagttgtgagacatgtactttctagtgtatttgttttattctggcagagagtacaagttgtataaattgtacgagttcagtaaacatgaagcacatctatttttattttgtctactaagatggtacatctaaagtgcttagcaactataagtagaccatggtaaaagtgtccaataactggtagtgattattatcatattgtcattctttcgttgagcaaaatgttaattataagttattttattatagaatgcattcattgttataaattatatttgttgaataaaagcataatctgattttttttcccttggcagcaacttgagttggtggaaccaagtggctggattcatgttcccttaactgacaatcataagaagccaactcgtacattcatgatacagattgctgttctagccaatcaccagaatggaagagacacccatatgagacaaattaaaatatacacaccagtagaagagagctccattggtaaatttcctagatgtacaactatagatttcatgatgtatcgttcaataaggtgactttaaaatgagaygaaaatcattaaacgtatctttgttttatcctgtatttaaataatatatcatgtacctttattgaacaaggcatccgttatatctaattttgtatatgtttaaaaatattttattgtaactttgacaaataaatttggggtcatattatctttattttctttaacatgtaataaagctcacatattttacattactaaaaatggatttgaagccaatcattttattttcccttgtatcaaaagaaaagagttccttgtatcaaaagaaaagagttgaactgaaaatttcagtatatacacaattataatagctaggtgattatttcattagtgttcatacattagagtaatggtttattgcatatttgagaacaagactgtgttttatcaatatatatcatctttaataggtcaaaattactattttttctacccagaggaaggttattcttttaatactggatcttttaaaaaacagtgtcaaataagcttagtgttaggttgtctgatgagaaccaatctaatatggggagtataattaattgtctcatattcaccttcacggaatacttacagccctagggttgtctgtatcctaatgatattatgtaaagattgcctgtataatctagcagtacttatggaagagttctagcagtacttatggaagagttattttcaaatttgtgtctgacattgtagcattccctgggcagtcatatatcccataaaatcgtaaaagtatgtgaaattttttatatatattaaaagattttaaagaaatacatggaaatgtgtttttttccatggtttaaaatgagtagatttgattttgtatgctgttttctctagatgtattactttttttcgggggatggttatttagccacagaatttacctagattcactcttgtttggaaaagattgctctctgtggttcatgcattgctgggtacactaaagtattaaatagtgaatattatttaaaaaatagtgtgtttgctttattctggcagagagtactaatttatttggatactatagaaaatggtttcactttttcactcattaaaaactctgctcttcttcctgtaagttctgggaagaattgtattattactttcattttgttgtctttgaagtaaaaagcatgataggcaatctgtgggatcaccaaaaagtctgtagccaaaacttatttggaatcaccaaattaagcacattatacttgtcagatgctgggtagggtagaagagaggattgaaggagaagaccaagaataaggactaaaggaaatggagagaatgaaggaaataagaatagaaatatacactaggcactgatgttttcctttagtctgataaggaaaacagtcaagtaaacaacagggtcttagtcttagagataaaagaaatctaatttttttaaaagtacaggaagttttattaataatgttacttcttactgactgcttatttattaagtttgcttaaaagaaaaaaggaggaagactaatgatcacatatactatctagtgtcttatctcctactatttattaatagtttgccaagagactcctaaaatcaggaggtattagaaggagttgagaaaatcaatatgttttctacttttattctccttacgtatttttcatatgccagctggctatcttattaggtgtgggaaaacttggtagctgaggattatgaagataatgcttccccttaataagaaaaatttaaaatacagataatgcattatattaacaaagcataattatctaaaacagttgcattttactttctaaagtgcaaattatatatttgaccaagatttatatttagaatatataaaaatcccttacaactcaacagtaaggagaaaaatccaatttaaaaatgagcaaaatatttgaacagtcactttaccaaggaagttatatgattggcaagtaattgtacaaaaagatgctcaacttcattagacactagtgaagagcaaattaaaaccacaatgagatactactacacagccactagaatgactacagtgaaaatgattattccacgtgttgacaacaatgtggagaaaatgcacttcgcactgctggtacaggcatatctcagagatgctgcaggttcaattccagaccaccacacaatgaagtgaataccacagtaaagtgactatcacaataaagtgggtcacagaaacgttttggtttcccagtgcttataaaattgtttacactgttgtagtctaaaaaaaaacaatgtatgtatacctttattttaaaatactattgctaagtgctaacaataatctgaagctttagccaagttgtaacctctatgcaggtggagagtctcatctaggtgttgatggctgctgacttatcagggtggtggttgttgaatgctgacagggctgtggcaatttcttaaaataggacagcaatgaactttgcttcattgatagacttttcacaaaagatttctctgtagcatgtgatgcagtttgatagcattttactcacaatagaacttctttcaaaattggagtcaatcctctcaagtcctgctattgctttatcaactaagttgatatactcttctaagtcctttgttgtcatttcaacaatgtgcacagtatcttcaccaggaataggttccatttcaaaaaaccaattttattcctcatccacgagaagcagctctacagtcatccaagttttataagattgcagccattcagacacatttttaggctccatttctaattcttgttctcttgctatttctaccacatgtgccattactttttccactgaagtcgtaaacccctcaatgtcatccatgaaggttgaaatcaattccttccaaactcctgttaaagttgctattttgaccttctcccttaaatcatgaatgttcttacggcatctagagtggtaaatcctttccagaaagttctccgtttgttttgctgagatccatcagaagaatcacttacctgctaatgccttatgaaatgtatttctgaaacaataagacttgaaagtcagaatgactgcttggttcatgggctacagaatggatgttgtgttagcaggcatgaaaacaacataactctccatcagagctcttgagtgaccaggtatattggcaatgataagtaatattttgaaagaatcttttttccaagcagtggatctcaacagagggcttaaatcatgcagtaaattatgctctaaacagtggtactgtcatccaggctttgttgttccacaggcagagcacaggcagagtaggtttagcataattcttcagggccctaggattttcagaatggtaaataagcattggcttcaacttaaagtcaccagctgcattagctgctaacaagagttattctcttccttgaaactttgaagccaggcattgactttcctctagctatgaaaatccaaggtggcatcatcttccaatagaaggttgttcatctacatggaaaaatctattgtttagtgtagccaccttcatcccttatgttctagattggggtgttcaatcttttggctttcctgggtcacattggaagaacaataattgtcttggacctcgcatagaatacactaacgatagctgatgagctaaaaaaaaaaaaaaaaaaaaaattcctggccgggcatggtagctcactcctctaatcccagcactttgggatgccgaggcgggtggatcacaaggtcaggagatcgagaccatcctgctaacatggtgaaaccccatctctactaaaaacataaaaaattagccgggcgtggtggcgggtgcctgtagtcccagctacttgggaggctgaggcaggagaatggtgtgaacgcaggagacggagcttgcagtgagccgagatcgcgacactgcactccaacctgggtgacagaatgagactcgtctcaaaaaaaaaaaaatgcaaaaaaactctttgtgttttaagaaagtttacaaatttttattgagctgcattcaaagccatcctgggccatatgcagcctgtggcctgcgaattggacaagcttgttctagatcttctggataacttgctgcagcttctccaccagcacttcctgcttcaccttgctcttagcaaatctttaccattaggttgatgcctcctttttgtctctgtggttccttaagcccaggttctcctctgctctactaaattattagagtgctgcctgtcttgaatgggggaattcccaaaaggattattctggcagtgtgggaaggcaggtagtggtttgtgcccaagggacctgtggaacataacagcatggtgctgctgaacagccactctgatgtggcatctcctttggctgagttacagagcagagtttccagggctggggatggtagtcctacctccctagtttgtctctgcttgtcctcacagatatttataccttcaggcagtcatgatgcttcctgtgtgttaaggcaggtacaggtctcttgcaagggaatccaagatgatgggaaagctgattgactactgatatggtttggatgttttttacctccaaatttcatgttgaaacataatccccagtgttggaggtggagcctggtgggaggtatttggatcatgggggcggattcctcaggaatggcttggtgccatcccgttggtgataagtgagttctcactctgagttcacaggagatctgattgttttaaaagagtgtggcaccaaatccctctcttgctcctgttctcaccgtgtgatgctggctctccttgaccttccaccacgattgtaagctttctgaagccctcaccagaagcagatgctggcaccagcttcctgtacagtctgcagaaccatgagccaattaaatctcttttatttataaattacccagtctcaagtatttatttatagagaggcaaaaacggactaaaacttctacctcaatctcatttctttccagtgtagaaattgtgagctgggggaaggctttttgcaagcttgttgcagggcagaattttcaggaggggcattatggatgtggaagtctgattctcctatcatctgcttgaagttttttcacttctctgtggtcctgggatctgtctcatcctcttttgtgatttctggattgttactggtaaaaatcttggcactgtgtatttgtatttggttttctgttgagggagtgaggccagcttgctcctatgctactattttttttttttaatttttcaattgttttcttcaaaggtaggcatgacagagatatactgccattttaaaaccccttcacctcacacttttatagagatgactgctgtccttaaaccttctgaagcaatctctgctagcttcaaacttctgtagcttccttacctctctcagcctttctaacattaaagagagttagggccttactttggattaggcttggcttaaaggaatgttatggctgctttgatcttctattcagaccactcaaactttctccgtatcagtaataaagctgttttgctttcttatcattcatgggttcactagtgtagtacttataatttcctccaagaacttttcccttgtattcacaactttgctaactgtttggagaaagaggcctagctttcggcctatctcagttttcaatatgccttcctcattaaacttaatcctttctagcttttgtattaaagtgagaaactggtgactcttcctttcacttgaacacttagaggccattgtaaggttattaattggcctaatttcaatattgttgggtctcagggaatagggaggcctgagaagagggagacagataggaacagctggtcgatggagcagtcagggacatatgatatttatggagtaactttgcaactgtatgtatgtggatgcagtttgtggagccccaaaacaattgtagtggtatggaacatcagaaatcactgatcacagatcaccataagagatataagaataatgaaaaagtttgagatagagaattaccaaaatgacacagacacaaaagtgagcacatgatgttggaaaaatagcattgatagacttgcttaatgcaggattgccagaagccttcaatttgtgaagaatgaagttatctgtgaagtgcaataaaattaggtatgcctgcaattaatatataactactttggaaaacagtttggtaattttaaaaaaattaaacatccacctactatgtgtaccagtcattccacttctacgtatttaccccccaaaatataaaacatatatccatacaaagacttgtatgtgaatcttcatagcagctctatttgtaatacatcaaaactgtacaacctaaatgttgatcaacaggagaaggtctaaacaaattatggtatatacatataatgaaatgctactcagcaataaaaatgaacgattgatatgtgccacagcacagctaaatgtccaaaataattattttaagagaagctgtacaaaaaagagtacatatatgtggtttcattttttataaaattctagaaaatataaactaagtgacagcagatcagttatataggatggggagtggggagaagtaagaagggatgaactatttggggggatgacagaaatattcattatcctgatcatagtcatggttttatgggtctgtacatatgccaaatctcatcaaattatacactttaaataggcacagtttattgtatatgaattatacctcaacagaactgattttaaa

SEQ ID NO: 95805 - DNA, 107674 bp, Homo sapiens
  misc_feature (1)...(107674): n = A,T,C or G
gaggggtttctccatgttggtcaggctggtctcgaactcccgacctcaggtgatcctcccgccttggcctcccaaagtgctgggattacaggcgtgagccactgcgcccggcctgattctgacctttttattccacacatctcaactgttgctgagctgtttcattctaggaggcaaagagcttttctggttgttcctgagatcaccagcctgaatctcctttcttgagcacccagcagtttcttttccaagggtatcggaatcttgaaagggcagcagattcttaggcatgggcggggagagctgctagaagacatcactgtcaaagaattggcaaagtcaagaatgtgccagcatccaagggtcaaaacgtcaggtgggacatcctgttccacagcatgatagccccagagggggtgccaaaaggatgacaaaagccttgtgagtgcccaggaatcaagtagagattaggaccaacccatcagagtgcaattaagcaaaagggggaatcaatttaaaggtgccagaacaggaaccatgcaaccaggcttcaggagaaagtaggaacgagggtcctgaacttcattcatcagggtcctctctctctcttttttaagacaaggtgacactctgtcacccaggctggagtgcagtggcacgatcttggctcattgctgcctcagcctctcaggtgttcctcacctcagcctccctagtagctgagactgcaggcacacaccactatgcccagctaatttttgtttgtagagacagcattttgccatgttgcataggctgacttcaaactcctaggctcaaatgatccagccgcctcaggctcccaaagtgttaggcttacaggtgtgagccatctggcgggagggacttctatctcttatctcttctcttcctccacccactttctcctatatcctcccccacttccaggtttctctggcccttccaacagcaagtatcgccaggagcagctccctaatctacatactacagatctatccacaagaagacagatggaaccactcttttcttctgaattctagaaccttaaggaagttaacctgagtggctcagcttggatcaagtgcccatcctggtccaaacaactgtagcagcacatctgtgtatttgtgtatcttgttcctccataatcttgcagtccggggaaagtgtgcagatggatgggtccctgaaaagcaagagttgtttagacaacgctagaggtgttcagttctgggagacaagagttgggccaggttgataactagcctaagagagtcggaatcagatgaataagaactagatcttgggtgacaacctagatcaagagtcttgaggttcagtcatttcaaaaagctcaagtctcattgcttcttggccttctggctaagatcatgtgcagtatctgttcttaccagtttaatatctgatacatcctctatctgaggataatataataaatagatttttggagcaaggagatggaataggagcttgttctgtccactctacacattggcctggattgcagtacctccaggaatggtgcaccctctctaccacccccaaaaagcccaagtctcaagaggtagtctggaaaaaagtgtttttggatttacctacatttttttttccaagatggagtctcgctctgtcacccaggctggagtgcagtggcgccatcttggctcactgtaacctctgcctccaggattcaagcagttctcctgcctcagtctcccaagtagctgggattacaggtgtgtgccaaccatgctcagctaatttttctatttttagtagagacagggtttcaccatgttggccaggcaggtctcaaagtcctgacctcaggtgatctgcctgccttggcctcccgaagtgctaagattacaggcgtgagccactgcgcccggcctaatttttgtaattttagtagagacgagttttcaccatgttgaccaggctggtctcgaactcctgacctcaggtgatccacccccgccctcggcctcccaaagtgctggcactacaggcatgagccaccgctcctggccgggtttgcctacattttggagatgctgcacaccatgtccctcttttcaagagtcacgtaagtatttacatatggaagaccctgagaaggcacctgggaaaaaacctgtttaactgtaaatataataatgtatgtatttgtatgtggagctcttcttttagtggattatctataaaccgtccactgttcccaatgcatactttggagacagacctacactaccagttttcacctgctagttatttttataagggttgggatggtccatgagtgaacagtcttgatttaaagcagtgtttcccaaacctcatttatttgcctatagccttcctggagtttgtcttatatgtccgctctgtgcactattcctatatgtttttatgtaaatcaatcacttttttaaaaagcctcatcccagttatatccttaaaacaatggttattttttctcatacacatcgaaatacatatctattagaattaaaatgcttgtccatgcactatcaataatctcctcaagtaccatatggtggggacatgtgtttgaagtgttaggagtcaggagtggtctctgtaagacagagtaagtcagtcaacctctgagcactgccagccacacatgctggcagagaagttcagcctgtgacaagactgcccggatatttccatgtctgtgcacggggatgtcctcggtctgccattgtgaagtctgtgctgttttcatgcctacctagtcttctttggaggggcctggaaagcaaatgcaggctgggtacagtggctcatgcctgtaatcccagcactttgggaggcaaaggtgggcagatcacgaggtcaggagtttgagaccagcctgaccaacatagtgaaaccttgtctctactaaaattgcaaaaattagctgggtgtggtggtacgtggctgtaatcccagctacccgggaggctgaggcaggataattgcttgaacccaggaggcggaggttgcagtaagcccagatggcaccactgcactccagcctgggtgacagagactccatctcaaaaaaaaaaaaaaaaagaaaaaaaagcaaatgcagattctccctgggaaacggggggttgggagagtggagtagtgtggatgcattgttattcctgaaggccgtcctcaaattatcttggactcactgcagcaagcagatgcctcatcttctggccagggattgatcctgagatgggaagagtatgagaagagacaccaacagcaaggcaaaactggctctggcagcttgcttcagagaaagagtatagctttggagtcaggccgacctgagtatgaatccaagactcagcacttactaggtgcctgccctcaaaccattattttttgatagtcattacatacccacaatgatcaccatggagtggatgaggaaacagggactcagagaagttaaacaacttgcctgatatcacacaggtaacaaacagcagagcagaattcaaacctaagttgatttgacttccaaatgtgtgctcctaaccaaagcagggtaacctgctttgatttgcccatttcttgagcacctcttctgtaggagggcctgttgctgggtgctgggaattcagtggtaggcaagatggacaagattcccccctctcacagaccttgcttgctataggggaaatagacaggaaaccaattactacatttgtaacttaataacaagtgtcataagtgttacaaaggagatagatactataaggcaccttttatttttatttgtttatttattttttgagactcactcgctctgttgcccaggctggggtacagtggtgcggtctcggctcactgcaacctctgcctcccaggttcaagcgattctcctgcctcagcctcccgagtagctgggattacaggtgtgaaccaccacactctgctaatttttgtatttttagtagagacagggtttcaccatgttggccaggctgttgttgaactcctgacctcaagtgattgatccacattgacctcccaaagtgctgtgattacaggcgttagccaccgcgcctggcctataaggcacccttggtcagccagtggaagcagggtcagtagtgcgccggagagtcactttgaaaaagtgatatttaggttgatcttgaagcattcacaagatgtggtaaacacatctaatggtaaacatgtgatggtaaacattagatgtgataaagatactgatggtccactggatgaacagttttcatatttacttccaaatgatttcatagatattatttcacagataacacttaggatgaaggtaaataaaaaggagatcaattaaaatatgaaataataatagtgaaagtggtaatagatgtggcaatatccacaaaggagtaatggttagattagcatattgagaagatcactttggcaattgttggaatgcagtttacgagagggccaagaatggaagcagcaatccctgttagaagtgtagtgttttggagtgcggtgttttttgttggtttgttttttgttttttttaaaccaggtctcactctgttgcccaggctggagtgcagtgcagcctcgacctcctcctcgggctcaggtgatcctcccacctcagcctcccgagtagccgggactacaggcacatgccaccacaccccgccagtttttgtatttttttgtagagtcagggttctgccatgttgcccaggctggtcttgaactcctgggttcaagtgatctgccagcctcggcctcccaaagtgctaagattacaagtgtgagacaccacccccagccagcacattgtattaatccaagcaggagaacgcagacttcaaaggcttatgggcagcagagagaagtagatgaagcaaagagatgcaatcagcgggactagtgggaaatgagggaaaggaaggtgtcaggatggggctttttctagctgagtggagttcagttcattcccagagaagcttgagaggtatccaactatagatgcaaggtagctggctgttggtcccttgtctttaggacagtttgacttttgtaatacaggcgacctcacagagctattgtgagaattcagagctgggcacagaatagatgctctataaacggtagttctattccccatttgccccgtcctcccagcatgccagggatacaggggcggatagagacaggttcagttccctttggtctcttgcattcccccttccctcagcacaattcctgggctcatagcggatgctcaataagtatttgtagaatgaaccaaagaaatcagacccttggtgacccagggctacatgtactcggcggaaaactggggttaaaccggacccttggttggttgaaaaattaaaataatttttaaaaagtgggcgtgaaataatccagaagttggagggcctggacaaaggctggggaggggactcctcccaccaggcggcctcagggtcggcttagcaagaaaggaggcgctggggagacctctggggtcccagctgccaaggtactcgccgctccaaggagatgcggacgccggataccagctctgcccaagattgctgggtcccgccgcggcctttaaaggcccaccacgtggctgcgcggccagccctggtccggaggcggtgcccgggtggcgcctgcgcactgcctagcagaggggctggggttccgagaaaaagcgtctggagaggaaggggaggctgcttggggtgggacgccgtgggaggagtcggctccttatgcaaatcacagcggagcgcgcacggtccggaggcggggcttgcgatgcaaagacaggtccgtctggcgaacagcgagggggcgggccgcaaccctctgcctctttccgcgagcgctgacgtcgccgacgtgttgtttaaaagcggccgcgcaggcgcagtgagcccaaatgcgaacttaggctgttacacaactgctggggtctgttctcgccgcccgccmggcagtcaggcagcgtcgccgccgtggtagcagcctcagccgtttctggagtctcgggcccacagtcaccgccgcttacctgcgcctcctcgagcctccggagtcccmgtccgcccgcacaggccggttcgccgtctgcgtctcccccacgccgcctcgcctgccgccgcgctcgtccctccgggccgacatgagtggggaccacctccacaacgattcccaggtacggcccggcctgaccctggcggccccggaccccggcctggccgtcccgcgacccccggcgcaggccccgaccccagccccggcccggcagctttgacaggccggagcccccggtgaggggccgcctgccggagtagatcggctcgctaggccgcgagcgagggccgcgaagttacagttcgaggcagggatggctgccctctgtggccacccccgggtccccgtcctccccgggggcgcagggtgagccagaccccggccgcgcgcgctcgccgccggaggggttaaagtggctgttgtttgatattctctccttttctttttccagatcgaagcggatttccgattgaatggtgagtgtgccccctgcgccgactccggggccccccagccgccggccgcctcccccgcgccctgccggtgccgggcagaggacagacatggcgtcccagagactaagtcccggctcctcgctcaccggccccattgttcccatcgggccgcctcttgaccccctttccggggaccccagctcctccagatcccggccctcccaagaggggacaacggagaccccgtgtcgtccgccaccgggcctcgggcggtctttccgggccgggattcctcccgggaaagtcgccttgtcgacggtcgggacttagtctctgcgccattttctttttctctctcctctcctttctgtgcctgtgtctctttctctccctccctcggctctttccttgagctgcccagaatgagctttctgcagagcaaagccgtataaatcacatacttcaccagagagggaaggctgggggactgaattattattttttaaactttattttgggggttattccctttatgcttcatgtttgtttccttttctgcttccagaatgaaagatttccttaagcaactgttaattttttttttgataggctgtttatgataggaattatggctctaaaactaaagccacgctttgtggagttctttatatttccaggttgtttttcccaagttacgttctttgcaaaggtagcagtacctccctaaagaaagtttgcaagttctctgtgggtcacccaatgtaaatgttggatttttaaaaaattatgttagtcactggaacttttcattgtggtcgaggttcccaatgcagtgtttttctggaaacgcagtttagtgtacttgttggaaggaaagattgttgagcatctcttgtggacctggtgtgttggccttttcgtttgggttgtaaggaggaaaaaaagattttatttattgaagcaaagagtgtccagtacccacccctgcttcctgttcattctttttcacgagccactgtttttcaggaatcaagaactggctttttttttttttcccaattctttatgtttttgaacccttttcagccaaatcaaggcatttattcttactgtatttccacttcagttacccagggaagagtcctccaataaaaagctcatccttgcaggctttcgaacaaccctgttgaaggagaagttaccttctgtagtgtgctgggaattcccactgattttgatggtacataatcctgctcaattgagtttgggttccgggaacctctccaatgggagaagttgatgagtaggttttctaatgttgtaatcagcagtccatcatgttagcctgctctactgagagcaaccttatgttcagagtttgaagtggggcatccagcaggagatggtactcagccaggagagaatctggtttaaagtatggcatttcttgagcaccagatatgtgccaaccactgtgcttggtgctagagctgatcctgtaaccataacactcccttgctctcaattcagtctattgggggagacataattagttaattataaggtaactactggggcatatgtgtacccaaaatgctttgaagtataggggagttaattttgtctgagggtggggaaatttctcagaggaggtgacttctgagctgggggttgtggaagactgggcgcagagaattgtcaggggttggagtgtttcttaagtacgtttaaccaacctatcacgattttaaaagagggaggaggtgaggcctgcagtttagaaagccacagtatagacatgtttctttgggatacaggagcaaagaaaggatgtgcaggtgaggatgtaagaagtccttttgaccttgctagaggaaggtgggatctttaatatggaatgtgttcttttggctgtcaggctgggctgagtaggtaatgtaagtaatgaaacaaagtttagccctttcttgtgagaaagttaacttacatggttctcacctaagtcacgtgaatgattgtgagctggctaggttattgatctttactgacatttttatagaggctgaagtaatctgcgtatgttgacttttagaatgtgttggctcacatttaatagcaataatagctaatatttattgaatacttactgccaggcatgaatctcagctctttccatggatcatctaattaaatgtaatccttggaaggacccttgtgagttaggtcctgttatttctgttttgtagatgaggaaactgaggcttcagtgtatttactagcttgcccaagggctgtgagttggccactctaaatcccatgagctgagccactatgctagagtgatactatatgatactagcatgaaaaaataaaaagccacaaatctctattttcttacagagctgaaaaaggagagaaggaaggatttgataatttgtcatttgctttttatctaaacatgctttttgaagagaatctgccaccataaagttctgacattggtgtaattattctttgtgaatattgtctggaagatgtggtgttggtaactatgcttgctatctcaagtaatacattgttaaccagtgattgatttatgtaactatgaaaaamactttaaaaaaagtagaaatcaatgtttaattatgcccagacatgtcattattgaactttgtattaagagattgtttaagcgtgattttaagagggcctaacccatcttacagattaactgtacaagttcatatattaaaatcaaacgtctctcattttgcctgccctcatcccctaagatataaaagattcccccccgtccccccactttggagctcattcttcgcaatatttaaaattgtagctctttgcatgtaatttagaacattctgacccatactcaactgctgggagactctgttatttatwtttaaaatgttgacagtgagttaggaatttggagcagaaaccatatctaagtctaagtgaaaagacttcctaagtattggtagaactaactgtagtggggctgagtcattattacagtactgtacaggctgcgtagctatctgtagaattgataatggtaataccaggttaaagtgttagcgattcttctgctgtttcagaggtcttgaagtttttgcctgtctgctatggagatagggagttctcccccatttgacccccttagcaaagcacaatacttggctccatcagtctttagtctaagaagtgatatataggatcatggtttgacatcatcttgtgctgattctggttggcttaatggaatcaaattggatgaaggtaattaaatatgaattgtttctgatgctaatagatagttgtacttctgtctgttgggtatgggttgggatgggcggtagcatagctgattgcggtgggggaatttcagatagctgatgatgtggctatctgaaaattgccactacatttttaaaactgaaaagtgatggtaccgccaaatgaaatctgcagcatcctcagactcaatcaggaaatacttaagcattatgctccagggtggttttcttcccttacattgcaactggactccttgaggcacctttttagaattagtgagccgctaggatttttatactatgctttgacataaaagaaagttgcttgtcaatatgtgtttttttagtttaccagcatatcagatctcacaaacaaattttaggctcggattggatgtttctagtaaaaacaagaaaatccaggcatcactaaaagaatcagaaatacgttgtggcttgaaaggtgcaaactaaataatatagctagcagtaacggtcaccaactcctgcttttctttggttcagtagatagagtaaaatggaaaataggaaaccaaggtcagtccccaaatctcattttaaccaatagcagcaaaaaaaaaaaaaaaaaaaggaattgagtctgactttttccccttgctgtcagcataaagatggggaattgagagagttggaaagacattcattagtttgttcagattattaaataacatgtcttaaagtttatattccaaaattgggctgtgaggtttttttgttttgcttgttttcagtgcatgtgtggggtggggaggtgcaaaaaaatgtttgccttctaatatacagctttsttgtatattaattatatagtaacagttgtccctgctgctaatggtatggaaaatgattctgttgtgctttctgaatacatatcattttagaagtttcagattatactaaaaccatgttatttcatattagttggacatgaatgcatatttatatgacacatcattatcaacttttgccttttgccatctttttagtgcaaagtaaaactgatattcttcaaatccaaagtcgtttcctcagaagtgtgttttgtgagggattgcatctttcccatgtgaaactgtgtcgaactccagtaaactgtgtttgcttgggaaaatgaattcaaatgtaattagtttgaatgaagctgtggaaatgtttgaaatgagtattttgacattggacctggaggtttaaaaaaaaaaaccctattgaaagaatagtaaaatatattggatgtggaggtgagagtcagttgagtgaattttctgtgttgtatggtttagattatctgactatcccttaattattttgaaaccattaactttggataataagggcatttaggcaaacagttgacacatggatttcttaaggtaaaaagtttagagacttccaaactagtccttaagaggcgaatgggtattgtgtttaaaggaagctttcagattgtgtttaaacttcgagtagtaatatttggaactgtcttttctccctatttccatgcctcatacatctcaagtttgagcagcagctttccatccccatggctccaggccaatagctgcagtagaaaatctaaaatagaggccagggttggaataattagcattttgccaacccccaccctccctgccacctgcctatctagatgtggacagtatgtgctgtgttgatagcatagggcctgggaagggtggagagggatgtaaatgagggcagggtggacaaagtttgattgggggttgcggggaagcttgtagaggaatgtctgttagatattgatggtattttggtggcgttatgagaaatggctgatagtttgctgaaatgatttaatagtaaatagatattgttgaacattttctgtgtgtataggaaagatcctagatatttttcacactgggagagaagtgatgttactggtatctcatgcatatctctggagtatatagatcgtaatatcaactttggctatctgtatcgaagtttgtattaactgtctttatgtgtgtcatttatgtctcttaacgtttagtaagaaagaaattccaaggaaggtaggcaacttttaattttaacttctttcctttactttttttttgggcggggtggggggcagacagggtttctgtttgttgcccgggctggagcgcagtagtgtgattgcagctcactgcaacctctgcctcctgggctcaagcgatcctcctacctcaccctcccaagtagctggaactacaggtgcatgtcaccacgccgggctaatttttgcattttttgtagagacgaggtttctcgccatgttgcccaggctggtcttgaacccctgggctcaagcagcctgcccacctcagcctctcaaagtgctgggcatgagccactgtgcctgacccttaatttctttttggtaggtattcatttttcatttgttgtcttaagcttctagtttcactcacttacctgtctgctaaatttttctgaaatgtgtaataaatgttttaatttaccatctcccttctacccttcccatcagatttggggtggggaggcatctctaccaggcaattaattcccctctgagcctttgaaattaacatttttgtttctgtggattcaaggagcctaaagaacacagttcattagcattcctaagaaacacctaggtaagctccaacaaaagatgttaaagcaatcagtatttttagggacttcagatctcctgtatttgttgttgtaaatgatgatgttgggaaaagaatttaacagatccctgggtattctgacgttttcctatattttaagaacgaaaccgacccagccagcttgtggtcccattattctttatattgtttttcttagcacacgctagcaaagatagatgcctaggacttttcttggctattggagtttatagaaaaaaagttctttgttgaaggttagtcctccaccagaataatacaccctttttccccttagtagaagtccaaatgttaatcttgctatcatatatgtatgaatgcccagatttataaagctttgtaggtatattactgattgtgcaggagactaatctaggaggcttcaggatcattgtcatttgtggatctcattggctaagaccttttacttaacctgactccagtaaggtagcccctttgtttccttgtagttgactatgtgagctcttgccaagcagcagaagtgggatgaagggaactaattttgaaaacttaytaggcaccacatttttatgtgcattaaatctgaattgaataaagataatatagattgcataggcttatggggagaaccagagaccaggaaaggaaacgtttttttctttttaccctttatgccttttcatgtcccctttttgataacatgctgccttggtccagattctggaaaccccactcaggctgtaattggtaagcttctagtacagatgtcagaacctgcccttgattatctgctgttagagatagcttggaccctttgtatgtggaatgttaggtctaggggaagagtgggggtgtgaggagacagctgtggtaaaatagaaaattggtgtaggattccgaaaaatcgagataagtccctgttcttcctatgaaacatgatctgaccactgaaccttgttttcttatccataagcaaggataatatttatgtttcacaaactgttgagaattagataagtatatgaaggtgcctctctgtcctcattgtaaaatgtaaactttgatgagacagcctctattctcaactggatctttattttgaatgttaggtttgaaatagtgattgatgttggggagtctgtctttcattggtattccctgttaaagttttaaatcttcttgacatttacacagtgaattgtaacatgtaactagtgttgttgagtctttacctaattgaatcagcagagcctacactgatgtcttccagttacaaagcggtcactgtaaagtaaaaggtgtcttcatatctaggtttgggctgagaaggatccaattgtatatctagttcctacttttcttttyttttttttttttttgagatggagtctcactctgttacccaggctggagtgcagtggcgcaatctcggctcactgcaagctccgcctcccaggttcacgccattctcctgccttagcctcctaagttgctgggactacaggcgcccgccaccacgcctggctaattttttgtatttttagtagatacagggtttcaccgtgttagccaggatggtctcgatctcctgacctcgtgatccaccagcctcggcctcccaaagtgctgggattacatgcrtgagccaccgcgccaagcctaattcctacttttctaagaatgtttacagcaaagtggtcattgccaaaggaacttgtagcagtacagaagatgggctcagaaatgaaagaagtctattgatgtgactaatttctcaaccatttaatagaattatggattttctattaaaaataacttgacccttttcgatgcatttaataaaatgccaagttcattatttgttaattttttaaaaccacaaaattcaatatgtcttgtgtcagcatattttttcaaaggccactattttacttctcccccaaaacgtttttaaattaaacagagaactctcaaagcacctgagaattacttcagtttttcatttattcaaatagttgcttaaagtgaccaacttggttttctttgaaatagtaattcttgggaataagaataccttaaataatataataaagcttatgtgtgagaatttagtaccaaatgccgtgttaacagttatgcgtgagtataggcatttgggagattccatgaaaaaatttgataaagtcagtagaaatttcagtaatggctcataagtctagctaatgctgaatattgaattgccttgaatttgtttttttggaagtgttacttaaaggaaataaacaaaagtcatttaaggatgtgttcactagtgttcattaggtttaagccaaatggatcttagtagagatcttacgccattcagcaaaaggattatcacagaagcatcacaacaggcgcagacttaaattcaattaaaagtaggcaggaggacataattttgttgtatagaaattatggaatagggcctaattttaaagagtcttcaaagataaacatatcaggaaaaatatagctcataaaatatggggaaaaaaatctgggaagatgagtatttgttaatgctctgtagctccattgccctcagtatacaaggaatgtgcccacaatagggttggatttaaaagtcttcaaagctttggtctctttttctttcgttttcctctgatacagaatgcgaatagtctcccggcctccaaccccctctacatccccaccaccccataatagagacttaaagggaatttaaattcgagttcttgagcttctgctcaatggctaggtctttgaacaagttaatatcagagccttagttcttcacctataaagtaggtttaatacttaccttacaacattgaggattaaagagcatgagaggattactttatgaaaggtgaagcttagaacagaatttttagttccttgccaatgctaaaaaacaacaacaacaacacctttttcagaaattgctttattaggcttttgtacaaagggaacatctttactttctttaaatttgcacatatatctattgtgaaattttaaccaagctggaggggtcactagggagcattgagtatgatactattgctgtaaatcatagaaaggctggctcaggagggtactgacttgctttgactttgcggcaacttcagttgtccagtgacaaggcttgctgcatacacaccactttgtttgtttctcataccttaaattgtggattaaaaatctttggggcaggcctggaggctcatgcctataatcccagcactttgggaggccgagatgggcagatcacttgagcccaggagttcaagatcagcctgggcaacatgggaaaaacctgtctcaacaaaaaaaatacaaaaattagccaggtgtgttggtgcatgcctgtagtcccagctacttagaaggctgaggtggaaggattgcttaagccccgggaggtggaggttgcagtgagccgtgagcatgccactgtacctaccccgttttgggcaacagagtgagaccctgtctcaaaaaaaaaaaaaaatcatcatcatctttggcagtgattaactttctcctttcacacttgggatggtgcaatatttggcatctacttaggaagctaaaattttcacgtttaattgtaaatggaaaagtttaagttgccatattcattcatacaaacattcagaaagtgaatattgtgactagacacagatgaacaagacaaacccacatgcctatcaggatgaactttgaaattagtacgttgtaggtatatacagtcacttcctctgttgagatttttcattaggcctcagtacaaaggctgctgtcatacaacatgaatggggactggaggtactttctggcagttaatatttcactatcagtgcaagagagtgacgtctccatttagtcctaatcgtgagtttttccccccttaaagaaattggagacctaggaccttggatttccaaagatttccaaactcttatttcttaaaatgttacaaaaaatggtttttttttgtatacctatatacccattaaacttttttgcctgaaataggcaaaaagatttaagttctgtgtatttatttcctgttatctttttgtatcagacatccatgttgcatgaattttagaaaaatagttttcagctgggcttggtaatggctcatgcctgtaattccaccattttaggaggccgaggcgggcggatcacgaggtcaggagatcgagaccatcctggctaacacggcgaaaccccgtctctactaaaaatacaaaaaactagccgggcgtggtggcgggcgcctgtagtccagctacttgggaggctgaggcaggagaatggcatgaacccaggaggcggagcttgcagtgagccgagattgcgccactgcactccagcctgggcgtcagagcgagactccatctcaaaaaaaaaagaaaaatagttttcacatttcctgagcaggtaggttgtcggaatggctagagatggtcacattctgtgtgagaaatcatgtgacaatagctaattcaagtatttgaaataatttaaatccttgaactgaattgattgaaataaagtatttaaaatcaccatcttcacatatttgaagaactaaaatcttagagaataaactctacttaaagtcctgggaaactaattttatgaaactattgaaatattattgccccttcctaatccatgaagtatcttgatatgggtaatacataaaagctgttaaagctcttcagagaaagatgcagagtacatagtggtattacttacagtggtttgaatactagaaaagtgatcgggacaaaatgttagacttactgtgccttaatcatacagtcagtgcatttttgcaggaatggatgcaatgtaagtagttcttactatttaataccagaaatgaagaaacagtagcttcttaggaattgattgtggctcaggatctatttcttaatttttaatgcttccacttaaccaggagaggaaagggaggagaaggaacacaaatttgttagtctttataactactggcttgttacacttgatttccaaaccacaagtgctccagggccaggcaccccacactgagaagtccctaagaagtgcatttattggaaatttgatttttaaaaaaaacctcatctctactaaaaatacaaaagattagctgggcctggtggcgcatgcctgtagtcctagatactcaggaggctgaagcaggagaatcacttgaacctgggaggcagaggttgcaatgagccgagatggcaccactgcacttcagcctgggagacagcgaggcatcgtctcaaaaaaaaaaaaaaaaaaaaagaccatgttaggttctgtttaagtagtatttcttataccctggaatgaatgaatgcctcttagtctttagaatttcataaggtttagctaggtatactcaatacttctccattttactacatatttttaggaaggcactaggtattgtgaactccttgagagttctaaacatctcagagcctgtttgagtattgatggcatagtcacagatactccatttcctttctagggaagtctgcctgcattaccacgtaaccccaagccagaagtgtaaccacttttctctgacttgcattgagcttttgttatcctcttttaatatttcattctgtagtagtctgtatttatgtgttttccttattaagaagtggccagcactttgggaggccaaagtgggtgaattgctttagcccaggagttctaaagcagcctgggcaacatgtcgggaccccgtctctacaaaaaaataacaaaaattagccaagcatggtggtgtgcacctacagtcccagctacttgggaggctgaggaaggaggatcagttgagcctaggaggttgaggctgcagggagccatgtttgccctactgtgccccagaacgagaccctgtctcaaaaaaaaaaaaaaaaaaaaaattaagagcactgtttcatcctgtatggtcaatacagatgcttttaccaaatgtttcagttgtgaagtgcaaactcctttctccccccagctggttgaagatcaagtgggagacttttgagagcttaacagtaagttttccttgtttttctcaagctgatatgcctaaaagtcacctggggatgattggtgaaaatacatattcctactcgtacaccttgaagttgattctatagtggaaggtactgaaaatctgcatttttaatgtatcttcaacaatcccaaatgattctgactaatgcaggtgacccataacctcctttggagaagttgatctatctgaactttactatcttatttggctaaagatctatattttgcttcattcaattacgatactccacaggttaaggtataaagcttacagggtgatgatgatgatgatgatgatgattattattattatttggagacagagtctccctttgtcgcccaggctggggtgcagtgacacgatctgggcttgctgcaacccccacctcctgggttcaagcgattctcctgcctcatcctcctgagtacctgggattacaggcacaccaccaccacacctggctaatttttgtatttttagtggagacggagttttgccatgttggccacgatggtcccaaacttctggcctcaagtgatccggctgcctcagcctcccaaagtgcttagattacagtagtgagccaccgtgcccagccaagattacaggatatttttaaaggaccagaacagtattttttaatatatgtttataaaagcttgatacttcactctaagttatagtttctacctttcagtgagcatttaccaaatagcagatatagttaactgcctttgcagctgttttactgtgtgtcagaatcctaatcctttctcctacttcagtgtttaacaagccatttaattctgatgttactttttcggattgggtgacaagcagagcacaatgagcagggtttgttttcatactaatactaggatggttaaatcaggactttagaaagtaagtggaataatttagtggaatactgaaaatccagtctgtggagctcactgcctttagattaaattagttggggacttcagctcctgatggtactgattgaaatggaagcatttgaataaagcagtatagttgacgcttgaacaacacgagggttagggatgctgactcctatgcagtcaaaaattcgagttataacttttgactcctcraaaacttaactaatagcctactgttgaccagaagccttactgataacagaaacagtcaattaacacacattttgtatgttatatgtattatatactatgatctcacaataaagtaagctagagaaaaggaaatattaagaaaattgtaaggaagagaaaatatatttaccatttattaagtgaaaatggatcatcataaaagccttcatcctcattgtcttgttgagtaggctgagggggaagaggagagtttggtcttgctgtctcaggagtagcagaggagaaagaaaaccctcatgtaagtggactcaagcatttcaaacacatattgttcaggtgtcatctgtggttctcaatgtgtggtttcctgatcagcagaactgcattgtttgaaaacttgttggacatgcagattctcgggcctcacccatacctactgactcttaaactctgggagtagggtcttagccatttgggttttaatgagtgtctaccaggtgatcagatgtgcactgaagtttcagaaccaatagaatagagcaagataccagttttgtagtaattcaacctcttaagcagtattccttgttctttcacaaggaaccatgtatggagttcattacttgtgctttcttacagttgtgaagttggagtaattcataatcgggggaggatcttctggagtataaaaaaatttaaggagcagttatatgattaacaccagaaaggtttcttgtatttctactgaatatatgccacttcagtaggagaggtgtgttcagtcttattctttctacagctagtggcccagagaatggcctgcgcatttcaagccctgtcaatgagaattgtctagacaaagaaggtcccttggttgaattagtaataggatacatgaaacaatgtgtcagcacacttaaagtctttatggccagacaaagtatggtcttagtgtgtttggaggcccctgaccattggaaacaaaggcagtttaggctgagctgtggatccgcacgtaggccagaggtttgtagtcactctcactcttcccaggcattaagcgttccttaatggaagcaaaggaggacaagcctacaggaatgggcctgccctaattgagctggcctgagaagatacattttcaggttagacaagtcctttttcccttttaagttctgcctcttgggaaagaagatgcatttgtagtgcagggatgtccttgtgaaaatgtgacttgttatagagcagtatttgaaatgcaagtgcccagccgggcgtggtggctcacgcctgtaatcccagcactttgggaggccgaggcaggcggatcacctgaggtcgggagtttgagaccagcctgaccaacatggagaaaccccatctctactaaaaatacaaaattagccaggcgtggtggcagacacctgtaatcccagctactcgggaggctgaggcaggagaatcgcttgaaccctggaggcggaggttgcagtgagccaagatcatgccattgcactccagcagggcaacaagagcaaaactccttctcaaaaaaaagaaaaaaagaaatgcaattgcccatcttaagggtcttgtactagttaattactttcagagataagtaaaaaaattccagtgttgtcttctattaagagagcaaaggtagttagtaaaaatgggatttgtttgccctgctcccgaagcttaaaataattgctctatctcagttttgtcttatgcttcggcagactaataacttcagttgaaatgttttctgggcaggtgttcattgagggcctgattctccagaggttctgtgcagaagcaggctgctttgagatagccagcttagccaggcctgggaaccacacagaatagtgcagtaccatgtagggaaaagtccttgactgggctgcaataggcagagtggagagtgctaggaagcagagtattttcctggataatttcatccagtagaactttttgtcatgatggaaatgtcctatatttgtgctgtccaatatggtagctattagccatatgaggtgtgtctgtgtgtgtgtgagtgagagagagagagagagacaagagtcttgctctgtcattcaggctggagtgcagtggcgcgatctcagcttactgcagcctctgcctcccaggctcaggtgattcgaccctcagcctcccgatagctaggattacaggcgtgggccaccacgctcagccagtttttttgtatttagtagagacggggttttgccatgttgaccaggtttgtgtcaaactcctggcctctagtgattcacctgcctcagcctcccaaagtgctgggattacaagcatgagccactgcacctggcctatatgaggttttgagcccccttgaaatatgtggtaagtgggaccaaagaacttaattattttattttattttattttaatttaaatataaactagccaatagtggctaccatattggacagctctagataaaatttaggtaagacccaagagattgtggtttagattctgcttggaatatgagtgattggggctcttggaatttaaaaatccaaagacacgtgtgaatttgatgttatgagtttgaataacagccttccttcagtatgtctacattgttttatcctgactgacattgtaagtcctaagaggacttacaactggtaagtaaagttgtgtttaccaaagcagttggaagttcaggcagttgtacgtwttatttgaccccttagagctaaacaggtgaaaatttcaggtcctttggatgaagtaagttctcattttatctcagcaaccctatgaggtaggttatgtctgttgcgtagttgacaaaacagatgaacttatatttatgtacacctttatggattagtagcctttaaaatggttagttttatcccacaacttcatttgaaattgtaagtttctagcatgttgcctataacaagaaggtaatttatttctatttgttaaattgttatcagtaataagtcaatatcctactataagtggtagagaatcaaagattgtagactaccaaatagcacccaagaggctaattcatgcaaggtgttgcttatagtaaaagcagatcagaactcagctgctgtatgccatctggggttatcttctcacttgcacgctcatgaccagtgtaggctgcatcttataagtaatctggctcacagttagctagacatatattagtctgatggaacaaaatccgattgtagctttgaccactatgaggaccactgtcatataaggtcttagataccaacttgagtaaattgcttaaggactgggaatagatccagattcctccaggtttagcttcaagttgtgatcagttttcgtgggatgcaaggagaaaatgaataggaatgaaataaatagctgatatttgaacatttttaatgccctaggcagcgtcttaagaattctaagctttcatttatcaatcctgaggtagttaacattactatttccagtaatgttcactgggccagtttacttttgaagaaattgaatctcacggtttaagtaaagtaactagctcaaggctatatagttataactaagccacagagcagggaggctaatctaggcctacctcatgccacagcctgagttcttagttgtgatacaaaacaaggtaaagggggacctggggtgacttagttgcctcctgagaattctgggctgtggtggaattacccatcagactgggggcgcccatctcttcacttatgatgtgtccttaacagactaaatgcaggctctgctgcactttaatgtaattctttccctattaagggaagcttgcttgcctttgcagcaaagccccctggatagtttattttttagcagttcagcttgtgcttggacccagttgttccagaaatcagtaaaacctatttgagtattcaagaaaaaggatctttttgttaactaaggattaactagaaaccttattttataagggttcctgaagtctgcttatttactaaggaatttcatcagaggtggttagcattttgtgaacaagtatgatgttgttcccacttcaaggggaataaataacaaatttaaccagcttgctgcttaagaagcagaattagcagtgggccagtcattggcctctcttcagagttctcatgtgactcacttagttttgcagagtgaggtagattttaaccactttcaagtcaagttgattggccattcatgagctgtgtgcagggagagaagagagacgagaacaagttagcagaaagctgaggtgtgttagacgggagttgtaggtaagtcagggaggatattcttcatttagaccctgagcttgagtaagacacctttctacaggagacattgcggatactttctagttagtactagcgcagtgttctgcaaactacacctgcttttgtgtggtccacgaactaagaatggttttgtatttttaaatttaggcatgtgccacataacaagatttctgtcaacaatagaccacttatataatgatggtcccataagatagaaggtggtatttttactgcctcttttctgtgttgcagatacgttcagatacacaaatacttaacactgtgttacagtttcctacagtactgtaacatgctgtacaggtttgtagcctaggagcaacaggctataccatatagcctaggcggtagtaggctataccatctaggtttgtgtaagcacactatgatgtttgcatgacaaaatcgcctaatgacacatttctcagaatgtagttggaggaaaaaaattgaaaggagagtattacttcatgacacaggaaaatcatttgaaatacaaattccagtgtccataaataaagttcactagaatgtggccatgctcattcatttacatgtaatctgtggtagtttttgtgctactgtggcagaattgaatacttgcagtggaacttgaatgggctacaaggtgtatttagtacctggcccttcacagaaaaagtttgctgacctgattgaatgtgcttgtgtgtatcacaggaagctcaccaggactcttggtatgtagcctctagctcccaaaggcatctgagccccactggcaggactcagttacctgtctctgtctaagcatgactccacccattagcgtccagacaacgaagaaaacttctattttaaagagcttgactaaccccctccttattatctaagttagagtagctgtgccaccccttaagtagcttttccttcttcctttcaaataggggttggaagagtagcaggtgagaacaacctctttcttcctcaattgtagagactcaatagtytaggctataaattaaaaaaaaaaaaaaaaaattccccagaggctgactcagcacatgcctgccttttaaaggaacagagagacccaattggaatagaaactgaaaataaaatcagcagcacatgaatttttgtaggtggctcgtatttgctattaatattgctcagaagactcaggaataagaaataataatgcagggtttcttcaaaatatggttctggacagtggattatagttacctggagagcttgtgttaaaatatctgaggatgattccaagtaccagggcttatacacaggaatacttgagaaccactgcactcaagcatttaaaattttccttttacctaaatccacatgggccaagacaatttttaaaattcatagaattcatgtgaccagacgtaaggggtcaataaaggtcattttatagatcagaaaactgagacccaaagctgagaaataagttatctaaaaccccaccaggacattgcattaaaggagttgctctaagcgtgtcttcttactattagaaagtgaaattgacttttaaatctgtcacttagtttttggcataataataaaacaatgaacagtctgttctggctctaattgcgcctagaatctccagatcagaagaccttcttgtagatcaagtaacatacttctctgaaagacagtttgtcggtcctatcactgaagtctgaattatttttttgatttttaaatataattaattggtccctggaaatgagaaccagaggaagataagaagatgaacttgaatttaaggaccataatggaaggagtgggatgggaaagaaggctgtaaaataagacagtggttgtggagagacagattaaggtaaggagagaaggttgtaaaataagacaggaaggggttgtggagagacagattaaggtaattgtggtgttgtaaagccataaaagaaatttaaatgcggaagtggcctggaagagaaaacattctctgatcatttaacccttttgtgtgtgtgtcagtttgaggcgtaaagtagacgaatagcctccttcttgtgtgtcttttccatggcaaagcctttaaggataatagctgaccactaatctcacacagctgctgatgtttaagaacctaattcttgaagtgtttttaagtcagtttgtggcatttcttctgaacacttgggcactttggaaattgtagtgacaggttttagaaatttgaagttgtgttgcagaggtgataacaaaattgggtctttgagcaactctgagtcttttaatgcagtgcacttctaagtttccgatggtatttccccaagttttgaatattgaaaagaaagaccacactttgcaaaataattggcaactttcatttaattcagtttgaccctgtcttgaacttggtctttgtaacttcttatgagggtcttttccaacggtaacattagaggctgattctggaacttcatggaggcaagtccagtgaaacttgggcagttagggggaccctttccctctcccttttcaaagttactcagtcagcagctgctactgttgggatggcgyggtcaggtgggtattatgcttattatgaaacttgatgagggcagggactcagttttggggctgagttgtatttcaacacttaagtggcactcagtaaatacttgaacaaatgaatattgtgaatcccaacttccttaaggacagaagaactatttatacttgtctgccatcttcttagctagagattttttttttgtttgttttgttagctttcaagttgaggtccctaacaggggaatcccatagtttcaatgatgaacaggtccatgacaaaaattcttgtttatatgcaatacacatttagggagaataaatggtcatgtggactttaaaaattggaaatgttactagtctcttctctcattcttttgttttgttttatgttgaggcagagtttcactcttgttgcttaggctggagtgcaatggcacgatcttggctcactgcaacctccgcctccgggttcaagtgattctcctgcctcagcctcccaagtagctgggattacaggtgtgcatcaccatgcccggctaatttttgtattttttagtagagatgggctttcaccgtgttggtcaggctggtcttgaactcctgaactcaggtgatccacctgccttggcctcccaaagtgctgggattacaggcatgagccactgctcccagccctcattcatcagttttttaagggtttctttagagctgaatcctcccagcagttttctttccttttgaattccagagctctttgggcctttagccagaaacagtctctgtcctgcttactttgaaaggctgttaactatgccctggaattttggaaatgttctccttgagaattgctgtaaagtagtgataaggactcttctgtaggctacaaattgaaaccagccaccattaagatggctcacagacagggtgtcctggattgaaactggaccaacgttggtatagtctgaatttgaggagtaaaaagaaatatgcccttccctctcccctaacagttggggaatacttgtttttactcctcaaccattccccttttaatgatgacaagttttcaggctttttcactgcctttagttttgcattaagttcctgggagattcacacacccctgatatttactgcactyctggatgccagttttttatcactcaagaccagcttgttatctgtcctagacagaagccatcttcttttaaaagtattagaacatactgggtatagagtgttaaagagaatgttgatttttttaaaacttctgcttttggggatgtgatatgggtttgaaagtcagggaggaagtagaagatgtaagggtttgccccagtacaagagttttaataatgaggtgataaatattttctttaaataatttattcacccattgtgttcactcaagtggttctagtgttcactttccttatgcgctagttgtatatttgtatgtcagagaagagcagagattatctttgacagaagttatattgtgagtgtctttttggagaaggtaggttttgattgtgtaactatgccacacctccattccccatacacttgacttgatgattatctttgaaggaggagcccatcatattatacagctgccctaagtctcaaatctatcatcaaaaggcagtgtaaaggggactggctcaaaacatggcaaagagtctcctttatatcagaaagctctctgcctttgcttataaggcagcaaaggactcttcttcctgccctgatctgattaccctaaaagctttaagatcatggaatagttgataaaacagtcagtattctgtgctgatgacttatccttttctcccttaagaaagagtaaatgtttttgcttggattgagtttagagacaccagatagaataagattggcaacactgttagccacctgctgaccacagctaaacaggcatatgtgcttctgcatggggaatgctatggcgttaacagtgccttccttaaaacctgtaagttcgttaggcttccgggtaccagggttgttagagtaggccacagtttacttcctttttcataagtgcttttctttcctggatctcagtataggaaggaaaatcagacagcatttctcagttgttggctcggtgggcattgtgaatgggtatggttgctgcctcaaatgcacatatacaacctgagctaagttgtatgaaatgattgagtaggctgacttcagttctatgtaaattaatcaaggagaaggtttaggaatggttgtaccgcattgacagttgttaacatgtttataatttcttggagattagccaggaattctgttacaactacacacaaatattgattgactttcaaaataaaattctttaaaatcactgaaattttctgagcccaagtttcttcatctgtaagataagcaaatttactaaggtcatgggtatctagtacatgatggacagagatttgaagctctttaccactgatttatgctaccttctcatagatctagtagttaagtgacttttacccaaggtcatacactgagtgatagaacaaggattttgaataagatatttttcactgttgcactggtctgctttctccagcttccttcagaggtccctaaaggggacctctgtgctgctctgcagtgcctctatcacattagggtttggtcatggtcttttgtgctcatcatgtttgaacatgtttatcaaagtattttacagacttggttatttcttcccctcatgtaatttgtgtatttgtctgttttccctatggagaatgaactttttatcttatatatgcctgatgtgacattgatttggccacttggggttgaccttgtacttggtttccatatctgcagcttcattgtcattttgggtttaggccagctttcaggaactttttaacagttggatcaaattttgttggattcatttgatactgagtttcttattcctgtatattttgtttcctttctatctaagcagagaactaggactctagagttacaagaagttagagtatatctataacttttttaaaagaaaaaaaaaggaccaggcatggtggctcactcctgtaatcccagcactttgggaggccaaggcaggtatatcacttgaggtcaggagttcgagaccagcctggtaaacatgctgaaaccctatctctacaaaaatacaaaaattagctggccatgatggtatgcacctgtaatcccagctactcgggagcctgaggcaggagaatctcttgaacctgggaggcggaggttgcagggagctgagattgcaccactgcactccagcctggacagtagagtgagactctgtctaaacaaacaacaaaaaaaaactctgttttggacacatgactttagggagataaacataactctgggattttattttttaatatgctcctgaaaacagtcaactctcccatttcctagctgggagaagtatgtctcacttaattttgctcattcaggagaggatgaatttttcagcaatgatagtaatagctggctgttgcaactcatttcttgctgcagcgtagcacatccaccaagaatgccctttcaccttcctttgtcttgccaactccctcttagctttcagtaagacttggctcaaactgcatcctccaggaagcctatgttaactcctaactgccactcttggatccagggtttttatttcatcttgttcgctggtggaaccgggctgttttatctcattatattactcttcactttgaaacaaggaggcagttaacctagattcagtatttttactcttagactttttttcccccaaaatgcccataaattaagcaatcttactgccttactgcgcttactgaaaaatagcagcacagcagaaaaatagaaaatcttgctatcatgtaagagatgtggaagtaatggtgcccacatgcttcatttggaaaatgtctattacctttataaagagtttgtatagtttctaaatacaggagcattatgatgcgatagaaactgttactttaatgttaattgacgttcgaaaatttgagtttcaaatgtttcctaaaacattttttcttaacccttttgctattccattgatctgccattctacattctgcctcctttgtttccctgtcacttattaaaaatactgcctcttaactttgttgtcatccacttatttctctagatacaccttggagtgttttttcaggctgaattgttaggcatgggattgctgggtttaaagagggagtgtgtgagtttgtttgattttgccaaattcttccttcatgggggttataccaactagatgcaccttattttcagagatggtaaaatgaggcaaaaagtatcttagatttgaggaaatcgttaccacccagagttgtgaaacttagaggtgatatatgtaatactgccttgcacaaaatatacatttagtaaaggatactgatatggtttggctgtgtccccacccaaatctcatgttgaattgtagctctcataatcttcctgtgttgtgggagggacccggtgggaggtgattgaatcacccgggcagttacctccatgctgttcttgtgatagtgagttctcatgaggtccgatggttttataaggggcttccccaccccgcccccgcacctgccccactttgcttcacacttctccttgctgccatcatttgaagaaggacgtgtttgcttccccttccaccatgattgtaagtttcctgaggccttcccagctctgcagaactgtgagtcaattaaacctctttataaattacccagtcttgggtatgtctttattagcagcgtgagaatggactaatacagatacctagatacccattattatcttttgtgaactgggactatttctctatcgtaagagtggtaagaaacttgagttgagatagtgtttgaaagcacgctagcatggtgctggcacccgtattagtgcccttttctcttgtgtgccttgggcagccagctacttgagattatatcttaattaccttaatggattgtaaactccttgagggcagagtccttgtctggtgagtctttagcaggaagctttggacttgaatatatttggttttaaattgaattagtcttcagaatatatttctgaaacagtaggaaaaggatttcttttttttctttcttttttttacacattagccctcaactcctgtgtaatgctacctaacatctattcctacagtaggaaaagacagagacactttccttttgtctgtcggaagcttctttacttaaaagctttttaaaccccagggaatacgttaggtaacaatagcaaaagatgttgattcctgttctatctgtttaacttatctgtccttagggagtaactccagttaaattacagtgaaaggagttagttgccataagtcttctgttttatcaagattgctttattgcagggggcttcctcccatgtcttcatctagaattttcactaggaattaaaatatttgttactagaaagcattagttggcctgaattcacagtgaattaggttttctgatgatttaatgtgcactggtttgcatctttcatatctgtcagttaaattcaacacatttctttttgcacttaacaggtgcttgaagtggcagggtccttcctctaaaacattttaaataacactagtagatgaattccagttaaggggaaaaggtatgtgctgaaagtaatcttcaaggccacagtatgttctctccaaacacatgttttcaccacgagggatgtagatctgtgtgcccttattggctttactttttcacttactggcatctcttctgaccaacatctttagtcagatgtcccactgttaccttagatacaatatggctcaggctggtccatcatttctccagtatttttcaccatctttattctgtacaagtttcttgtttttgccaaggccccttgttcccccagtcacctggacgtaaagactttctctgactctttattacactgcatttattacacatagtagtgagttcctggaactgggttctacttccattttcccaaatgtgcttttacattttttccttccttcttagttcctttgctgtcactttttttgtagattgcttcagaaacctctaactatttattttgcttttacttttatctcttactatgccttaacacaaaccctctcttggaactaggccagtcttcttgccatgccctcacataataacacaaaaatgaagggttggaaaggaagaagcttaaagataatgtttaacttatgaaaagtttcaagcatacacatagagaaatataatgaactcccatgtgtctgtcactcagcttcagtaattaccaaccttttgccagttgaattttgtctatccccgtatcccttggtgctcccccaaccaccaccaccagagagtattataagcaaattccaggcatcgcttacatggaagtacttcagtattcatctttagagattctttaatctgtcagtttacctactgcagaatatctctacagtttccctttcagttggttatttagtttgtttaaatgcttttggcgttcagaaggcatcccattcttttagtggttagttcttttgtactgacctcaatttgcctccctatcatttctcagcagtaatataaatttatatttactcagaaattacaaatttactgagtaaatttatataatrcaatataatagtcattaagatatttgaagaagttgccatgtaatacactttttgacacacctttcacagcacacatagcacatgtaataacttttatttgtgttttagagagagggtcttgctctgtagcccaagtggagtgtggtgatgtaatcatagctccatccttgaactcctgtgcccaagcagtcttcccacctcaccctcagagcagccagtattacaggtgcaccaagatgcccaattaattttttaaacagttttcgtagagacaaggtcttgctatgttgcccaggctggtctcaaactcctggcctcaagtaagcctcccaccttggcctcccaaagtgttgggattgtaaacatgagccaccgtgctcagccattcctttaaaataggaatacttggggttcagatctttgacctaggtcttatttgtatcaatgagattaatgagccacagccccgagtttctcaccagacatttttgatttgcatttttagacagcagttgctttaaaaaacttggggacctggcttaaaatcaattttgaaattttgtgcattaaaaaaaaaatgtggccgggcgcagtggctcacgcctgtgatcccagcaccagactttgggaggctgaggcagatggattgcctgagctcaggagttcgagaccagcctcggcaacacggtgaaaccccatctctactaaaatacaaaaaattagccgggcatggcggcatgcacctgtagtctcagctactcgggaggctgaggcaggagaattgcttgaacccgggaggctgaggttgcagtgagccgagatcacaccactgcactccagcctgggtgacagagtgcacctgtagtctcagctactcaggaggctgaggcaggagaattgcttgaacccgggaggctgaggttgcagtgagccgagatcacaccactgcactccagcctgggtgacagagtgagactctgtctccaaaaaaaataaaaaaaaaaaagttattggcagactgttatctgaaacctgcctggaattactttcaatttatcctttacttaatttcctttttaagtttagagctttttagtgatttaagcaaattttcctatgtacactagtatttgtcaagataaatttttaaagcttggtccattttttactataaaagtaattgtggggaaaactagaaaacaagatgaagtatatgcacaaaaactcaagttactcataaattgactaccctaagataactgcttttaatattttgatgtctgtattccagtcttcttcatatgtatttatgcgtttgttgaattatacacagagtagttttttttaatgtgatgtcctttccatactctagggctgtattagcagatcttgatgttctgaagcttgtttattgcatctggcctgcaaacaaaattaattgacacacatgctttattccagattgtggtgctattacatgtattgtcattattatgattttagccataagtgtttggtttgaggcagaagtagtgggatattgctgtcaagtaaactggggccactaaccttgtgggaatcaacttagcattttaaaattatagactcgaggtttttagaagaagctgaagggttctgtatgctgcatggaagattgagttcaaatcctacttctgacaccatatgatattatttttcccatctctgtaggatgggaatttcttacagttagtactacggtcatgcagatttctattttcccagggcctgacacagaatagatgctcagcagattatgacacatgtggcttcttttgctgtgagccagtcatgggatgaagacacattgcctatgcattattaattgattgctataaaacatgttgcctcaaaatataatagcttaaaacaacagacacttattttctcatgtagttcctgtgagtcaggaatccagacatagtttatctgggtggctttggcttaccatctgtagattgcagtcagtatgtcagccagggctgcagtcatttgaaaacttaatttaggctagaaggtccacttccaggatggctcattcacatggctaattggcaggaagcttaagtttcttactacatgggcctttccagagggcttctgagtgagtacatgacagtgtgtcactggcctcccccagagcaaggagagagcaggaaggaagatctaataccttttatggcctagtgtcggaagttgccccctcacaattccacttcatcttgtttgttaggagtgagtcacagtgtccagcccacactcaaggggaggggaattaggctatacctcttgaaaagcggagtaacaaacaatcttatagtcaagattgtgtttgtgtaaggttagaatagagggtccggaaatagacctataattatatgaccgctcgaaaacgccaagacaatttaatggggaaagggccatcttttaaaaaataatgctaggctattcacagtagcagaaacatggaatcaacctcaattttcattaatggtagactggattaaaaaaaagaatgtggcgcatgtacaccacggaatactgtgcagccataagaagaacgagattgtgtcctttgcaggaacatggatggaactagaggccattacccttagcaaacgtaacagaggaacagaaaaccaagtattgcatgttctcacttataagtgggagctaaatgatgagaacacatggacacatgtaggggaacagcagatacaggggccttttggagggtggagggtgagaggagggagaaaatcaggaaacataattagtgggtactaggcttaattcctgggtgatgaaataatctgtacaacaaacctccatgacacgagtttacctatataacaaacctgcacatatacccctgaacttaaaagttaaaaaaaaatggtgttagaacaacttgacgtctttattgattagaaaaaaatgaacactggcccttaactctgcaaaactgctagaaaataaataaataaataaataaataaataaataaataaataaataaataaggtggtggtggtgatatgcccttgtaatcccagccattccaagggctgtggcaggaggattgcttgagcccaggagttcgagaggagcctgcgtaacatcgtgatataagaaaatgagactctttccctgcctttccctgcaaaagagagagagagaaaatctgtgtagcccttgagtaggcaacgatatcttggggcacaaaacatacagaccctaaaagagaaaattgatgaagtggacttgatcaaaatttaaaacttttgctctttgaaagacaccattaagaaataaaaacaagaaaatgatggggagaaaatattcacagttcgtatagctaacaaaaaattggtaatccagaatgtataaagagctcttacaactaggtagtaagaagaccaagaaagatttgagcagatacttcaccaaagaaggtatatgagaggccaacaagcacaccaaaagatgcttgtcattaaacatcatttaatcatcagaaatatgtgaattgaaaccacagtgaggtaccactccacacgtgctagaatggctaaaattaaagactgatagcagatattggtgaaaatttgtagcaattggaatgctaatgaatttttgatggagatatacaatggtacaatttggcaatttcctgtaaagttaaacatacattttttatattacccagtaacttttctcctaagtatgtacccaagagaaatgaaaacatgtctatagaaatatttgtatatgaatgtttgtagcagataaataataaccaatgcctggaaacaactaaattgtccagcaggtgaatgggtaagttacagtatatccacacaatgtaacaccactcagcaataaaatggaaccaacaactgatatatccaacaatgtggatgaatgtcacaaatgttatgctgagagaaagacatcagacacaaaaagaataaatcctatatgatgttatttacatgaaatctagaaatctagacaaatctaatatacagcacgatcagatcagtgcttcctttgggcaaggggtggaagatggggaatgactgggaaggagcacgagggaaactttctgagatgatggacttgttctaaatctttattgtagtggggattgcacctgtgggtgtctttgaaatgtttattattacagttatttcttaatatttgtaggggattggttccaggaccaccccaccccctgtccctagtataccaaaatttgcagatgttcaagtttttttgtatataaaatggcacagtatttgcatataacctacacaatccttatatatactttaactcaccaccacattacttagattacctaatacagtgtaactatataaatagttgttatattgtggggggatttgtatttttttggttgtattgttattactatttttatttttccttgaatattttcagtctgcaaatggttgaatctatggtgctgaacctgtagatatggagggctgattgtattttattgtttagacattacaccttattaacattcatttaaaaacatctgttgaggtttggatttttcagaagttataacatctgatctttagagtcagtgttcaatactatccctttgttatcatttataggtcaggcttaatagtattatgtctagggagaaaaacrccaaactgtggcttctttccacagaataattggctctcatttccttatcctccccatattagtaacttgtcttgattgtagaagcaggctaatgggagctttgtctgggcttctttgtgaaagctttttttttcagtggcatgtgctattatgcctaccaygccatttgaatcctgtcattgtacttcttgaccagcttgtcaaggtaggcatacagaagatagctcatgactcctgttaactgactcatctcttatggttgcagattctcataaacacaaagataaacacaaagatcgagaacaccggcacaaagaacacaagaaggagaaggaccgggaaaagtccaarcatagcaacaggtaagggtggaatcaagcaagtccctcatcattcagcagtgggttggccattgcttggcttacctggaataggtcttaacttgagctacatgtaaagatagcaaagtaagtagaaactgtatttgatcctagagttgctatgaggatggccatgatttaggccttaaatgggatgccattgttcagatcaagatgtataaagcaagtatgtytaattttcttttaatatatacctcattaaaaatacagttgttcactaagataggtaaggattcattgtgacacatgatggcatttaatcaagtctgtagcaagcttgccttgataaaaggtaactggattggagacctgattttttttcttctttctatattttaaagagtttacattaaaaattcttaacttgggcttccatggtctgttagcccctgaaattatatgcaaatggttgagtatatgagatttcctggagagactatttgtagctttcatcatgttatcagaggagttcggctcccacaaaagcctacaatcaccaatatgaatgaaactcaatagtgctgccttttgggatgcaagcctcaagaagatgtttcttttgttcattttgctcccatttttttggtgtaggaggcaagtggttaaatctagttattgaaaatgaggacttgtacttccattctgatttaaagacagttgttggtgagaaagccatatggtattcccattcccatagtggcctgagctaggttagggaatgtaaagatctgtcacacattagaacaagtgtctccattgtagagttcttagaacttctttattaacttgtctgattgtctgtagacaagttaaagtgagaattgctttctaagtctgttctttttcgcgaatcattaaaataaccagatttaattttctctattggggacatttctttgggaatcatgtatcatgcctgtggccttttttccctatccctcacttatctcttatcacttgatcatctagtttccattttcattattctggtaaatttaatctcagtagttgaatctactctacatcttttctagtttatagttgtctagcttatgttaatatctaccgtacagcaaagaatattgccaaggataaagaagttcattgcataatgataaaagggacccattaggagaacatagcagttataaatgtttatccactaacgtcacagcctcaaaatacatgaagtaaatctgatagagctgcaaagagaaataaacattcataattatggtcagagattttactatctttctcaataatttttagtccaaatagaaaataattaaggatatggaagacttgaacagtatcaaccaacttgatctaatcgacatttataggtttttcccatccaacaatattagaattttctcttttctttctgtctacttttccgcttttaatttttttcaggttttattttagattcagtgggtacatataggcaactttgttacctgggtatatagctgtgatgctgaggtttgggtacaaatgatcctgtcacccaggtactgagcatagaacccaacaattagtttttcaacccttaccgccctctctgctctagtagtctccagtgtctattattgccatctttatgtccatgagcacccgatgtttagctcctgcttaaaaatgagaccatgtggtatttggtattctgttcttgccttaatttgctcaggataatagcctccagttgcatccatgttgctacaaaggacatgattcagttctttttttatgaccgtatagtattccgtggtagatatgtacaacattttctttatccaatccatcattgctgggtacctaggttgattccatgtcttccctattgagaacagagctgcagtgaacatgtgtgtacatgtgtctttttagtaaaatgatttgttttcttttggatacataccaagtaatgggattgctggatcagaaggtagttgtttttttaagttctttgagaaatctccaaactgctttccctagtggctggactaatttacattctcatcaacagtgtataagtgttcccttttttctgcagccttgtgagccatctgctggtttttgatttttaatagccattgtggctggtgtgagatgatatctcattgtggttttgatttgcatttctctgatgattagggacgtggagcattttttcatacatttgttggccatttgtatgtcatcttttgagaaatgtctgttcatgtcttttgcttgttttttaatggggttacttgttttttgcttgttgaatcatttaggttccttatagattctggatattatacctgttagacgcatagttagtgaatattttctcccattctgtaagttgtctgttaactctgttgatagtttaattagatcccatttgtcaatttttgcttttgctgcaattgcttttggcatctttgctatgaaatctttgctcgttcctatgtccagaatggtattgcctaggttgtcgtctagggtttttaacagttttaagttttacatttaagtatttgattcatcttgaattgatttttgtatgtggtgtaaggaaggggtccagtttcagttttctgcgtatggctagccagttatcctagcatcatttattgaatagggagtcttttccccattgcttattttggttgactttcttgaagattagattgctgtcggtgtgtggttttatttctgggttctctgttctgttccatttggtctatgtgtctgtttttgtaccattaccatgctgttagtgtttctgtaccattaccatgatgttagaatacattctttttaagtgcacacgaaatgtgccaaaatagctcatactttggaccccactctccttaaaccatcttctttggctttaatgcttccatgcctctccatctttctggccacctttttcacctctttctaatgcacagtcattccttaacagtttttggctgtcttttctctgctacctgttttgctgtttatccttatttcacattccatatttggtcttgtgaacttcttttcagttccttaaacatagcatgttttctgatgccgctaagcctttaaacatgctgttggttctgtaatactctcttgcccctttgctgtcattcttttagttgcagctcagacttgacttgttccaggtatcctttctaccctccttctcatattaaatgccacttttgtgtgctctctggtgccttgaatatattcctagtgtaataattattatatttaattgtgtctttacttttccctatggcctcctggactctaaagtccctgaaagcagaattgggatcttttttgttttttctggggtggggcggggggctggttttttgtttgtttgtttgtttgttttttgagacggagtcttactctgttgcccaggctggagtgcagtggtgccatctcagctcactgctatctccacctcccaggttcaagtgattctcctgcctctgcctcccaagtagctgggattaaggtgcgtgccccgacacccagctaattttttgtatttttagtagagacagggtttcaccatgttgactaggctggtctcaaactcctgacctcaagtgatctgcccaccttggcctcccaaagtgctaggattacaggtgtgagccaccacgcccagccttttgtattcattttgcatccttcaggcttagtatggtacctggcagatagctggcacttactagtctatatttattgaattaatgagtggatgatctatgggtacattaattcccatctctctttcttctcacgtactcttaatcttctataggatagttattaagtcactttggcttatctcatttttcacacaattgtgtgtggtaaaataaacataacaaaatttactgttttaaagtagcatttagtacattgacaatagtatgcaactgtcaccactatctccagaacttttcatcatcccagtctttgaattcactaaataataacttttcattctgttcccctgtcccaatatctttctactttgtctttttttctstttcccttctaccttttatctttatgaatttgcctattctaagtacttcatataagtggaataatacaatatttatcttttttaaatctgttctatattcccttaatatgttttcaaggtttatccgtattgtagcgtatcagaaattcattcttttttatgactgaattatattccattgtatgcctgtaatcacatttaaaaaaatccatctgttgatggacacttgggttgtttccaccctttggctacaaatacatgtttgagttccactttcattctccggggtgtatacctaggagtagaattgctagatcatgtccaacaatgggtggctgcctgctatgtttttactgtgctaattgatgtggtgtgaaaaaaaaaattagataacctttgaccgtgaacagtatcatctgaggaggtgagagacctgcttacagatcagatgaagaatgttgatttttatattactagrctgtaagaagaaattccaaaagactttaagaagaaagaggttaatatttaaaacataagcttttgaaaacttatcttctctaacacattctactttgttttgggaggaaagatacagtaaaagtgacataaagggctttgagacatataagtttggccctgtcctgttttacaaaaatcttctcttaaaaaaaaaaaagggatgtgatttttttagaagaaatcctcatccttgtacatccatttaagtctcgtgatcttggctaggttacttaaccttcttcaactcagtttcttcatcttcatcttgatacatgcttcacaggggaaccatgggagtcaataaatatagaagctcttcagttgtgaactgctctacagatgtgcagagatgacacttttacatctatttaaaagcatacttttccaagatcatattgtaggtaaattcaataatttgttgtatgtacttttgtgcctcttttcttttctttttttttttttttttgagacagtcttgctctgtcgcccaggctggagtgcagtgacacaatctcggctcactgcatcctccgcctcccgggttcatgccattctcctgcctcagcctcccgagtagctgggactacaggtgcccgccaccatgccccgctaattttttatatttttagtagagacggggttttactgtgttaaccaggatggtctcaatctcctgacctcgtgatccacctgcctcggcctcccaaagtcttgggattacaggcgtgagccaccgcgcctggccacttctgtgccttttaatattttcttcattcctataaaaatagaagcctttttgccaagagctattggaaaaacctggcccgagtttctgtttacatatgacatgactaaatctagcccttggtttcttattcacatgagtaaattttaacagtttaatcagatgatctgttgtaagcaaacttttaagtacttcttgttttgatgtctactgacacagtacctctttgcaacaaagcaaggatattggttatattccagtaaaattattttattattttttttgagatggagtctcactttgtcacccaggctggagtgcagtggtgtgatctcggctcactgcaacctctgcctcctgggttcaagcgattctcctgcctcagcctcccgagtagctgggacttacaggcgcctgccaccacgccgagctaatttttgtatttttggtagagacgaggtttcaccatattggccaggctggtctcgaactcctggccttgtgatcctcctgcctcagcctcccaaggtgctgggattacaggcttgagccaccacacccggcctccagtaaaattttatatacactgtgatccttttaaagtacctctgatctttttaaatagtttagggtttcttcgatttcttctgtagcagattaaagaaatctgggggattatttaatcacatctgaaccccagaataattagtatttagcatgttctgttccaaaatgctttcatttattccaatccttgctaatcaattgtagctaattttgtggccatttgttaggagaaaacaagtgtttcagatgtgtttctgtgtcccttccttctctgctagatattagcaccaatcatttgtcatcaggctatacttaggacccaagcccaggaggcatttactgtcctgtgcagtagcaatactgcagacttggagtgggagagtagccattatgtgcagaaacaaaatggggctatggatccacatcccagaagatgccatttggtttcctctttattgtcctcatgcaaggtgcaaaacaagggagtaggtattaagaatcatttcatcttgtcttctctttgtgtggacaggagtctgaggtcacatgctctaagtcccacagtgatgtggtagcagaaagaagaggatgtgagaccaaggatcctgagtccccactacattattccttccagtgaaaaatacctccctgtgtaaaaagagttagttttgtagctaaactgtctgtttaaatacaagcaccccttacttgtatgcatatggtaggcagctcaggtttaaaaatgtcagatcacctcaggcactgcctttatctctctttgtccccaaatccctgaaatctttggcactgaaagtattaatgtcatcaaattctgaacctatgaaaacttcatctctgtctttctcttgtctggcctgtaacatgacaagaacagctcacaccaaagttagaagataatttcatcagtcatcacttatctcttgacactgcttctttctgttagcgttaatattttgctcctcagatcctttttctttttttttggagtcagggtctcattgactgctaagcttgggcgcggtggtgtgattatagctcactgcagcctccctgggcccaaggggtcctcccacctcagcctcttgaatagctgggacaataggcatgcaccaccatgcttggttaattaacttttttgtttttaatagagatggcggtcttgctatgttgcccagggtggtctggaacttctgggctcccacattggcatcccatagtgttggggttacaggcatgagccaccatggccggccctcttttaaaaaatacataaataatctcaaaaggaatactcttctagatgccaaggaattacgtagcttgtaggatctcacgagctacctttcttaaagggttacattcttatccattgtttatctttaatagtagatctcttgtataaacagaatattattaaaagcaatttgggaggggggcttgattttagaaaataagagaatcgtgtgaaatgaaattcctcctagttttcgactctgtgcatctcttgccaattttaaacctggcattcacactggagtgacaaatttgtggaaagcaagggaagacagaaaactgctgtaaaatagcaagggaagtacttttccagccatattggcagtgctattctgtactgtcagtgtgagaaacatctgagaataaggatgcttttggcttctgctttccttttagttccaaatcctacctgaattgtaattgagagaatgtaggattttaggaatatgcacttgaattacgcatctagttctcagattaggggagatttttctgaaattaataaaatttaaaagatatgtttgctgctttccttgtgagtggtttgccaaagccctccctttgtctacacatcactatatcatcctgtctgtgggaaatggacaactaacatgggtaggcagagaagattgaacagtttggaaatgaggaaactcagtaccaccaccattcacatgggagtcagtatgatatattgaatagcacactaagataaaagttaagaggctgggttctgtcatttataagctacgtgtcgtgatccaaggtgcttaacttctctgggtctcattttctgttttggtcaagggttgataacagtacctgctttatcaatctttcaagtttgtttatgcacatgacagctctttgggaactgtaacatactaaataattgagataatgatggtgatgatgataattaccgcaaagcctagtataatatcatgcagataaattggagctcttgagtttggtagttgaatctaattcagtagttattgatagcattcaatttggagccctgatattttcaatattatatttatccctatcatagtacgccataatcattgtttttaagatttcatggtggagacagcatttgagctagccattcaaagatggttaaaattttgctaacggaaagtaatggttagaaagaaaaacataagcaaaayatagaggcattgtagtatatgctttgttctgggaggaatctagttaggtgggttacacagggtggaatagtagaaaatgagacccaaaaaagtggcttgaggcaaaactattaaatgccatttcaaaaagttggaacttgttacttacactaactaaaaatcggggggaaatgttgggactcgattctgagctgagcaagaagccactggaaatacttgagcaaagtggatataagacttagctacaaatgacatgaagggtctaagaaaaagggttcctgtcttggataactgggtggctgttcacgctattaatagagacaaagaacttaagggaggaatgggagttagaatgggtatcggttttgccatctttgggcacatccttktatcctctctggcctgaaaacaaaggattaaataatttctaggaaattacatttaccttgaagttttgatacttctataatataaaacgccggagtccttgtgattttgtttagagatatataatcggcattgtagtgtgtaatgatgatggacattaaggaacccttgtttcttagtgccttttggaaactggctcatttcagaagctgcgctcttttcccagaggcaacttttgaagttacttaaatatttaatttaacaaatatcatttaagatttaactgtctactatccttgaaagggtcatgagtttccctcctaaaccaagactttgaagctctctgtgctgtctcacaggaatccccatgatccaacttcatgtgacctgcagaggtctgctgccttgaggagtagacaggtagctgggctgttagtggctaagtccttttctcagaatatgtggaggctccttctacctttaacagtgcttttttgctttgtttgggaagtaacagagtagtcaagtgcatgaccctggagccagactgcctgagtttaaatcctgtttctctctttagaggtagttccttgggtgagttacttaacttgtctgtgcttcagtttccacatctgtgaaatgaagataccagtagttacctgagttttgttaccgatatcaaatgtgcttagatgagtgcttggcactgggtgctactcaagtatctgttaaatacttttatgggggatagaggacagatttaaatggtttcccatagccaacattctagctttccagaatatcagtattttgttgtggtagcggtggtcttttttcctaaagaaacagtgcttcgccagaagggagacattgttccctactggctccctacttccaccgtttctcccactcttctatataagtgccttagagaaactctggtcacccttttctgtggtctgcttagctccaacaagaatcatagaccaaaggttttgctgtcatcactttaaaaatagtgtaagttatttttttctttcctttttttaaatttttttttttttgagatggagcctcagtctatcgccaggctggagtgcagtggcgtgatctcggctcactgcagcctctgtctccctggttcaagtgattctcctgcctcagcctccccagtagctgggattacaggcatgtgccaccacgcccagctaatttttgtatttttagtagaaatggggtttcactgtgttgcccaggctggtctcgaactcctgacctcaggtgatctgcccgcctcggcctcctgaagtgctaggattacaggcatgagccaccacgcccagccagattattttttctttagtggaattcagccaattgaagcataacacatggcatgaacactctggaaaggtggctttggatctttccatttgttctctttagcgctgacttttgctttctagtccctgctagtgtgttggaatcttaccccatacagatgcaaactatgaaccaagaagtcagcatctatgcctagccaataattggttgttttctcgttcagagttcctcatgcccatggggtaaattcatatttcatccataagtgtgaccattgcagaagttctaggactgctactgtctgtatttttgtccttcagcatatcccagactaarcttactcttaaaatatgtttgtccaacctttggtttccttcctatggttgatattaagcctttcttctactcttagaagacaaaatggggagacaaaaaaggcaaccctgaaggtttttatcctttcagggtatctagcatttttctaatttagccctactgaagtttcttcagtaattaatcatctgtttttcagcctctaacctggctaatattatagcctacaattgtacttttaaagcccttttgtgactttgacatattgtgtctattgtgtatggaaaagtagcaggatcagtatgaagataatacagtatctcttaaaacaggcagccagcaaatgaactttctgcattggtcagaatttccatcatttcactgttaatgaggaaagtacagttctttagctaccatgaaagtcaaacatatcctaagccttttggaaaaagacatacatgttagaaaatctcaaatggatgagtcagcctgactgaccccacattgactccattttatatgctggccaaatcctgtttctgactttcctggcacagccctggacatgcttctgtatcataggacttgttccccagcgcctttgctacttccttcaggcacattcctaggaaagattggcagtggggtttgctctttgccagcactcctgccggtttgggggttatggatgccaggttgggctccaggcactctgctctccatttgtggaggcagggacggtaacagcacctgacaagtagggatgatcacattgtattcagaagcctggtggagctctataaacccaaatttctaacagtctccaatgtaatgccctgtaatagaagctgtccttaaccctcaatcatctgtattcagctagtataaaaatgcaaatctgctcttatgcctaaacagttaggagtagaggagacttggcttcctttggaaagtcaggatgatagcttcatcccattctggtttttgtgattaattgtgacctacaaaggggtttactactctagcaggaactttgaatttcctatatacatctctttctggttagcaggcagaggaaatatcgttgacttttggcttcctggcaaatgtctcatttgccttgtcatttgttgattccttttccctgatctctgtttggtgtgataatgtacagcaaagctgaaaaccgcagggctacatgtacacttgtaggtacctatgttgtgattgccaaaaggctcagaaagccagttttctagtgaaaatggctaacattctaagaaatgctttcactgagaaagagaacgggtcaggggaaggtggaacttaaaggaagatggagtgttcctgaattcagattcctgaattagccatttatagtttcatgggaagacaatgaaaaaaaaaaaaaagaaagaaagaaaagaaaagaaaagaaacaagcaaccccaaaggtttttatcctttcaggtatccaaacatctttattctagaaagtttctcctcgatggtaaaataaagctaggaccttatagcaagtctcagactcaccatggctgtttcttaacaccagtataccttaagcagtaggtatcaatttagtggaaatataagggtattgatatgtagtggaggctgctctgaacttggaggtggaaatactaagtttaaatcccagcttttcttttaacattgcaactttgagaagtcttttaaccattgtctcctgtttgtatcagcatgaggggatagataataaaacctgcctcacaggagtgttgtgagaattgagtgaaataatgtatgtgaaaataccaagtacaatgcttgcttagaaagtagaattttgttttgccatcccctcccccactatagttggcagggcagggggaggcagtatattcatccatcaatattatagatgcaattgttcccagatgttttgcttttaggcaaaaccttgtatagatgactgtataccctcttacagttgatgcttaataaaacaaaactaccatggttttataatggaatggtaagctcaaacattttgctggtagtataaaaaccaagtgcctgtgattacctatacattaactcctgaagaatcaattataatctcagcaaccttgctctttgaccattcattctaaagcttggcgaagttaatgagaacagataataggagtgctaatgcaattggaagacttttttttttttaaacaaagtaaggaagggatacatttttaaataaaacattgcattttggtaaaaaacacagattatgagaacacattgagttagaggaacatcatattgattccaagaacaaaaagcatggtggagaaattttgtaaccatgcaaatccagtgtgctctgttctcatgagttaaaaagaattttcctcctatagaaacttgttatttaaatgtgtgtcacatgtaaataacagtctaatgagagcaatatagagggagaaatatgtaagcaagggaaagtgggcattgttttgtttttttttttctccatctatttcaatacttgggtctttcctaacctatagtgtgtcctgtttctccctggctagatttcttaaagtttctgcctattcatcactcaagtacctatctcaagttgtagctacttttgtgtgcagggtgtaatagcagatgttctcctgatctagattttgttgctctgcctaactgcatgccatcatttgtttctccctttgtgatcttctactgtagtcaagtgtccctttagaacaaacttcatgggatggacatagcctaatgagctcattgctgatgaagtctttttttcctgtgcattggttagtgcagtaagcaaggctccttaactgcctgtcccagtgtactgaaaaataatagtgttctctcaccttaaactacaacttgtggtttttgcttattgcttctttagtctttgaccacatgcatgtttttacatagttgcagttattttattatattcctttttctgtcataaacactttccaaatgtgtttgtggtactcaaattatagcttagcagttaaataatttgatatattacagtttcccctcttgttaggtgtatccaattttggggtttgtttgttcgtttttgtttttttctgttgttgttgttgttgtttaagggaagcaccaaaataaacctctttttaaaattaattaattaatttttttgaggcagagtctcgctctttcgcccaggctggagtgcagtggcactatctcggctcactgcaagctccgcctcctgggttcatgccattctcctgcctcagcctcccgagtagctgggactacaggcgcctgccaccacgcccggctaattttttgtatttttagtagaaacggggtttcactgtgttagccgggatggtctcagtctcctgacctcgtgatccgcctgcctcggccttccaaagtgctgggattacaggcgtgagccaccgcgcccagcccaaaataaacatctttatatgtaatgttatttccctaagataaatttccaggagcttgatcccagggtaagaagctatgaacattttcatggctcttgccttataatgtcatattttgctttttaacctttaacaaagaacattcctatgcccttgctttcagatgggtcttttcttattgtgaggaaagggctaacgtaagtcccatctagaagtgactaacttgcctagttaaaactagaaggaaatatccactgtattgggctgtttactccataaaccctggcttggctacatgtgtggtatgtttcaagtctggcacaaagccaccaaacacatttttggtgagttggttttaacctgctcacatcagatatgaatgctgaagttggagctttcattattgtttttgtgctggtagaatgttgcagaaatacacagggctggctgtgtattcttagtcactttaaaaaaaatgtcctggtgtgtctagaatgatggtttctgttctttgcaaaaataaaaacatcaaacaagataaagtccgatgtagccaagaccctctacttgaaccttctgtcggtactgtttgtttaagtacygtaagtttccacggttcatgttatcttaggatatcttgtgaaacgaatccttgtggtccctactctgggctaacgctttgtgacttaactttttacagtgaacataaagattctgaaaagaaacacaaagagaaggagaagaccaaacacaaagatggaagctcagaaaagcataaagacaaacataaagacagagacaaggaaaaacgaaaagaggaaaaggtacagagttttctagtaggggaggaaggaacgtggatgcacttttgtttacctttgaaaryagatatcttaattgcatagtaagatcccttggtcttgaagtgaaaggtttcttgtcaggagaatttagagcaaactgtagtcttaaactataaaaactaagccttttaccaccatatgtttcacagtggcagatctgtccatatcattaccttttttactttatattgccaatgaatacattgagaatgcattagggaaaattaattgtttttgggagaaggcctaatgccttgatggtcttctgttcattaaaggttcttcccgagtgaaaatttagtgatgctggtgtcttttgtggcatttggttccagcataaccagtgcaagccttctaaaaatgactaggctcacccagctgagaatgaatagtactctgtatagttttaaaaagagattgtttttattttagctttgaaaaagtaatttttgtacttggtaaattcagatactatgaaataaggaatatggtgaagaagacatctcttcacccctgactcactgtctcccatccttctcagaggcaaccgctatactgattatgttttgtattcttccatagatactctgtatatctgtatgtgtgtgtgtatccctttgtgtgtatatatgaagatttttttgaaagataaattttctgacgaatctagaaagcaggaagtcaaaggggagggggtcatgagtatactttgcctaagtaatagaagacagggcatagactacttttttgtttgtttgttttttaaataaagatgggggtctcactgtgttggcggggctagtctcgaactcctggcctcaagcagtcctccaacctcatcttcccaaagtgttgggattacaggcatgagccatcacatctggcccagtttatatgttttgtttgtttggtttttgcttttgtttcctctctgcactgccaatggcaaattcttgagtagtggaatgtatttattggggaaaagagacctgccaccacttaaaagtaaaaagctgccatttttaagggaaacctttctcagtgagttggacagtttcacccagaagaattgttaaaaacgagttttggacacatttcaggacctttagttcatctgttcagttttggtaacataagagccagcttgtgatcatgatgtcccaggaactgatgctacatattctcaaaaagaggtttcttcaaatttagtcctttcaaggtactagttactgttgktttacttttcaggttcgagcctctggggatgcaaaaataaagaaggagaaggaaaatggcttctctaggtaagactttgctgctgcgtgggcttccctttctctgggtggacagcaggccagctgcctgtgttgtagtgttgtctgagttaacccaaaacccactgacctggccatcttgatggttcccagaagctcagcagtgagaagactcggtctaagccaacctgagcctttctacagtgccatatagtgagactgaccagcacattttccagaaggttatttcgaatagagaaggttgacaggagagatttttaaaaattgagatttgacttgcatatcacaaaatttgtattttaatggtatacagtgtaccattttttttttttttttttttttagtatattcacaaggtattgcagcctcttcactaattccagaacattttcatttctctaaaaagaaacttcatattcagtagcgattatggagttttctgaaaaatcacttagtctgatttcatcattagtaatattgggaggcttatatataaaagatcatttgacctacatgttagggatgagtgtagatttgggtagaattatgttatctcttttctagaaggagaggaaaatgcgcaaaatctagaggttacttcctatactgtttttacctttataattttgttttcctcagcctcaatttcctaaaataagcccagaggtcccctctagtttcgaaacaactagatgtttattgttacatattctcacttcactgaatgacagaaaggatttattagaaatggttgtaagtgtttgcattattgactgggacaaaacactttgagagttttgcttccttgaatctttgaactttcagtttcatttgttaaaatttttgacaattgtgcctggtactctggggtcctttagacaaggagaaaagcaggtgccctcttcaggcatgtttcataattgttctaggaatgcagaataatacaattcaggaagcattagagctgcaagctgccctaggaattttgatttctgagataaagtgactgaggaggcactgctgggctaatctctgccaagagactgccttggatttttattaaactgatatgaataaattttttggacttggtgcatagtcatgaattcattttcagactttttgggttagaagattaggaacacagccttctttgaggcagtggtctctatgttcactttgctggactccttgctggcttgtgtatatgtctttgtagagaatccagatgcttcactggaatacagttttcaggtaaattgttttaggacttcttccttcagacctaagtaacccttcccacagtttttgtcttcagtgtgacaaacttaggatctagcatttacttaactagttgggtaaatgataggctttctttccttctggaccctagggtctgtgtcagtattcaggcaggagggggaacagctgtagaagctggcatttggttagggtgctaaaataagttctttaaacattcaaattctatcacaagcaaggggacccagtatgctttttttggtcggaggtactcttgaaaccctgtgaatatactttgcagtggggtcgggattcttaatccttggatccctccacagggggcagctgcatgtaaggaggccatttcttgtactaagttaaggcagtgaggttctgaagagatgtgccaggccagggagcatcccatggctgcagtgattgctgggctctatggtgttttttacttgttccttctctgttttggttcaagatgtttgtctcaaaggattgtctttttatatttatattttgaaggtaagatcttaacaaatagtagtgagacactcttctgtatataaagtaaacctaagttaggacgttgaacaatgaatagatttggcataggataccttctgtttattctggtttaacacgtgccctacttttgttgtaatgttgtcagcttggttatttttccatgtagctagatatacatgtacgttattgccacatttttagaactttaaggtactaagttggggaaatcaatgtttattcctttccttgtaaaagctgtactttagcttttagagtactggaacaatcagttcagattgtggggtcaaatatatggtaggtttccatgtaaggcaagaaaacaccttaggtttatttctggagtggttcgtgccatgctggcaaagatagctaagaaatagtgagaaagaattctgacttagaataaagagtcttgatcccaaatcctgatattgcccattcacctgtacaatgaggacaaatactatctacttcacaggattgaagtgagaaaaagtgctcacagaacatcttcatgatatgtaygtggttatccttatttctgttagcttcttttcaacgaaatgacatattccttctttgtattaatagaatacagatgttctagcactctgaccagcaattttttttctctttagtccaccacaaattaaagatgaacctgaagatgatggctattttgttcctcctaaagaggatataaagccattaaagagacctcgagatgaggatgagtgagtattttcttaaaactttgacttttgaaaacaaaaaggaggagtttaaagaataaatgtgatgtgtttctttataatacatatagaaactgcattaattggcttttactcatttggaatttgtgattaatggactgatttctctgaactatgagaagtagagtttgctaaacaagtagtatacccaaggcttacatgaagattatataaatttttattactgaaaaggcaatagatatttattgtagaaatttcaaataatacagaattcatgaagaataaattatttaagttacttaaaatttcttattgcctaccacagataacttaaagcagtttctcttagacctattcctgtcagacattctaagtgaagtttcagtgtgtaaaaataataaaactgctcataaaacggtcgaggcttacatgtatctctttccccagattcaatgagattaaattatattcattattttcactcttatatagcttactatgctattgttatagtagaaattggatggaaagggagaagggaaatacttagtgaactcatttgtattcattcaatatagaatttctttcctccacattccagtgagttactgctatgtggtagctagtgtgctgtgtgtttggttcccaaactttcatcttttatttttatttattttattttattttttttcccagactttcatctgataatgatatttatttctgcatatatccccccaccctattttgcttccaggccggtgtaagtggtttgttttgttctatatagggctataactattactctttggtctgaccttcattattttctctatttctgttagtcttgaccgtagaatgcccagccaagaataacagtgattactcttgccatggaggcatccaagagtttgtaggtctcctatgagtgagaactcctgaatcataattatgttaactgtgtattcatgttcccctttctagtgctgattataaacctaagaaaattaaaacagaagataccaagaaggagaagaaaagaaaactagaagaagaagaggttagtaaagagacttaggtcctttggggcttgagtttggaagtgggagttttccagtaagcaacttcttaagacaaatgagttttagatatttattggcttgttataacattagggaaaacaaatttaataagtggtggctgtggcactggtagttttaagatctctgtgaatccccacagtgtcttaagttaaccacaaccagcagtgattctgctctcagccttcctgggtgtctgtctacccacagctaggctgccaacagatgttcttccaaaaactatgtcatcttcatatatacagaggcagtgttaacaagaaaccacattttggcttataaccctgaagaaatttccctaagaattttttgctgatcattcactttaggtaaccattcctatctaaagttctttaatgggtacccctttgacatataattgacacccaaactctttactgcagctcctcccaatctggcccctgcatcttgtgtctctcttcatcttgtgcctcttctctagcttacttgtaccagtcacactagcctcctttgtttcttttccacaccagattctttcaaacttccgagctttacgtagcacctgctgttcctctatctggaacacacatgctcccttctttatccttttggcctataaccttcctcaaaaaactcakttccgtttaaatgctttcctaaatgttcttgttgatgcttgtggtagattgaaaatagaatcatatgcttcctccttttgacacttttgagttcttgtaccaaaaaattgttagcaggtaattcaagaaaagatgtcagaaattcacaggggtcttaatgatgccctcccctaagacaagaaggggttgggtgagttcttagctcttatgctacatttgaggttagccactgtcatgggcaaaatgggatcacaaatgtaaagtggacagtttgaagtaccagcagtaaagagaatgatagtgaaggggcagggagtcttaagaggataatctatcataatagaatgatgttaataatcacaattaaatgtaataggtgcttaccatgtgccaggcactcttctatatatgtatcatttcatttaatccttacaacctgaataggttgttacatccctattatcatctccattttgcagatgcagaaatagagtatagaaatatttaatcatttgcctgaggtcacatagctactaaggtggaaaagccagcatttgatcccatgcagtctgacttcagtgccagcacaccagctactatattatcctacctcccctgggactttgctgatgctctaattctgcaaggagggagaagaaaggtctttaatgaaatcatatgaagaccattagtgagtgagttgagccatagagagatgatcaggtcctgaatttagaaggttgccgtttttttgacaactagtctattcttggccgaagttcaaattaataagcactaattcaaggaattgagagtgaaatgttaagtagtgattatggtagccaatcactccacttgcatataccaaatcagtacagactagtcagtaaaggaatataaaacttgagttctccaagtgtttttttttttatgtttatattgcatttatgcaaaaataatactctgagtttgttaaaccattgggaaaaaagaacagttgacttcatttgttattattctatttagcagccctaccacatagggggaaaaatgctggctgaaagactgaattaatacaatcttactgtggcagggaccccagatggcagaatctgtcattaaacctcactcgccaactatagtttttttgttttttgtttttttctcttgtttttgagaattgttctgaggtctcttagtgactgacaccccaatttgaggcttgaaaacatacaatgtagccagtagtttcctgatgggaccagctggatgcctgctcagaagctgtttagagtatcttcactgaaaaacatttccctttcctgtggtgtgtttcaccctaaatagtaaacattatctgaattaatgtgatcctgtagtaccttctcccaaacatacccacatatttatattctccgtgcctgttttaaaatatggatggtactgtaagctttcctcttttttctattcctatcttgattgccatcctattatgaggatctaaaatgtttattccagttattcccataagtcacattctgttatttttctcataaagttaggctcttatcatagttaataacagctatatgaccttgatcaagtgacaaaatatgtttcaaagtccttgattgtaactggaagtggttaaatgaacccatccatacactttccagctgtgccactctttaattgattttaagatggttcaaaaccacctttcattgctatataaaacttgttgaataaagactgaataagtagttaaattatgttgaataggcaggacaaaggaaaatattcttcaaaagagttcagattctgagtgggatcttcacttgttgaatattacatttttgtttgggttttgtgtgtatgttttgagattcatctcctgtattggtgaattgtgcctgtttaggtttgatgcccgtttattgtgtcactgtgatcagctcatttacattcagagttcaaagaagagccataaagaaataccaccataggaattggtgtcattttagaacctatcaaatacttgcttactgcatcatgactttgtgtatacaagcagcagcgatagtactatactccactaaatcaactgggaattttctttcatcctgaatactaaatatctaatgcaaagccccgtctagccgttatttgattgtactggaagaggtttaaagatgagtaggattaaacataagtgaggaaaatacactcggattactctctagagcagtacttttccaaactcctttgaggttaaaaaaaaaaaagtttcccagtctcttcccctgcagagtgttttttaactactttctcaagtagttgtttgtcaggaaattttaggaaatactgctgtagaacagagcaccagtacattgttattcatctgtcaaatgagaggagtactaagatcttctttagttctaatactctatgattacaatttttcttcctcatggctcccaaaaactgcctccagaagtgtgatcagtctttatttaagtgctttctcaccatgtttctttgtaggatggtaaattgaaaaaacccaagaataaagataaagataaaaaagttcctgagccagataacaagaaaaagaagccgaagaaagaagaggaacagaagtggaaatggtaacatctcagcactgggttaaaatgccaccttttttattgcatatccttacgaagcaagagtattgagttattaaaattaatatcctgatatttggggggaaatactttaaacaatttctctagagtaactttctgaagtangttttccaacttctagtgaaatcattaactggttctaaatctattggatctcaaactggtttccaccactgtgaacagaatggactgtagaagcagacctatgtataggtgggaatttagcatacgaagagagtacagatgcatttaaaaccatacggaaaggacagattattatgtaagtcgtgttgggaaaactgcctgttcaacaacagaagaaacctcaacaagaaaacgtgggtgaatatttttataattgtgcagtagtgaagatcctttgaagcaagacataaccagagccataaggaaaggtgttttacatttgatacatcaaagttcaatttatggcaggtggacaccttcatgccatttaaaaaaaaaaaaaaaactcaaggcaaaatatttgcaatacaaagggctgatattcctaatatgaaaaaaagctcttttaaaacaaatatgaaaggaatgatctaatcagaatgtgaggaacagtcagtttagtaaaatagttaataarcatctaaaaatgtgatcaacttcataagtaatcaaagatgcaaaaaaaatgataaatctttttgtttaatgcctctcagattgggaaagattaataagtgaaaatatctagagttgcaaatgtaagaaaacaggcattcgccttccctataggagtgaaaattcagtctttatgaaggacagtttagtcatagctggttgctcttgagaagtgtatttaggtggagaacttttctacttttgctgtttagaatcttgaaataaacatgtttttaamaaatacttatttctgttaacatgttctatttaactactataccagcagtayatgattttgtgtttatgatgaaaaaactcaaatgattgacagatttaatagttagaataaaaatcaaagtcacctttacctgtcttctcccattctcattttcctttccagctttccagctttgaggtaatcactgttcataatttgatgtatagccttccaaacctgtttatgtgcctttatggcttttgtaatttagaactttgatgtccacagcacctctgaggaaagggagaaagagcactgaccaggaaggtggcagagggaaggagagccacagtggcagaaatgtggccacacggtgacagctatgtgattcgcatgttgctatggcatcatgggattaaatgggaagtatagaaaaggaatatcacagagcagagcaaccctgcctctttctagaggtcagagtcagaaagtaaaaggccaggcacagtggctcgtatctgtaatcccagcactttgggaggccgaggctggtggatcacctgaggtcaggagttcgagaccaacctggccaacatggcgaaacctcatctctgctaaaattacaaaaattagccgggcgtggtggtgcgcacctgtagtcccagctacttgggaagttgaggcaggagaattgcttgaacctgggaggcggaggttgcagtgagctgagatcacgccaccgcactccagcctgggcgacagagcgagactctgtctcaaaaaaaaaaaaaagaaaaaaaaccccacatgggtttattttcctcatttttatttcacttttcttaagaactaatacattttcagtgatcttgacctttaagaaaatgatttttagaaataaagtgattgtgtaaattagaggttattattgggagttaagagaatggtaggttagtaattcatcagtcagggttctgtggtagttactcaataaatgcttgttaaatgaacaaatacatttccttatcaggagctccctgctgtctcccctttacttcggagctttggctctttttgggatccaggcaagtgcgctgggtccagccttgtatgtgtagaattaggtgcccttgaggggtttaggagcctaattttgcttttgtggttgaaatccttatcagtgttgccacacattcactctgacagaccatgacttttggtttttattcttattttgggttaaaggggaactggctagtctttaactaaaagttgttttttgaggaatgagcagactttgctacagcttctaacgcatgcatttctcaggtgtgatggttaaaccttgcacattcttttcaagcacagtgcttgaatggcacaccgagtttttggtgttgaaaatatgaatgaagagcctcttaactgatagctagaggctgtgtatcatactctgaagtcagttatccagtcctcagtgactgccactgatgacctagtcggggagttaaatggcagatacccttatttttactattccttatgctatcctactaaaagaagtacacactttacaagcttgacaaatttgcagatctttttcttccctcgtaagtccgcagacctgtttgtctttaccagaaaaaaccacttactctgatctttatctccctcctttggtaattgttcagttggaaaaggtccaggtccctcagggtttctttgctatatcacgttatctccatagaaacattgttataagtggtggcagtgtgcttgggttcatacatgaaatcctgtttatcccagatgtcctgatttttaactgttggccattgtagctgaacagggtttcagcactgttgggttaattaagtacacttttgtgtcagggctgacctgggaatataagttgccagttaattctcaacagatgattcttcataaagaattacctggcgagtttattgcaggtgttaggtgtgactttaaatggagttttcaatctcttagcaaaggtaaaatgctgtgatgagtcaggactataatgttttaaggaattagtgttgcaagaccaagactcataaatatatggtcaatgatagtggtaagaaatttatggaatatggattattgacattttgctcaaaccagaaaaacttcccttaatttcaaggattagcattcagaagctacagcatctgacctttatttctaaatttaaaaaaattaaatatgagttttatagcatactgtgaagtgcttgttaactgcaagggaacttgatatcaaacagcacatggagtttactttcctgtctttatatttctagcacttttccacctttcccccttcaagcaaattttattattaaattggtacttgattattcaagtcaagctgccaaagggaagccatttcgatgtctaagtacatgtttttgtttgtttatttgtttttaaattgcggggggcggatatatgcactcatggggaggctaaaaggacagaactgtttgcttttatttgtataataatagctgtcagcccagtcacatgagcttactgaaacagatattctgtctttctgtttaaactgaagtttagtgttgtgatttgctgaatctcttaatttgcttaaatggtaaagaagttgctgtgggtcttcaggatacacatgttgaaataggagtcgtaaaaacagtttggagtcttgatttaaaaacactgtagggccgggcgtggtggctcacgcctgtaatcccagcactttggaaggccgaagcgggcagatcacgaggtcagtagatcgagaccatcctggctaacatggtgaaaccctgtctctgctaaaaatacaaaaacaaaattagctgggcgtggtggcgggcacctgtcgtccccaggtactcaggaggctgaggcgcgagaatggtgtgaaccctggaggtggagcttgcagtgagcggagatcacgcgactgcactccagcctgggcgacagagcgagactctgtctcaaaaaataaataaataaataaaaacactgtagtcgatgagaagaatggtgccaaagtcccaggataagggaaagggtggcgttcggaatctcctcacggttactctgtgactgctgcagacaggctccttgcagatgctctcatacacctacatatatatatattttctctatttggagagtaatagactgtaggattgggtggtttcctgcattgagatccttctattaatatatcaatgactctgccaatttcatacctgaaaaagtggtaggttagttatagaagatctttaatattcctttgaggtctaagattctgttaaatatttttgtttaaattgtgtaaaatacatatgacataacatttatcatcttaaccatttttaagtgtacaattcggtggcattaagtacattcatattgttgtgcaccatcaccatctccagaactctacatcttgcaaaactgaaactctgtagttattaacaattccccacttctctgttgccccagttcttttttttttttttttttttttgagacagagtctcgctctgtcgcccaggttggagtgcagtggtgtgatctcagttcactgcaaccttcgcctcctgggttcaagcaattctcctgcctcagcctcccaagtagctgggattacaggctcccaccaccattcccggctaattttttatatttttggtagagacggggtttcgccatgttggccaggctggtctcaaactccagacctcagatgatctgcccgccttggcctcccaaagtgctgggattacaggcgtgagccaccgtgcccagcctattcccccagttcttggtaagcaccattctactttctgtctctatgaatttgactactttaggtaccttgtattaatagtcatacagtatttgtcctttgtgactgactcatttcacttaacagaatgtcaacgctcgtccatattgtagcatgtttcagaattttctgacttttaaaggctaaataatattccattgtttgtcctgcattttgtttattcattcatcttttgatggacatgggttatttctgcctttggctgttgcagatagtgctgctgtgaaacattcgtgtacaagtatttgtttgaatattgagtatattcctgggaatggaattgctgggtcatgtggcatttctgtgcttaactttttgaggaactgccatactatcttttccacattggctgcacctttttacgttcctaccaggaccacacgagggtgctagcttccctacaccttcaccaacacttgttattttttgttttattgccatccttatgagtatgaatggtatctcattgtggttttgattggtattttcctaatgattattgatgttgcatatttttgcaggtgcttattggccacttgtatatcttctttagaaaaatgaccattcaagttctttgccccacccccacgtgtttttttttgtttttgagatggagtcttgctctgtcgcccaggctggagtgcagtggcgcaatcttggctcactgcaacatctgcctcccaggttcaagtgattctcatgcctcagcctcctgagtagctgagattacaggcgtgcaccaccacgcctggctaattttttgaatttttaatagatacagagttttgccatgttggccaggctggtctcgaactcctgacctcaagtgatccctccgcccgctttggcctcccaaagtattgggattacaggcgtgagccactgcgcccagcccctatttttaattttatcttttttttcccctccaccttaagactgagactttgcccatttttttaattgggttgtttattgagatgtaggagctgtttatatattttgtatgttaaccctttatcagatacatgatttacaaatattttctcctattctgtgagttgtctttcactctcttgaagtgtcctttgatgcacagaagtttttaagttcagtgaagttcagtttatttatttattgagacagagtgtctctctgttgcccaggctggagtgcagtcrcgtgatctcggctcactgcaaccttcacctcccaggttcaaacgattcttgtgtctcagtctcctgagtagctgggattacaggcgtatgcccccatgcctggataatttttgtatttttagtagagaygggggggtctcgccatgttggccaggctggtctcgaactcttgtcctcaagtgatccgcccaccccagcctcccaaagtgcggagattacaggtgtgaggtactctgcccagctgcaattcatttattctttttgttacctgtgttttacgtgtcatatccaataaatcactgtcaaatccaatattgtgaagcttttcccctatgttgtcttctaagagttttatatttttgctcttatatttaggtctttgatccattttgaattaatttttgtgtataatgtaaagacccagtttgattattttgccaacactattgttgaaaaaactgttctttctccattgaatggtcttaagcatcttgttgtaaatcatttgaccatatatgttgactttggttttatagtaataccattgttacaatatggtttgatacatgtaatttttatttgatgtttctgaactttgtttaaaatattggacttgttccatggctgaatgattgataataaaataataaataaaatattgtacttggaaagtaaatatgagggtagtaagttagttatctattcgagtaaaagaaacttgaggcatagccagttgcaatttgtgagcctgagttggatcctggtctataaaataaatttagataaaatagggaagtttttaatatggactgggaattagaattatactaggagattattttgttagatgtgataatagttttgtggttatgtggaagaatattatttttatagagatacttgctgaaatatttagtggtgaagtatcaaatctgcaaccaactttgaaaatggttcggccaaaataggaaatgtagcaaattattaaccttttttttttttttttttttttgagatggagtctcactctgttgcccaggctggagtgcagtggcacaatcttggctcactgcaacctctgcctcctgggttcaagcaattctcgtgcctcagcctcctgagcagctgggactacaggtgcgcgccaccatgcccagctaatttttgtatttttagtagagacggagtttcaccacattgcccaggctcctgacctggatcacgacctcctgacctcgtgatctgcccgcctcggcctcccaaagtgctgggattacaggcgtatatggtgtttattgtattactcatttttttcttatgttcgaccattttaaaaatacattttcaaaaagttgttcccactgagctttagattcacttatcagtgtttgctagatagttccaggtaatgcgtaagtaccttaaactcaacatgccccagttaagctatcatttcctagtcgtcttcctttatgtcctttctcatagggttgttttctcctctaccttccatctgacgtcaccactctgaggaggccttttccttacaaacaatgtaaacaatccctctgtcatgtatgccattgtggtaaaacaactgtttacattttcaagtccctcacttgttrctgagctccttcattgttgatctcttctgtccagtattcttaaactgagctgttgaaatgtattttcctttattcaccacagtatttcatcttacttgtgagcgttggctttttcaaaatgagagacactggttcttttgatccaggccttgaatgtgaggcccagaagtcattccagagcactaatcagttgagcggataattatttggcatttaatcagtgatgatccccatgttagacaaggcgatcactaaatgaggctgtgctttgtcttttaaaggtgggaagaagagcgctatcctgaaggcatcaagtggaaattcctagaacataaaggtccagtatttgccccaccatatgagcctcttccagagaatgtcaagttttattatgatggtgagttgtttcaaggttcttgattcttggccaggaaaagaaatctgctkctatttagggatagaaaacaaggaaggatcctatgtaatagataatcctttttatttcattttgttttattgccatgcaattttgaggaaggggcrtcaggtgttaactcttaaaggctcatttgctgctgaaaaagtgccatggaaaaggggctattcatgtcttccctacatagtccaaaaaaggtttgtcaacatggctaacagtgtgtggtccacaagctgaaggttttgatctgaacttcatttctagggagcaactcttcgcaagagttattagaaaagcctcacttgaatggtagtattttatgttagcaatataacaatgcaatcggacaagctgctcatcactagaaacagtattagtatatggtcgaggattaatagtctgccatccatctctagatagggctggtaggcatctgtcacctattctgtgtagcataacactatgcctttgatatatgtgcaatcaagtctgatgagctgctttaaagaaatgccctgcctgggtctcttagaaccctcagaattgtcccttatctgtcgttggtatttgtatccttgggtttgaaggatttgagggtagcctttgacatgcctcctgttggcagtgtagcagtatgtagatggtaataactgattttcttcattccatgagttttatccagaaatggttagagcattgttcctcatacccttatgtgcttatgactcaccaaagtggatctgagcccatttaacagttgtggggtgggcttcttttccctttccccaccgtccctcttcttctttcccctttcccaaccatccttccctcttctgtcccctttcctgacagtcccccttctcctttccccagcattcctcttccacctccacttgtcttaccaccgtcttttggccactgttatttcaccaccccatttctccaccatttttcccaccctcagccccccactgttttcttctcacccatcccaccgcccgcactgaaaagaaaaagttctggggtgggattgagtacttctgaaccaagtggtctgctgaccaaactttgagaaacactgggcaggataactgctgaaaagcatcagtggtgaacactcaggcattctggtgcatctctcttcccaccagtagtggccttaggtccaccaatgcttgtaggcctaggtagtagtttacactaaagggctgggtctgcaactgaagaaagtgccaaacttggcaagctgaaatttgttttttaaaatgccatatttattagccaagtgtggtggtgcacgcctgtagtcccagctactcgggaggctaaggtgggaggattgcttgagtccaggaggcagagattgcagtgagcctagatcgtgccactcccctccagcctgtgtgacagagtgagaccctgtctcaaaaaataaaataataaataaataaataaaacatatttattgaatgtatttgtggtcagacaccaagacccagcagtggatagtactactgacttagaccctgatcttggggagtttgcagcctaacaggactccataatctcagaggcaaatgcttatgttaygtaaacattttgacctgttgaccagagagcctaagacagttctttcagccctcacgctggtcattcctggagactcttaactataactcaaagccaaaactcctaattaagagaaagggcctagaaccttgaagagcaccatctcaaagcgtaggtattccgtaggcctggtctggacttaccaagagctttaggatgctcagctggtaaagcctcactttgaggttcaaagtgatgggagggaaagctagattccctagtcctgtggtttctcttccttttcaagataggaagcagaggcctggtctagttcacaggttgccatagtcctttcctcccattcttgcccagtcctcctttacaggatcctgctttagggctccagcattttctcagctggtcctctgctgggatttcttctctttgattgtgtgaactcttactctgcagtaagtcaagaagtcatatttgactttacttcaaactgatacagtaagtgctgcctactctctggggaggagaattcttagactcctttagaacttgccagggaggtggggcatgggctagctgaagcagtgaattactgccttctctgaggaccttcagtttacagctttgattcagcagtttccttttcctggagctcagccttttccacaaagtgttaacattgccaggaaccttccagtcatcctcccactactctgatgcagggagccatcatttcatcttttgacagctcatctaaaataggaggagtcacagttgcttctccctctattaggacagaattcagtaaaacagcccaaaatctcatttttttwaaatttatttttatatttatttatttgagacagagtcacactctgtcacccaggctggagtgcagtggcacaatcttggctcactgcagcctccacctccaaggttcaaacgattctcatgcctcagcctcccaagtagctgaaattaacaggcacgtgccaccacacctaagttttgtatttttaatagagacagggttttaccatgttggtcaagctggtctggaactcctgacctgaagtgatccttgcaccgcctcctaaagtgctgggattacagatgtgaaccaccatgctcagccacatttttttttaaatggtgttaacagtttacatttttttcttgccattttatttcatttattttattcctaatgacttaatgttttcctttatattggaaacatgttacagttttctaaagaagttcagggaatcttttaatacacagcctatcttccccgaagtgtctttcttccaaagcagaagcttgggggttgatgggggcagctgcgccacctgttggccttttaagttaatggcgtccaaagtgggttctttctattataactgtttcaatattgtgctacagttctctacacccctgcaaagtcagattgcatatcattatgagataagatgtcttctgagtttygaaataaatggatttctggttaaattttagttttctataaagaatgtgggcagccttggtgaattattaatacctgtgtaatagtaaggtggtggaattatagttaacctcattttaagtatagccaaatgctcttagtatagcatggattggttcgaggtgatgttgtaaagttggatttttaagaaagaatggaaattggcactaagagtactgtcaaaagcatttgtttgaaaagtggattaaattcccaagtacttttctttcattgctttattaactaaatcaggtatataaaacccataggccctattcagattttctttaccagttagcagctttcattgtgaaaacatctgagtccctttagacagctttttgtttatttgagacagtctcagtctgttgcccaggctgaagtgcagtggcgtgatcttggctcactgcaacccctgcctcctgggttcaagcgattctcatgcctcagcctcctgagtagctggagttacaggctcccaccaccacgcccggctaattttttatatttttagtagagatgggttttcgccatgttggccaggctgatctggaactcctgacctcaagtgatctgcctgcctcagcctcccaaagtgctgggattacaggcatgagccactgctcccagcccctttagacagcttttacataaacaattggatacaccaggaaccccagtcatcccttgtgctgtggatgcatcctggttccctgaaagaggcagcatcatggtacccatgttccagagcagtgtgtcgcaaactctagtgtgcatccaagtcttgttaaaaatgcaatttctgtataggattcagtaggtctaggagggggcctgggattctgcatttctaaactcccacatgatgccaatgctgctggtctgtgaaccacttgttgaatagcaaagttctagaagaaggtcttattaggcttttcatatgggaaatctgggcttgcctagtatggatatatatttttttattcatattccacccacctaactttgaagaagaaagatgcctatttcttttccccacaattcctttcttccactccctgccctatcccttcctccccttcttgaacagaggctgcttagcttagcagtggcaggagtccctctgaggatttgatttttaaaaaccattgaagaggtgtaaaggaccctgcttgctgaaaggaaaaggaagagtgactgggcctcccccaggtcatccctgtcctgagcaggcacctgggaacaattaactggcatagtctccagagaatgacccaggtaaatatatgctaaagagaaggagaatttgtacaagtagatataaatcagtatgttgtctttgttgttgttgctactatgtgtcaccagacctttatataccatgagaaggcaaaccattattaaagagaattcgctagccctgggtatttatgcttagaacatgaatactatacctcactttttggaaccacttttttctctaggtaaagtcatgaagctgagccccaaagcagaggaagtagctacgttctttgcaaaaatgctcgaccatgaatatactaccaaggaaatatttaggaaaaatttctttaaagactggagaaaggtactgtagcccatgtgttaatatcctagtaccttgcaaaacaatcaagtrctaagtaataaattatcattttgcaaaacatttcctgatgtaaaatttgagttgtatggattttgttgtatttaaacttgcgtattttttgtcttcatttactatattatgtagggtttctgtccaacaagagtacttgtatatctttgctattggctctcatgtgatggcaggtaggtgggggttatcagattaggccaaacagaaaacctcaactccagttgcgcacaggaaagtttgtcgctgcaggactgccccgtgtctgctgttgcaaagagaaatgttaatctgatgtccctctcgctgttaattcttgctcatttattttaggtactttctactcttgaaaccacatatactatatttgcctargtgattttttaaaatctcattattctcaatttggataatgtggacagaggcagcagtaaagtttacttcctgaactagctcagaaaaagcagacttaataaatgaatagaataggggtaatgtttccaagagagaatcagtatgggatttcaaacttgtattcataatgcctgggggctgtgtgccacggagtctaagaaaccacataagaattcatttttttccatgataagtcattttaaaacattttaatattagtaagtacatattttataataaagtaatacaactgtatttttttgttttttcaaaattcattaattgagattggctacttccagaaacctttgactgaaaaaatggtgcttgggtgtatttgcaaagaaacccaaggacttattagtgtattttcgttgtttttctttcatctccccattttcttttgactaggaaatgactaatgaagagaagaatattatcaccaacctaagcaaatgtgattttacccagatgagccagtatttcaaagcccagacggaagctcggaaacagatgagcaaggaagagaaactggtactacagaatttattaaacctctggagaattctggaattgtgattggttcatttaactttcttcttggttcttatgacacaacattaacatcagtaatttcacatcattctatgctaaagacttagagttctcaaagtctaaattttcttaaaggttttagttagactgaaaattgtgaacaagtactttgctcagtagctctgtacaggaatcttggtgcttcagtgacctaaaaaccagtcagtaactccagccaataatatagtaattaaggatgggcagacctgtcccacagtggctactggatattaaggatttaagacagatgaaatcatattggccatgtacctccctgctctttgatctattttactctggaatcttgtgatgctcatccatctccatcttccagccttggccatcctcattactgaaggatctttctggtatccagctgggatgtcatttttcttctacaggctgcctgtttttgtaaaaaaaaaaaaaaaaaatttattggaaccagctgcctctacttgtctacatattatctacggctgtgtttatgcaacaatgacagagatgagtagttgcaaaagagagtagttgcaaaagagactgtgtggcactcaagcctaaaatattttctatctagaaaaagttgtcagcccctgaactaaaggaatccaggctagaatttcatttttaccaatcggaagtccagaagttaaggattttaaggaattctttgcacttcaaattcctgtagtttcagtattttaaaggacttgcgtgtttacgtaattcagaccattgtattgatataactcattgtttcatggtacttatttggtcactagtttaaaaattaatgcattactataagaatgttaattgcatcagactttgtgtctcaggtaaatcttatcctcaatattccaagttagtgaaatttagtatattatttacttcaggggcattttgaaacttaaaagatcactttggagctttgttcttagaatattgatccaaagatagattttataaacatccccttgtcagagcctctgccaaggacacctgctgccagcaaggtctgaatctgttcccacccacaaggcagcacaacttagttaaactgaatcaataagtatataaaacgcagagtcaatagagggtaaggaggctcaaaatctcccccaccatccctcacctttttggagcaaggatcatagtatagagtgtatatacctgtatacctacaaaaaaattagtgacagatctgtctgagcttaaaaacccacgtttttaagctgtttaactgctgtttaattaaatggcttgagctattcttttatgaggctctatcagagactcttctccatttcctgttttgatagtactcagtaaaacagtatgaatttttaaagtacatttaaaaacacccaaataacatttacaaacatatatcctttaagacacaagaatcagttttgaatctagttgaaatcaatccttataggcagatctttttggggaattttatgatatttaagtttgagaaaaccactagaggttttcctttatttgaatttattttttagtgatttttcagactttcctctaccttgacttagtctcccacaagagataaaatgcattagtagagaacagcaatctgaatctattttgagtactttcttgctgtcttccagaaaatcaaagaggagaatgaaaaattactgaaagaatatggattctgtattatggataaccacaaagagaggattgctaacttcaagatagagcctcctggacttttccgtggccgcggcaaccaccccaagatgggcatgctgaagagacgaatcatgcccgaggatataatcatcaactgtagcaagtgagctcgcacttcatcctatgggccaaaaagggggtggagggcgtcctttattgtacttgggaatatttcccaggttacacaggactgtttgggaagggagatacttaagagcaggacagtatttcatgcgtaggtctccagatgtttttgaggtacagttgtctcccctcatccacaggggatatgttccaagacccccagtggatgcctgcaacttcgacccaattgctgtcacttggaacacatttctgttgatgtcttccacccccaaatttaatgtcttttccatgtttattaagtacttatcacatagagtggctataacttttgcagtctgaggcacaacagcaaaactagcacgactttctttttccttcttcacaatttcacagatggaaggttaattcttaccttagatcttagcaacttcaccatacagttttttttattaagtcgataatttccaccttttcatttaaagcactctgtgcagcttctgtatggcatatccaaattgccaacatcaccactttcacactttggggcctttattaagtaaaagaaggattacttgaacacaagcaatgtaaaaccattaaagtcaacctgataaataaggcagctactaggttacccatgggcaagtgacatatacagcatggtatgttgtatatatggttcacgcatcccaggtgggactacaagagatttcatcatgctcctcagaatgatgtgcaatttaaaacttacaaaatgtttatttctggaattttgtattgaatattttcggatgacagttggctgagggtaagtaaaaccatgcataaggtgggactactgtattgactgttaagaaggaaacttggaaaattatgctcagcagataggtccacttggggtcatgaaaggtgaaattattcctcayatcttatttcactatcctcgtgctctgttatttccagagatgccaaggttccttctcctcctccaggacataagtggaaagaagtccggcatgataacaaggttacttggctggtttcctggacagagaacatccaaggttccattaaatacatcatgcttaaccctagttcacgaatcaaggtaaggggatagttgagagctgcactggttcatggtgctgataacctttttttgttgaaatgtaacgttctcgtyctctagaatcactttgacaaattaaaaatcctccccattgaaagaaggcaagtactttcatagttagcattatggtgatcttcctacagtgcctccatttttttggtcacattgtaatcttatttattaattcacaaatatttactgaaatcccaaatgtgccccacacagtatacatttgatgctaggaattatgttggtaaacaagatagacgtaggccctgccttcatattgcttaacgtccagtggtcagaatgtgttgaagtatggtgattgtatattggcctctgcagatgtcttctacttcctcacctctcttggttatgagaagggaatgtagtttctgtatatcctgaaacaagttgtaaaatctaatgtcttacatacttctggcttcctgcagtctcatctgggtaggttcaccagggccaaatgaaatgtgtgtgaaagcacatcataaaactgtgttacatacctatgcactgttatttattgatagtgttattgcaaggagataactgccttgggggaaatcagtttttgtttgccagatagctatgtatatctagctttggagagtcccacgaacttcttccctccaacatactatgaaatataaacctaacagagacaaaaacacagtcaaggaattagttctatgtagactgttaactgttttatgtgcaggagacctgggactaaagaccttcttgatcctcgttcataggttataacatctgttaaaatgtgaaagccacagctgaaaaggctatgtgaataggcaagactaaactgtacattttctggcttgtagccctgtgttcttctgtatatcactacttttctaatgaaaaatacctgtttatatattttctccaattataaaatatacttttctggctgggtgtggtggctcaagcctgtaatcccagcactttgggaggccgagatgggcggatcacctgaggtcaggagttcgagaccagcctggacaacatggcgaaaccctgtctctactaaaaatacaaaaattagccaggcgtggtagtgggtgcctgtaatcccatctacttgggaggcggaggcaggagaatcgcttgaacctgggaggcagaggtcgcagtgagctgagatcacgccactgcactccagcctgggcaagagacttagactctgtctcaaataaataactaaatacataaataaaaataaaatgtagtttttgtagtttagataagtacaaaatcagaaagcgaacacttatgttgagcagactagtcatttaaagaaacatgtattcctcttctgaagtatcgcaaagctgtatatatggctacaaaagcagaaaaataatagttttagcccttaaggaacttataggctggtgggcaaatcaggtaagaattcagttgtattagaagaaagataaaagtaaaatgcattagataaacagaggagttatttgcagcaccttagagatcaacaataactttatgaagaaaagtaggttatggttgggtcttaaaagtagtatttcaaacaagagagaactgtgtcgtggacaaaggggagggtggtaagcagagtatgttgaggataggggttgagaaaaggtgtgataaaaagaattatcaagtggtgacagttgcacaacattgtggatatactactaaatgtcactagtggtaaatggtatcaatgcatattttaccacaacttaaaaatgatcaaaataacagagttactattaaaaacatttgcacataagttaacatttggatcttctaagcataccgcacatacatatactaatgccaccatttatagatgagtaaatttagtctctgggaggcccaaaaatttgcccaagattcagtggctagtaactctaacttagatcttcttagaatgtaacttagatcttcagtctctgcatgctttcctgtgacatccactgctaaatgtggccagctttaaatgccatgttaaagagactgagcccttaaaggactttgaacagtggagtgtcttgaacacagcttcacttcagcaagatttacaggcattatatgtaaatcacatcagtaaatatgaactgttataaatgctgcaaaggaaaaagtacagggtgccatctgagagtataccagggtacctgatccagcctctggggttcagggatggcctttctgaagaggtaacatttaaaggataatgtaaagaaaaaatttttttaaattagtacctgaagatctggctggcctcactatatagcttcctctcctgcctctttcttccctcagaacgaccaagctcttgctcacctctgggatttcaaaaggctactttattttctctattagaaacacccattctcctattctttccagggatacaatcctattcatcctgtaaatctcatcttaaatgttaactcttcagaaaggccatccctgaatcctagaggctggatcaggtaccccggtatactctcagatggcaccctgtacttttcctttgcagcatttacagcagtgtaaatctactggtgtgatttacatataatgcctgtaaatcttgctgaaatgaagctatgttcaagacaactccactgttcaaagtcctttaagggctcagtctctttaacatggcatttaaagctggccacatttagcagtggatgtcacaggagagcatgaggagcatacgctctaagaagattgaagagttactagctgttggatcttgggcaagttttagggcctttaagtttaaaaggaagccaccaacctgggatttaaagagggaaatgacaccagatttgtattttggaaactcgttacataattgatcattctgactgctgctctgcggagactggattggacacaaacaagaagtagagagatcaatgggaagctgttgcatactccaggcaagaaacagcgatgacttaagacaaatgatggcaatggggatggagagaggtgacagatacataatgtatgctgagtacttgtacaggtaaggattagagttaattaattgttggagcctctctgagggctgagatccttgttagatagaccaggtgaaatgcctcaagagcagagagccagtcaattttattccagacaatatccagctaactgctatacacaatagacatttgtgcaagtttctggatgatgatcatggtagtgaacctaaaagtcacccagagttagactctgaaccttatgctcaggagaaagtgcctgacttgaactgcaatgggatcccaataggagtcattaaaggcctggaaaagtggtgccattaggagaaaaagaaatgatttcttgagcttgctctcagttctcttttaggctgtcttgtactcagcagaatagtgagatcttcaaaggttggggtttgatagtgccttgaataatttttaactttatattgccagcggaagaagcattctctttttagatttaaaaaatgtagatacaaatattaggggttttatttttagtgaaacatttcaaacatacaggaatagataattatgtaatgaacactcgtatgtccaccatctggctttgtaaaatcttaaaattatgtcttatgtgctcaattgttttatttcataaaagatactgataaacatagctgaagtcacttgtataccattcaccttcttccctgtagattactatgaactcggtctttttattctcatacatattttttgtatttttgcagtatatttatgtgttcataaacaatatgtaattttacaatatgtaacacactagtaacatactaatttaaaacttgtttttagtttacaatatgttgtaaactattgtaagctaaagacatattgtacaacctattgtaaaataaaaacaggttttagttttaaattaggtatgttactgggatcattctgcaacttgtttattcctctccagctttgattttgtggttttattatcttaacctacacttttaattaatccattttatttgttacatggtattctattatatcataaaaacttatctattctgttggtttttgttgttggtcatttgagaccatgtcttcgctctgtcacccaggctggagtacagtggcgtgatcttggctcactgtgacctctgcctcccggattcaagtggttttggtgcctcagcctcctgagtagctgggattataggcgtgtgccaccatgcccagctaatttttgtatttttaatagagacgggatttcaccatgttggccaggctggtcttgaactgacctcaagtgatctgctcacctcagctgcacaaagtgctgggattacaggtgttagccaccataccctgcctctattctcttgttaagaggcatttagcatggttatacagtctcttgccctcataaacagtgctggaagaaacacatgtttcttgtgtatatgaatgaaaatttgttttatacattagatatttccaaattgttctcttaagtacttcagtttacatcattactctcctcctccctcccctcccacccccacccacaacagtattcctctttttccatatccttgctaatgtttctaaagttttgctttttacatttgggtcttagatccactagaatgtatttttgcattgggatgaagttgaaacctaatatattttccaaatgagtaaactgttgtcacagaactatttagttgtattacctcctctcttgtatatcagatatatctacatatatgtcagactgtttctgggctgtctgtcctctttaattagttcgtgtatctgtttctgcatcagtagcatactgtcttaactactgtagctttataaagtctattgagtaggacaagtttgtttcattcttcaaaattgctttggctattcttggccctctgctgtttcatattaactttcagataaacttgtcaaattctaatgaaaactgttgataaacttgttgattaacaaattctaataaaaactgttgagatttttattggaattgcaatacatttatagattaacggagaaagatattgacaatacaattgagtttccaattcacgaacatgttatacctctccattaattcatgtcttttgaatgtatccaccaatatggttttgtaattttcttcataaaggttttacatttaaaaaattcttatttttaagtgatcttatagtttttattgctaatgtgaatgagatttttttccattatgtttctgttggttattcctgaagtggtaatgcttataattttggggtgttggtcttgtatctggcagcagatacaagaggtgctcagagttgttcagggttgctgaactcttagttctaaaagtgtctgtcatttggggtttctatgtagataatttaattatctataaaaacagttcttcattttcagttcatatatttcatatttctttaagttttaatttttatttttaaacacaattatccataaaaccctaaccctttccctagtcaacagcagtcacagccaaatgttttattaattgctatactcagtgtttcttgtatctcataccttctggggtttcttgtcttgttgaaatacaccctttaatgtttctttagtgaagacccaacagtggcactcactcacctttgtttacctgaaaatttctttattttcatcttaattcatagtctgtcttttctccagtcaaggaagtgtcttatagggaagattctggtttcactatgctgtatccagggatatatatgtatttatagatagacttttaatctgaggactaatgtattttatcctacagtattaccaatcattatttcttccataacttctagaccattccttttgtacttcttttttagagtcctattagatgagtgttgacacttttcaatctagacatcttttttaaactatattttcatactctttgtctctttaggtctgattttttaagttcaggggaatatttcattttgggtgagttgtagcactcacttccaattcactaattctaattatatttaatctacaagttattccatctataatttatttcaattaccactttttgttttcaaaatttctaattttatatctgattttgtttcatttttgttttataatttcatgttctttctagattttacatctttttatgcatactaaacatactcacttgaaagtctttgtaagattgttctataaaatgttacctgaagtgaattcatgtgctaattactgttggcagtttttctgagccattttccttgtgtcttttgaaatttctgtttgtaagcccttttaactgggaggtgttttttgcttatgtactgttctcttttcttccccttcttctccttctctgttcattactttttgtcttggagggagtctcttagcccagctcagcccaagctaataaggcccctgacttcaagtccccccttcttgcatggagcaagaagtgatcctcctgtctcagcctcccaaagtgctgggtaggcgtgagccaccacatccagcctagagcacttacattgctacatatttggagcaaacataattaaagtatgacttactgtgacccagcagtcaataacagataygtttttgtaatagaatgttgaagggtggtaactggtggttttacttcatggagggctttaggtcggctatatgggaagctgccatcatgatgcttttgttctacacatttctgctcagcctccagagatgtctcctattctaagagtcgtctttgtttactcttgtgtctatattttacttacttaattccctcacataatagtgtatcattgtatcccatctgtgctctatcaagaaatgtagcacaagcatgatgtgaactatgaattttcgacaatttaaaaaattaaaggaatcattcaggggtaaaaagcacaaagttgtagaacagctgaagtgtgttctttttatgtatcctgtctttgccccctttctggaaacttggattggcctacttgcagtcactgtcacagttacactacttctagcctcaaaggtcattgaaaggattgggatttttgagaaccacaataacacttgctctaggtactgaaaaggttgtcctgaactcattcatatctttttatgttcatcccagtttgtttttgcttttccccccaggattttgattacacagacatcttgcaagcatatttccattctttctctcccactctgtgcctggtgcccgtaggatctgaaatagcattggaatgacagctagccttctggaacctgcagtttcaaccaaagaaactctgattccagataacccaggagtttcttatcctgcataatctaggagtttacaaaaaggctgcttatgggtactcactgctaagtacaatccactgccaagtttggaagcattacctgctctcacaacccagggaaagtagcccttagtaaaattcaggttttttcaaaccagccttaaccttacaaacagaatttatcatcatgatttttctttcaaatgcagtacagcaaactttaggatcaatgttgacatcgtattgcgtttagtcctgttaaaatactctcagtgccaaatacacacttctgccttttttctctttagagtctagaattctgtggggttccaaaaatgtatgtgcttacaaccttttatatgtaaccacctagggattaaagggctaaatgtgaaggaaagtatctttacaatattcatcttgggaagctctcattttggtgagttctattagagaaaataagacacaagctcattaaaaatatatatatattctgagcctggcatcttggtataaaattcaaaacgttttaaatctatttattagtaagactaacatagacctaagtgtgaagactaaaatattaaagcttgtaggtgatatcatggttgaatatgaccttagagtagattccttaggacagaaaaacaccaacaagagaaacaattgactaaatggacttcattaaaattaaaaatttatgttcaacaaaagacactgctaaaataaatacagaatttacagactaaaagaaaatatttgcaacatgtttatctgaaagggcttatatccagactatacaaagaattcctgtagctccataataaaaaaacagacatcccatccgcataataaaaagagcaaaagacttgaacatatactatacaaaagaagatacaggaatggtcaataaataagcaaatgaaagagtgctcgacatcactaattatcagtggagtgaagatttaaccacagggagatacgaattccagttctaggtatttttacctcaagtgaaataaaaacatttatccatgaaaaaacttgtacaagaatgttcatagcagtgctctattcataagagtgcaaaactggaaacatcccagaatagataacacattatggtatagtcatagaatatactatatttatcagcagttaagaagggaactacttatgtattcaacaacatggatgaatcttaaaaacatggttaagggccaggtgcggttggtgcatgcctgtaatccaagcactctgggaggccaaggcgggtggatcacttcaggtcaggagttcgagaccagcctggccaacatggcgaaacaccgtctctacaaaaaaatacaaaaattagccgagggtggcgcacacctgtaatctcagctattcaggaggctgagacatgggaatcgcttgaacctgaggggtagaggttgcactgagccgagattgcatcactgtactccagcctggtgacagagcgagacgctgtctcagagggaaaaaaaaaagttaaaaaggcagacagaggagtctatattgtatgattctatttatataatctagactaggcaaaatttatccatgatgatagtaatcagattgaaggatcagtggttgcttggtggaaattgactgagaagggaaatagtcatgtaagaatactggcaaatgtcctcttccccattacaaacgtctgagaaagttactagaaaacagaatccaatttgccttctcacccccaactttgtaatcttgaatccagatcctgattccacccaaccactctgctgaatggatagcagctatattagagagacaatatagtgggcctactagttttaaaaagtcatccaaagaatgtcatctacaatcagttaaattagatttttacccattactgaagtgtgattgaattagggaaagaggagaggtggtcaaaggcagccttctccagtggattccttgtcttcttgagatggttttgtgagaccttgcctggaagacctaggtggatagtttattttctaaaagtagtcaagaaagcttgttcagggcattgaacactgcagggacaagcatacttcttggaggccagccatctcctgctggatctaagcggggtggcttctgcctccacctccatctcagcttatttgagagaatcctagatccttggtgcagaagcccagccagcctgtgaagaaaagttggtctggtagtatcctgtgaatgacgtgcgggttgggtttttctaaatctcgtttacctgactcctaccttacattccagtggtgtgactaaggaactgagcaaacgtaaccctaggggactttgagacaggctttggtagtccatgtgcactagagtgaggggaaagaggccactccagagttgggtactctactgttgaaggtgagccttttgtgtccaatttttccgtgcatgtgtaagaacagttgtcatggagatttactactgacttgtgcatgaggacagcttatatctcaccttttcttattcaccctgttaaatgtcaaaatgtactaagacttaggtattttttctgtgtcaccaactactaaatcacccacccatgatagcaggtagttactgaaactcttgtagccaaacaagtgcataacactggtacacatgatgtgagagtgcagatgactccttagcttaactgtgtaagcttttaatttctgagtacttttaggattgagaagtggaagacattcttgctctaggtatctcatgcttctgcacacccagaaggctggttgcgcccccaccccaccccccgcccccttttttttttttttgatagggtcatgctctgttgcccaggctgaaaggctggttatcttcaccacaggtcttatgtctcaaggaccacgggtccacgtcatagtcaggaaccaggcatgtgtgggcagaaatcactaccactttcctttgttgcgggtggggaaattaagagcagagattcttggattcttaaattccttctctatgtttatgtcatctagtctgttttatgctgttttatgtaattccctgcttctggatttcttgaatttttttccccttctcacttgtcataattggctcttgcttgtgagtctattttcattcagcttggtagcagaagtcttcttcactattgtttagattcagttttcacatggttttagtaacccttcattgggtttagaatcaacttttaacccttccaccaaaagctcttatttttttaaaggcttcccagaaacatagtttctctcaatctcatcaagaaatgcttttaaatgcagaagttagaaaatggtgaataattatggctgttcctggaagtcattgtgtccttagtaattacatgttgtagtctttggttctgcttctttgacagctccaccacactgtaatttaatggaattcacttagatttaatggaattcagtcctggtagaaaactgctattgggtcacagagttggcagcaaggctgtgaaattgatgtgggaatgggggtgattatgtgctttgtgttgacagaagttagtttttgggacatcccatgtgggtttttcccaggaacataaacattttagagaattagagctagaaactttcttctgggaaagccttagaagtcagttgtgcttggcagtgagatgggacaatgtgcattcttaacaggttaaatgtgccaaactctctcttcagtactattcttttttacgtttgcttaaggtcaagttcctgctcttttgttcaaagtcttgctttgtcacccatggtggagtgcagtggcgtgatcttggctcactgcaacctctgcctcctgcgttcaagcaattcttgtgtcttagcctccctattagctagctgggattataggcttgcgccaccttgcctggctatattcaaagtctgtctttactacactgtcccaaagtaatctacatttgggtttgggtctttacagggtgagaaggactggcagaaatacgagactgctcggcggctgaaaaaatgtgtggacaagatccggaaccagtatcgagaagactggaagtccaaagagatgaaagtccggcagagagctgtagccctgtacttcatcgacaaggtgagagcatcttcccatcggcattgtctagtgttgagcttaacaaagggagtttctgctctgccccaggccctgtgccacatactgtatatcacaactcaacatacatatatttgtatgtaaaactgaatcaaaagttgcacaaaacaatgcttagccttactgtgagcagtagattctgatctttttttaactctatttcattcctttagaaagttggttataacttataaaattgtttaaataaaccatgcaggtatcaccattatatagttttaaagaccacgctctagaggagatcaatttcttggtactcacgagaagaaaaaaaagttcatgtttttcccccagtcttgtattttaacataagttctgaattgtctcaaaattcacactagctttttgagtttgattgcccagagtagcagcactccctcatttgctgccttatttaattttttttttccttttctccatccctatttcagaggacagaatagaaagaaaaggagcatgaatatttaacatccctatagatttcatagtgagtgggggaggaagtaacactgcagaatccagagttcccaggccatgctgactgatgctgtggcttcaaacagaattgggaggcttctgttttggatgcctagaaattgcataagggtcaaaaggctgggcgcagtggctcacgcctgtaatcccagcactttgggaggccraggcaggtggaacacgaggtcaagagaccatcctggccaatgtggtgaaaccccatctctactaaaaatacaaaaaaaaaaaaaaaaataaaaattggcgtggtggcgggcgcctgtagtcccagctacttcggaggctgaggcaggagaatggcatgaacccgggagacggagcttgcagtgagccaaaattgcgccattgcactctagcctggcgacagagcgagactgtctcaaaaaaaaaaaaaaaaaaaacacagaacgaaattgtgtaaggatcatgtctcttccattcatgctcatcttttctttctttcctgggcagcttgctctgagagcaggcaatgaaaaggaggaaggagaaacagcggacactgtgggctgctgctcacttcgtgtggagcacatcaatctacrcccagagttggatggtcaggaatatgtggtagagtttgacttcctcgggaaggactccatcagatactataacaaggtccctgttgagaaacgagtaagttaatgtacctgtactgtctgacttgttttccattattcaacaagcatgggttgactgcttttttgtgtgctttgcactttgctgggcaccagcaaaagtgacttgagacaggcaacatggcacatgcctgtagacccagctantcagaaggctgagacaggaggatcactggagaccaaaagtttgaggctgtagtgtgctgtgatcacacctgtgaatagccactgtactccagcctgggcaaaatagtgagaccttgcctctcatattaaaataaataaaaataaatgacttgaaagaggggagaggtattatttgatatcttgtgtacctccttttagtcactgttccgccctgtgctaccttcctggtaaggagtggccttctcctatagcagtattcaatggagcatgctgtagaataggcccttagagcaaactcagcatatgatttaactatatcttagtatcccctggtcatgtggtacatttgtcacttttcatctttgctcagcctttctccaactcctgactgagtgaaaggttaatgttagtccccagatctctgagcccatcactgaagagggtactatagctctgtagtcccaacctaatcttttccatagtattgggcttgaaccagagacttacagtgtgcaggatcctaataatccagcccaccagcagtcctcttcttataaagacacctcttctcataaggacaccataatcagtaatcaggttttgctggctgtggaagtactctggacagattagataacagtatgtatcaatgtaaatttttgaagctgatactgtgtaaatgtaagggaatatctatttttagaacatacacactgaaatgtttaggaccatattataagtaagtacttataaatgtactttaggaccatattataagtaagtacttataaatgtactttaggaccatattataagtaagtgcttataaatggctcagaacaaacaattatgtatatatatctgtaaatatacacatggagagagtgagcatacatgcacactgtgcaaatgatgaatggggtaaaatgttaacagtgaatctcggtgacggatgtatgcrtgttccttgtgccttkttctttgcaagtttctttaagtttggggttatttctaaagttaggatttttttcaagagtaataattaggattcacttatatcttttaggtttttaagaacctacaactatttatggagaacaagcagcccgaggatgatctttttgatagactcaatgtgagtagatgaagcacacaatgttgaagggagtcccagccagagcctcacagtacctaaaggggagsgttgctggcagatgacttsggctctccctttascctggcctgctctgtggcatcccatacactctctcttcctccctctgagtccacggtgaatctgtagtcaagagaagacacatctgctgcagaacaactgctaaagcactcagggtggggggtagatgagccctaccttttatccttccctgctcctgcagagctttcccttcactgaatgcccagccacccctgctggagacccaaaacctgtccctgatatcttaatagggaaggamaaatttgctttattggtttgttaagcccaccaacctgggccaggcttggtggcttacgcctgttatcccagcactttgagaggtcaagtagggcagatcccttgaggtcaggagtttgagaccagcctgggcaacatggcaaaaccattatccaggtgtggtagtccacacctgtagtcccagctgcttaggagcctcagaaggattgcatgagcccgggaggtggaggcrgcagtgaaccgagattgtaccactgcactccaggctgggtgtcagagtgagaccctgtcatacacacacacaaagattgaaatacttcatagagaggcatcatgtaaccctgtattctggaattcttttcctctttccctaacttcccacttgtagggcaataaacttgacaagattgtgactgcactggcataaattactcctagggctgccagaaggagcaggtagtatagctttgacctaaatctgttgctttgtctcctccagactggtattctgaataagcatcttcaggatctcatggagggcttgacagccaaggtattccgtacrtacaatgcctccatcacgctacagcagcagctaaaagaactgacagcccgtaagtattgcttggccagatagggcccacacccctactwatggtatccggtgaccttgcttatctaaggcstagagtcagttctactttttttccctaccattgtggtcagacactttttccctttagacctctagtagcgagataatgctttgttgtataaacataggatcaatgctgtttcccccttcccaccccaacttcaagattaatttcatggaatgctgacagcttttcacctgctacaaaaatgcctgcatttgtgttttatacatatattacttaaaagcccacagagtgaagacagtgctgtgatgttctgttaaattggagagagtaaagttgtcatggttaccagaaaaatacaggaacaagtcctttccttgaggtttctgtcatttttttcccataagagagtagatactttctatagctgatttttagaatattatcaccaagatccacgggctttttttttcctggagcccagtcactattgaatttccactgccctctgtaaatacatcagatggccttagaatatgaaccagaaaagccagaggtaggtatgttgagggtcagtattttaaggtggtataaagaatgccacactatacaaataaaaacaatttttttggatggcatttttaatttttctttttaaataagatactaccaggccatgtgcagtggctcacacctgtaatcccaacacttgggtagccgaggcaggagaatcacttgaacccaggagttccagaccagcctgggcaatgtagtgagaccttgtctctactaaaatttctaaaaattaggcaggtgtggcggtgtgcacctgtcatcccagctacctgggaggctgagcccaggagtttagggctgtaatgagctacgaccataccaccgcactccagcttgggtgacagggtgagacgctatctctaaaataataataataaccataataatactaccaactgtggcttaatttttttttttttttttttttttttgagacggagtcttgctgtcacccaggttggagtgcagtggcgcgatctcggctcactgcaagctccgcctcctggggttcacgccattctcctgcctcagcctcccgagtagctgggactacaggtgcccgccatgtcgcccggctaattttttgtatttttagtagagacagggttcaccgtgttagccaggatggtctcgatctcctgaccttgtgatccgcccgcctcggcctcccaaagtgctgggattacaggtgtgagccaccgcgcccggccaaaatttttaaacttttaacgtcccttcaattcctcgttctgttctggctacattgggtggagaggtggggaggtaggragtggccagtatagaacttatgaatatgggcaacaaaccatagtaatatcagcagcacctatgatgagcatatgggtggggaggaagcaaggagatgaagggtccctagccaagttccctgagtaaaaagaaaggtgtagattttattatattacctagactcagagttcctcttgtgataggaatttacccaggccaagcttacatataaacttcctactatcattttcttaagactgttgactcaaattttgaccttagtccttgggggcaatttgaattaatcatctgagtaagataagagccagcaaaatcatggggacgaggcactgggggaagacatactgtgtgttcacttttggtgtacaaactgaccctcttgctaccatgttcctttctttacagcggatgagaacatcccagcgaagatcctttcttataaccgtgccaatcgagctgttgcaattctttgtaaccatcagagggcaccaccaaaaacttttgagaagtctatgatgaacttgcaaactaaggtatcttggataaaatgaagggaactgtgtctgctgtgggcagattatctgcgaatgagaggattcagggctgagatatcagcaggccagtgctgggtctgttgtagaaggtctatgctaaagataaacaaatggaaatatgatagtagttaatctctgatcaagatactgaatatcagagtatccattattcaagaaatctttattctacgcatagaagttctatactggccactccctattttgaaaaactaactttggtgtacattctaattgctaattactgtccttattgtacatgaggaaagtggatttaaagagagtcttcataattccttgctacagcccagaaatacagccatttccaaattagattgtttcaaattgaaaagatgatgaaacaattatatatttaaagtctttcaaatcctagcatagctatttttatttttacgcattccacatgaatcatatttttatatagttcatcatcaaacatctgttgaatactggccgtgtgccagacaacttgctgccctaaagggaaagactggtgtgcaaataggtgctattccttgtccctgagcctctttcctcctcctaactccgcctggtactgagcttttaaaccataaggcacttaacatttgatgatgaacatttttgtgttagcagtgacttcataactaattcatcctaacatggtggtccacagtgagaatttgcagatatttcattatagaacagatacacagggttaaaaaggaaacaaattatattgaaatacagttatcaaaatacattttaaagtccgataatagatgtgcttccttattaaggtcttgaggtggcctgtagtaaatttcaaggtagtaattaattaatatcaatgatactttaagatttctgcagcaattcaaatatgaaatgaagatgtctaacatctattgatgataaagtcataagtgctgctgctattactatggtttgttccccatattcataactgaagaagaaatactaaatttcagctagaagctgggtgcagtggctcacacctgtaatctcagcattttgggaggttgaggtgggagaatcacttgagctgagtaattcaagaccaacctgggcaacatagtgagaccctgtctgtattaaaaatttaaaaataaatataaataagttccaaaaagaggttattgaaattatagattttttctcatccaagttcatggaattctatacttgtacaactggagtttaagaactactactgtggaatgagactgcattttaaggcccagaatattttccatttgttgagatttccttaagataagtacccatgagtaatatagctggttcaaaaggtacacacaacttataatttatgctacagatgccatctggctttcttgaagagacgtacatgtccacagtgaatgagtatacatccatagacctttgattccttggatcatatgattggcaggcaaagaactctatagacggcccatcctagcagctcacatttgctgccactctgttaaatgctggtcatctggaattgtttattctcctcatgttatcattacaagccagaaataaaagcatgaatattcaggtgctgtttacctaattcaggaaaacccctcccaggagcatgaggaggtcttttgttgctctcgctctggaaccgggtttgggcagcccaggctgcctgccagatgagccctccaaacccaggattcctctcctgtgtgcccacaaagcaaacacacgcccctgtttgccaagtgaatcaatggagtctttgatgctttgagagaatttgacatagcctgccaatttagcattcacagaaatggttaaaagatcatggtttgctacatttctatcctaaaaagaatctggctagtggtgtctgtgatgcttttgtatatagaatcagtcccctcagtttggctttggacaacatagatgttggaagtaagccattcatagtaaaacatatttagtgatcctctcacaatggtggcctctgtttccaatcttgggctgtgtgtatctaacaacaaacaattccaggttcagtgagcagcccagtgtgtgtcagacatgttatttactccgtagaggttgtcttcacctcacatagatgaccataggtatggggttctcctgccctctgagtagcgtgagctcagtgacaggggctctagctccatgttgttatccactgctgtctctaagcaggaatctgagaagaacttagattcaccaggggtgcttcaaagattctaacaagcaagaaaggctgaaactgcccttgtctcttcccttatagatatggattccatgagagttcacatggggaaaaaagctccacagctaaaagtgttttcacatccattgagtgacaactaaggtccttcccacctcagacttctctcctttttttttgagacggagtctcgctctgttgcccaggctggagtgcaggggcatgatctcggctcactgcaagctctgcctcccgggttcatgccattctactgcctcagcctcccgagtagctgggactacaggcacccaccaccacgcctggctaattttttgtatttttagtagagacggggtttcaccgtgttagccaggatggtcttgatctcctgaccttgtgatccgccctcctcagcctccccaaagtgctgggattacaggcgtgagacaccgcgcctggtgaccgctctccttttaaaaacagaatgccaaagctaagccctgccatgtcctggtttgggacagactggctgagctgtttggcttcctgggtgtcttttaattgccagtttgtagccccttgagtactctcttcagtgcatccattttccttgagaagctggcaccgccttcccagagtactggtgggatctgaggaacgagctggggttgcccagtagatgcaagtatcctgcttcagtttcctaaagaggagctcctacagtgttcttagaatgaaagctaagaactggcacaggatctatttgataaacagctgtcatttgtagccatcctcccagatgtatgacagcagagtgttctctgatggaaagatcagcacccagattcccagccccagcgggttcctttccctgagcccctaggttactgccctgtaaaacccttgtttctttccagatcactgaagaacaaatagttgaattcactagtccttgtgcatcttctccctgccttcatgaagccacccttgttttttttwatctgacaaaccactgacagagacagcctggtccagataacatcttggtttcaccttctcaggtggagccatttttcctctacagctcataaccttaccactattatttcccctagattgatgccaagaaggaacagctagcagatgcccggagagacctgaaaagtgctaaggctgatgccaaggtcatgaaggatgcaaagacgaagaagtatgtacctggtattgtgaaagttggggctggtagagaaaagtgtgcagcatctgtcagggcccctggggccctggcttttcgatggtttctgagaaatgtcttttggaaatctctatactagggcttttattgactyaaagtggcaggatgggtacagtgtgctcttgtctagagcccaggcctggttcttgaggactttgctattcttctagggtagtagagtcaaagaagaaggctgttcagagactggaggaacagttgatgaagctggaagttcaagccacagaccgagaggaaaataaacagattgccctgggaacctccaaactcaattatctggaccctaggatcacagtggcttggtaagtgttgagccctccttgagctcctgctgctagcttaagaaaggtggagggggttccgagagcactggtggccttcacatgccattcctaagctacacactttagtcctctggggaaacttctggcttcagctgtgtacaagttactctggttgctgaaccttgtctgtaaatgcattgcaacattctggttgctcctaaatggtcagtgctgttacactgccttgtagtgtatatttttaagaggcaggtgccatccctattcctaatggaactttaggacaggaatggaaactcttagcttctggaagaataggaaagagcccatccatctctacacttcaacaaaacttttcgttgaatttttttgcagttgaaggtaggaacaagagataaagatgagaatacagatctgagcaacttacacagagaggcagagggacctttaacaaaagcagataaatactaggtttctctgtgtgtcacacacagtgtcacataacatctgaaacaagtggctttgttatggaagatgtttagtttgagctgttaagttctgagcataggtggagatatcctcccctatggcacttgctagtccgggctaaagtttccatctaggtcttttgtacctctttctgctcgttttgccttgtttggtgctagagatttggttagctcttaaaaggcaatatagtatagtggttaagaacatggagaaaaactgcttgggttcaaatttcaggtcacttaccagctagctgtgtgagaaaatcagtaaattacctaacgtctctgcctcagtttcatctgtacgtttttcacttgtacatctgcagaagcacctactttagagatcactgccaagattaaatgagttgatcacataaaacctttagaacatgcttggtgcactattaatttgcatcctcactagacagatgtgaaagagaagatggaacatctgaccctgggcctcagatatgggccattgctgagtcaccctaatcccccccttatttctcctttgtttgcaggtgcaagaagtggggtgtcccaattgagaagatttacaacaaaacccagcgggagaagtttgcctgggccattgacatggctgatgaagactatgagttttagccagtctcaagaggcagagttctgtgaagaggaacagtgtggtttgggaaagatggataaactgagcctcacttgccctcgtgcctgggggagagaggcagcaagtcttaacaaaccaacatctttgcgaaaagataaacctggagatattataagggagagctgagccagttgtcctatggacaacttatttaaaaatatttcagatatcaaaattctagctgtatgatttgttttgaattttgtttttattttcaagagggcaagtggatgggaatttgtcagcgttctaccaggcaaattcactgtttcactgaaatgtttggattctcttagctactgtatgcaaagtccgattatattggtgcgtttttacagttagggttttgcaataacttytwtwttttaatagaaataaattcctaaactcccttccctctctcccatttcaggaatttaaaattaagtagaacaaaaaacccagcgcacctgttagagtcgtcactctctattgtcatggggatcaattttcattaaacttgaagcagtcgtggctttggcagtgttttggttcagacacctgttcacagaaaaagcatgatgggaaaatatttcctgacttgagtgttcctttttaaatgtgaatttttatttctttttaattattttaaaatatttaaacctttttcttgatcttaaagatcgtgtagattggggttggggagggatgaagggcgagtgaatctaaggataatgaaataatcagtgactgaaaccattttcccatcatcctttgttctgagcattcgctgtaccctttaagatatccatctttttytttttaaccctaatctttcacttgaaagattttattgtataaaaagtttcacaggtcaataaacttagaggaaaatgagtatttggtccaaaaaaaggaaaaataatcaagattttagggcttttattttttyttttgtaattgtgtaaaaaatggaaaaaaacataaaaagcagaattttaatgtgaagacattttttgctataatcattagttttaraggcattgttagtttagtgtgtgtgcagagtccatttcccacatctttcctcaagtatcttctatttttatcatgaattcccttttaatcaactgtaggttatttaaaataaattcctacaacttaatggaaacttaagtgtctgcctctttgttacaaagggcctcaggccagagttggggctgggacttagtgtgggatgaggtctcaccactcaggtcagcaagagtagattcctcccaggagcagatgaggcagggcctggcctggaaaggagtgttgtgtgcctgtcctgctgctgtgggtgtgggttaaagaggatccaaagtccatatccttagataaaagacaggaaaggaaggaagggtgcaaaaaatccacagtaagaggtgtggtgcaaagacagcatcggaggcctagcgtaggtaaagtatattgagcaggatgttgcagctgtatttgagtcaaaagttttggagagctttccatgtgtactggccagaagcagaagggagctgctttaggttttttcacgtggctaagcttacaatcaggatggggagaattaaggttccagatcccagaagccccttcccacatgggatgcaaacttctccctgcattgactgcttaattgaaaaaggcagtgtggtgtggtctctgaccactttctggtgctccagttaccctagctggctatggtctctacaaaaattgttcctttgctcatcctaaattataggtaagtctggaattcagaatgaaagtgaggtctctgtctaggtcaaatggactgcagggagcaggaaggccagaagggtcaaaattggtaaattaatggaagggccctgggccctctagcttgttagcacgagcaggtaggtgtcttcggggaggcgaacccatagtctctgttctccctgaggctggaggcagggctggtactaggcccacaacagagaatcctggaggtccttggcagcctgtatttttattaaccagtgaaagaggcagcattcaccccagggaataagggaggttatgtagccatcactgctttggagcagagagactccagccaggtgtttttgaattctgtgttgaggtagctgggccactgaatgtagggaatacaacagagaggctcttttggtacccatttgatacactgtggctggtaggtaagtaggttggtgtaagtggacctcagatgccacagctaggggacaacctttggtccaaaactagaagtcaggtaaggaggccttgcaggcagaagaccttgctgatgaacaggaagtaatgcctacctctctggcaaggacctctcttgcaagtctgagggcagatgctgggcaacaagatgctgctcaacacaactaagaagggcatcccagacagtggcagcaggcctgggagaccaaagccagagaatgggaagctgacctggccactggggatgaaagaagaggctgaacaggtaagtgggggccagatgtaaaggaccttgaaggatgcttaacccaggagtcaagaataaacttatccacttgcctagtccagtaggttttacttccagccacgtccaagaacaggccagatgggcagggtctgagaaactccctcccatcaggcctttctatgatgcccgagttcggtgtgggcaaagggcttccacgtgctacccaagccagatatctctgtgctgacttggcttttctcctctcttacctcaccttcatctcccatcccccaaatctggccagcaagtcctgtctctccattctccctgccaaaagctgtcaaatttcagacctctgctacattaaaacatgaaaagtaaaaaaccttcacaaccctcagccctttccagccactacctttcccttttttcccaaacaagcacctgcaataagtcatcaccatccagtcattcccccacccactgcaactagcttctgtcccatgagcccacaattccttctcttcactctgaccaatgtcgccaatgactagataaccaaaccaatacatgggctctccattctgcgtcttagagtctttgtggcactggacactgttgaccactccttccatcattttgagggtacgatgatttttagcaactttgctgagtggtgcaactattaaccatgtcagttttagaacattttcatctccctgtaagatcccttatgctcatttacagttaatccacattcccactcccggcctccactaacctttctaaatttgcattctgaacatttcatgtaaatggaatcattcaataggtgaccactaccttctctctgattttcacaatgccaccctctcctggttttactcctgtccctatcaggctttttctgagtcaccttttctatcaggtcctaagtgccatgattcttacttcagcatagctgatttcatttgcacctaaaggtgatgacttctctttctctctagcctagagcccttttctaagctccagactcacattatcaactacacctctgcagggcatgtctacgggcacctcaatctcagcgtctctagaactgagctcagtacccaccaccccaagcctgttgggcctgggcttcacatctcagggaaaggcaccagatcctctgtcccccaacccagaaactagggtagccaccatccttcactcctctcgtttccacacccagtaaattactccaaaatcatctcctcaataccataaaatttattttctgaaaaaattttactccttagaaattcttcaaataatgagacactatcaacttgttttgaaccaaaaagcactttttagagaaaacacattaccctgaaatgacctcagtcaggccagttttggatgcttataagtagtcccctgacaaaaatcagtaaacaaggagacaaagaaatttaacacagacttagtaattttcacaatcccaagaattccattcagacaagcctcttagaaatcactaaatagcaaagacttttttagattttataattgtactgtgtgtgtgtgtgtgtgtgtgtgtgtgtgtgtgtgtatacacacacaattttttttttttttttttgagacggagtctagctctgtcacccaggctggagtgcagtggcgaaatcctggctcactgcaacctctgccgcctgggttcaaaccattctcctgtctcagcctcctgccaccacgcccagctaatttttgtatttttcgtagagatggggtttcaccatgttggccaggctggtctcgaactcctgacctcatgatcttcccgcctcagcctcccaaagtgctgggattacaggcgtgagccaccgtgtctggcccacacaaatgtttttaaaggagtcttttaggccaggagcagttagctcatgcctgtaatcccagcagtttgggagaccaaggcagaaagatcacttgagcctcggagcccaaggctgcagtgagctatgactgtaactgcactccagcttaggtgacagtgagattctatctatacacacacacaccacacagtcttttagaaaaattgagatagtaatggataataagagttgaggtttgggtcaaaataatatgggaggggttagtgggtagaatttggcatgaaacaaaagtggccaccaattcattattgaagctagatgatgggtatgtcggcattcactatactatacacgtagacacatttgagatttttctttttttttaattttattattattatactttaagttttagggtacatgtgcacaatgtgcaggttagttacatatgtatacatgtgccatgctggtgtgctgcacccattaactcgtcatttagcattaggtatatctcctaaagctatccctcccccctccccccaccccacaacagtccccagagtgtgatgttccccttcctgtgtccatgtgttctcattgttcaattcccacctatgagtgagaatatgcggtgtttggttttttgttcttgcgatagtttactgagaatgatgatttccagtttcatccatgtccctacaaaggacatgaactcatcattttttatggctgcatagtattccatggtgtatatgtgccacattttcttaatccagtctatcattgttggacatttggcttggttccaagtctttgctattgtgaatagtgccacaataaacaaacgtgtgcatgtgtctttatagcagcatgatttatagtcctttgggtatatacccagtaatgggatggctgggtcaaatggtatttctagctctagatccctgaggaatcaccacactgacttccacaatggttgaactagtttacagtcccaccaacagtgtaaaagtgttcctatttctccacatcctctccagcacctgttgtttcctgactttttaatgattgccattctaactggtgtgagatggtatctcattgtggttttgatttacatttctccgatggtcagtgatggtgagcattttttcatgtgttttttggctgcataaatgtcttcttttgagaagtgtctgttcatgtcctttgcccactttttgatggggttgtttgtttttttcttgtaaatttgtttaagtgctttgtagattctggatattagccctttgtcagatgagtaggttgtgaaaattgtctcccattttgtaggttgcctgttcactctgatggtagtttcttttgctgtgcagaagctctttagtttaattagatcccatttgtcagttgtggcttttgttgccattgcttttggtgttttagacatgaagtcctgcccatgcctatgtcctgaatggtaatgcctaggacctcttcaaggagaactacaaaccactgctcaatgaaataaaagaggatacaaacaaatggaagaacattccatgctcatgggtaggaagaatcaatatcatgaaaatggccatactgcccaaggtaatttatagattcaacgccatccccatcaagctaccaatgactttcttcacagaattggaaaaaactactttaaagttcatatggaaccaaaaaagagcccgcatcgccaagtcaatcctaagccaaaagaacaaagctggatgcatcacgctacctgacttcaaactatactacaaggctacagtaaccaaaacagcatggtactggtaccaaaacagagatgtagatcaatggaacagaacagagccctcagaaataacgccgcatatctacaactatctgatctttgacaaacctgagaaaaacaagcaatggggaaaggattccctatttaataaatggtgctgggaaaactggctagccatatgtagaaagctgaaactggatcccttccttacaccttatacaaaaattaattcaagatggattaaagacttaaacgttagacctaaaaccattctttttctttttttgagatggagtcttgctctgttgcccaggctggagtgcagtggtacaacctcggctcactgcaacctctgcctcccaggtttaaacaattctcctgccttagcctcctgagtagctgggattacaggcatgtgccacttgtaatgctaatttttttgtagttttagtagagaccgggtttcgccatgttggccaggctggtctcgaactcctgacctcaggtgatctgcccacctcagcttcccaaagtgctgggattacaggtgtgagccgctgcacccggcccagccaccgtacctggccaagatttttctttaaaaatgtcttttttatttagacacagggtctcacctctgttgcccaggctggagtacactggtgtgatcatagctcactatagccttgaactcctgggctcaaacaatcctccgacttcaacttcctgaagagctgagactacaggtgcatgctaccatgcctggctaatttttttatttttatatttttagagacaaggcctcactatgttgcccaggctggtctccaactcttggggtcaagcaatcttcctgtctcagcctccccagatactgatattataggtgtgagctaccatgcccagcagagatttttcataacatgtttaaagcaatacagtaactggttattttgaagattattagtatatatccatagaggaa

SEQ ID NO: 95806 - DNA, 17298 bp, Homo sapiens
  misc_feature (1)...(17298): n = A,T,C or G
gtcaggatatcgagaccatcctggctaacatggtaaaactccgtttctactaaaaatcctaaaaattagccgggcgtggtggcaggtgcctgtagtcccaggtactcgggaggttgaggcaggagaatggcgtgaacctgggaggcggagcttgcagtgagcagagatcacgccactgtactccagcctgagcaacacagcaagactccgtctcaaaaaaaaaaaaagatatcatttttttcctttttaaaaacatttcatattttagcttaaaaatggaagaggtggaagtgagtgcaagtggttaaataaataaataagtaaataaataaaaaggctgaggcaggaggatcacttgagcctgggaggtcgaggctgcagtgagctgtgatctcaccactgcattccaacctgagcgacaaagctagaccctatctcgaaaaaaaagaggggccggacctagtggctcacgcctataatcccagcactttgggaggccgaggcaggcggatcatgaggtcaagagatcaagaccagcctggccaacatggtgaaacccggtctctattaaaaatacaaaaaaattagccaggcatggtggctcacgcctgtaatctcagctacttgggaggctgaggcaggataattgcttgaacctgggagccgagatcgcgccattgcactccagcctgggtgacagagcgaggctccatctcaaaaaaaaagggaagagttgagtgtttttctaggtgtttaatgtgaaggacaagtgaaaagccccagaatggcccctgcaaacagtaacagtaactaacagtcaaatgtctctgccccaggcaggttagggacgagacagaatgagggtggggagcggggctcggggagcagaggccacggtctccatgctctgctcctctggccgcagcagaaccctgtgaaccccaggcaatgacagcaggatcctgaagcccatgcaggctctgaaccacgcggccatccagaaggggtgagataaatgttggggaaaccatccccgacccctgcgagccccaggagcccaggctgccgcctcctgcctcctacacccctcccccccacagctggccctggaggctgctggagctggggttaccccgtggggaccctcatgctctttgctcccctccttctccctccccctcccccacaagcgtgaaaccaactgaccggattgacagatgcaggtgcgcgggaggcggaggtgggggtggtgccagcagccaatgggttaatggtcccggcaggggctccacaggggaccaggggtcagatgtctctctaagatggggacaggcacgcaagctgctattccggggctctgatcacggctgtctatttatagcgctggggggagccgcctcacatagacagcagagaggctgccctgctgcaatgtcaccgtcgtcactgcctctgcaggctgcaggcacctgccactactgcagaggactgaggggccttggcccagcagggaccccagggccttgggggactgtgtgagctggaaacgtggctggccagatgggcagcaccatggagccccctgggggtgcgtacctgcacctgggcgccgtgacatccccwgtgkgcacagcccgcgtgctgcagctggcctttggctgcactaccttcagcctggtggcycaccggggtggctttgcgggcgtccagggcaccttctgcatggmcgcctggggcttctgcttcgccgtctctgcgctggtggtggcctgtgagttcacacggctccacggctgcctgcggctctcctggggcaacttcaccgccgccttcgccatgctggccaccctgctatgcgcgacggctgcggtcctgtatccgctgtactttgcccrgcgggagtgtycccccgagcccgccggctgtgctgccagggacttccgcctggcagccagtgtcttcgccgggctcctcttcctggcctacgctgtggaggtggccctgacgcgggcccggcccggccaggtgagcagctatatggccacggtgtcggggctcctcaagatcgtccaggccttcgtggcctgcatcatcttcggggcgctggtccatgacagccgctacgggcgctacrtggccacccagtggtgcgtggcygtctacagcctgtgcttcctggccacagtggccgtggtggccctgagtgtgatgggccacacagggggcctgggctgcccctttgaccggctggtggtggtgtacaccttcctggctgtgctcctgtacctcagcgccgccgtgatctggccagtcttctgtttcgatcccaagtacggtgagcccaaacggccccccarctgtgctcggggcagctgtccctgggacagccagctggtggtggccatcttcacctacgtcaacctgctcctgtacgtcgttgacctcgcctactcccagaggattcgcttcgtgcccagcctgtagcccacagtggcagcccacccacctctgctctctggccaccagctccaggctctgcgagggaaactcaggtgaaccaaagtgtcaagtagcgagcaggagggaagccgcgggctcaggggagatgaagtacaacgggagaggtcgctccccgacttccagactgggctcagagggacaagggcaggacagtagggcagaggccctgagcagacgcaggggagagcctcacctaggccaatccccaactcactctctctcaccatttcccagcgctcctggggctcagtgctggtcactggaacatcataagggaaaactttaaagcagctgctgttgtgacccattttgcagctggggacgtggaggctagaagcatttgcgaggcacccagtacctccattagtgtctggagaccacagtcaggctgggtaaggcaagctgaaagaggaatgacttccagaggagacgaacccaggagagtagctgggccaggcaaggggagggaggggcgtggggagccggaaccactcctggttcagagaggcagctcccagaaccctgggaagagagccctgcctggggagctgtgccagctcacagagaaggagccagaaatctggaccagcctctcccacccacgtccgggaagcctctgggctggtagccacagtgtttggaagcaggcttcctccggagtctccgcaggctggaggtggcgcgggtggcctggaagagcctgcagagcccggcggcaccgagtgcacagtggacggggaggacctggttccgccatagccacggagccccacctggacactcaccattggctgtgacgaagcagcttcagcagtgcccggcgggcatctgtgcactgtgggcatctgtggcactgggagggagcccggctgagggcggccgctggacacagaatctgggtactgcttgcctctgctcaagggtccagttgccgaaactcctgacgccggggccatcatcctccaggctccagccagcttctcctgcacagaagcccagcctggtccagccaggagctgacccactggccacccctgagtccaagccgggtgggcagtggcacaacagcccctcagcccattgactgggccccattgacgtccttgagcaggaaataaatgctgacatttatacgtaccctgcctctggaccagcagtctcttctgaggggactgtgggcacttgcccctcctggcggcccctcctagcgtgctctgggggaaggctgaggaaggaagtggcctgggatcacagtcagggcaggctgggctcctgagggtctgagcagcctcctggggaaggggcaggcagcgtcttctgcctcacaggggtgacaggccagcctggctccgacgggcctgtggctcatgcccgtccctcccagaggcccgcagcactcacctcctcccccacgcccatctgggggtctcgagaggccctggacacagcgatggacagacgcactgttgctccttttagacggcggtccccacagccaggcctgtgctgctgccatgaagaatgtgaggaaggggcctcactggccgctgaggaggggtctcgctcacgttagccaacaaacagggtccggccgacatcctttactcagagggggtgggtgttttggggtcaatggcagatcccagatgagggcagtcagctgttcagggcctgccgctggctgagggcgatacagagggggcatagggatcacctgcttcctgactcaggggagacctgggcaccagtcttggagaggacccagcctccttctctcctttttttcatgtggccagaattctgaaacgagttaattgtcaccaacttcccaatttcctccctgtccggtggtcctctgccaccttcgcaaaggtcctgagggacagaaaggaaggggaggggacccagggctgggagacttccttcagagtcagtccttttgacagtgtatccctggcccagagggctgtccattttgggtttttgggtttttaggtaaaagtgttacttgctgttatcacttggggaaaagtgattttgtaacagcctggggagcttggctctcaaagcgcctaggcgatgctagcctccgtgccccaggtttgagctgtccatctggacaagctcttcccatggccaccacagagcagcctcccagtgttggtggtggtcattacgtgttcacggtggggggaccaggtagacagatagccagaacgcgtggccctgccgctgtggcagaagcatcccaggccttctgaaatgatgtgctagaatagcctgtcatcatctaagatacagcacagaaaaaataaggcagctcctctcaccccttggcaggggaatgggctgccagtgatcccttctgacttcgcccttaatcttggccaccgacagggaccctgactatccagagccccagatgcaggcccgaatcagatgaactctgagcatgtcctcagggggaagtgactggagcttcactccccctaaaacccaggcaggcgagaggtttgggtattggaggatgctccgggctgcgtgggagtgggggcatgatggggtgggcttccttcgtttgcttagtggagcaccgctgcgtgcccagttagaggaacacctgtggccgcactgtcatgcctctttcttttcttttcttcttttcttcctttctttctctctctctttttttcagatggagtctcgctcttgttgcccaggctggagtgcagtggcgcaatcccggctcactgcaacctccacctccagggttcaagcgattctcctgcctcagcttctcgagtagctggaattacaggcacctgtcaccacgcccggttaattttttgtatttttagtagagacgggggtttcaccatgttggtcaggctggtctcgaactcctgacctcaggtgatccgcccgcctcggcctcccaaagtgctgggattacaggcgtgagccaccgcgcccggcccaaatggtgatatatttaaaatgcttccacttggcaaattattttcaactctgcccccaagggaaaaaaaaaaaggaaagaaaacgctgtacagccgggcttctccaaactcgatgacagtagaagggactgattcccagagagagccggccgcgcgcccagggacgccagctggacgcgtccgtgtccgggtggcccaagacaaagccctgcgtggagggcccctcacaggccccaatcgggccgccccctccgcccgcgtcctcggaccccacgtgtaggtcccgggaagcgcgaccaggaggagcgcgggtcaggggaccgcgtgccggagagggtgtctatccgggggccgggggatcccggggcgcgagagaggcgagggccggcggtcggcgtgggaggggcgcgcagatgatgcaaccgctctggcgccgccgcgcgctctgattggccagcgcctggcggccgcgcccggattcgctggcgcgacgggggcggggcctgggtgcgggtgccgcgtggcggccgcagcgctgaggggtgggtacgacccgcgcacggtagctgggttggggtcgggctccgggaatggtgggcggcggtcgccgggtggggcgcgacggtagcccagttctgggcggggtgggaacccagacgggggacccctaggcgccgggccctccctctccccgtacttttcccccttcccagtcatttcttctgcggaacctccacccctccagtgggtgcgggaccctaggcagcaggccaggcaccgccgctctgactgggggccccgaagcagttaacgggccggacagcaaagtggaaagttagaccagctgggaccaggggaggtgggcacccggctgcgggaggagcggccaggctggcactgcccccctaacttgctctcgatcctgccggtctcgtcccgcagagccggtgccatctgtgggggctttgggccaggggtctccggacagcatgagcgtgggcttcatcggcgctggccagctggcttttgccctggccaagggcttcacagcagcaggtaggcccccaggtgggggacggtgaggcccagtgggagagactggcctctttccacttctgcagggctgggggctgaaggtgggtgctgggtcacaaggcctgagtcctgcgggaactggcarcttctgtgtgtttggggctttacctgtgctgtctcactcttcttcctgggaatggggagggagggaagccaaagctagccatgaagaggaactgtttccggccgggcgcggtggctcacgcctgtaatcccagcactttgggaggccgaggcgggcggatcacgaggtcaggagatcgagaccatcctggctaacacagtgaaaccccgtctctactaaaaataccaaaaattagccgggtgtggtggcgggcgcctgtagtcccagctactcgggaggctgaggcaggagcatggcgtgaacccgggaggtggagcttgcagtgagccgagattgcgccactgcactccagcctgggcaacacagcgagactccgtctcaaaaaaaaaaaaataataaagaactgaagaggaactgtttctcccctcaggcgtcttggctgcccacaagataatggctagctccccagacatggacctggccacagtttctgctctcagggtaggtgcagatgaaagggagaaaggagactgagtctctgtggggctgggtgtgagaggcaggagtgtgtgctgtagcccccaccccagtgagggcaggggccctgggctggggtctcatggaccccacctcctcgccctgctgattgctcttgggacctgggtggtgggcgtgtgtacagctgataggagggtgttgttctggaatggagttccctgcacagggttaaagtttcgaggggtcctctgggggcctggcaggtggggccacagcctggcagccaaggaacacacctgggggctgcttgagaccaccactcccacgtggagagcccggtctggaggacggcagtcccaggctgggggcagattggtggcatggatggagggtccttttctgtctgcagcagggacatattccacacagagttcttcctccatttctgggtgggaagggtcatcaagggggtggtcagagccctgagcccccagccctgcccacccccaactccagcattctctgtgccattctacctgtggggctcttggcttggtgggggtacagacagccacgggaccaggctgagcccacctgttgcccctgcagaagatgggggtgaagttgacaccccacaacaaggagacggtgcagcacagtgatgtgctcttcctggctgtgaagccacacatcatccccttcatcctggatgaaataggcgccgacattgaggacagacacattgtggtrtcctgcgcggccggcgtcaccatcagctccattgagaaggtagcaccgcaggcccagtggggtgtggagaggggctgtctagagcccgggccctcagtacttcagttttcatctgcaaaagggttgcagcgtcccggcccactgggagagctcgggcactgcttggtggggtgagtgcatctaggcactgcgtccatggccagacggacacgctggtttctcttccagaagctgtcagcgtttcggccagcccccagrgtcatccgctgcatgaccaacactccagtcgtggtgcgggagggggccaccgtgtatgccacaggcacgcacgcccaggtggaggacgggaggctcatggagcagctgctgagcagcgtgggcttctgcacggaggtggaagaggacctgattgatgccgtcacggggctcagtggcagyggccccgcctacgtaaggactgcgggggaagctggcggcggcgggcacttcccgggaccaccgggcacatctgtccctgctccccytggragggccagggtggagggctccaaggctgtgggaactggagcttgcccagaagggaaggaggagaagcccaggagagaggctcagggtgccttctccccacaggcattcacagccctggatgccctggctgatgggggygtgaagatgggacttccaaggcgcctggcagtccgcctcggggcccaggccctcctggtcagtgtgtttcctgaccctctggtggggccactctttgcggggccctggggcttcactgggaggagccaagtggggcgtcagtgtgtgctacagtggctggggcagtgccccgcagaggcaggtgcgtgcccacagccgtcagcctttcttctggctgcagggggctgccaagatgctgctgcactcagaacagcacccaggccagctcaaggacaacgtcagctctcctggtggggccaccatccatgccttgcatgtgctggagagtgggggcttccgctccctgctcatcaacgctgtggaggcctcctgcatccgcacacggtgggcccccgcgctgcccgcttccctggtctccagtccttgcatggcagaggcctctctcacacacatctgctcattcacgcactcagcagatacgtattgagctccagcccagtgttgcgcaggacacagggggcccygaggttccctgggttactgtgggcagtgcccctccccaccttccgtttcctgcgaggagggaacatccatagagggacccggatgctgtgccctgtgctccccacataggttcaccattgtcatagctaggagtgtcatttgagccaggggccacaccagtggggtggcggggtggccagccacattaggaaacttctgtgggggcccaccttcctcctgccctcgctgtgggattaagttagaccagyaggacacgcagcaacatccaggcacaaggaaaattccatggaaggtgaaagaagcaaagagcaagagaaagacagagtttgctgtttgcctgggatcccacagctggtcaaaggcagagccaggctgggagccgctgtccccagttcaggtctgcagggtgggtgaggacgtctttctcgccacactgcccactctccagtccagacaccctcagactctgcgagtgccaccctgtaacagtgaggggaacacgaggggcctggcctcacctccagcctgcaggggagacaggtgtaaacccacatcccgtggtggggccacgagaactcaggtctggggggcactgcggggagatttggtgatgctgagctgattcgaatgaggtgagaaggagcccagcagctgtgtgggggcgtgtcgctggcagaggggaataaaggtgctgaggtgagggtgacagcatcgcccagggctgactggcactgggagctgtgggcttcactccctcttcctgggtgcacgcttgtgctccaaagccaacctctccctgcctctctagggagctgcagtccatggctgaccaggagcaggtgtcaccagccgccatcaagaagaccatcctggacarggtgaagctggactcccctgcagggacygctctgtcrccttctggccacaccaagctgctcccccgcagcctggccccagcgggcaaggattgacacgtcctgcctgaccaccatcctgccaccaccttctcttctcttgtcactagggggactagggggtycccaaagtggcccactttctgwggctctgatcagcgcaggggccagccagggacatagccagggaggggccacatcacttcccactggaaatctctgtggtctgcaagtgcttcccagcccagaacaggggtggattccccaacctcaacctcctttcttctctgctcccaaaccatgtcaggaccaccttcctctagagctcrggagcccggagggtcttcacccactcctactccagtatcagctggcacgggctccttcctgagagcaaaggtcaaggaccccctctgtgaaggctcagcagaggtgggatcccacgccccctcccggcccctccctgccctccattcagggagaaacctctccttcccgtgtgagaagggccagagggtccaggcatcccaagtccagcgtgaagggccacagcccctcttggctgccaagcacgcagatcccatggacatttggggaaagggctccttgggctgctggtgaacttctgtggccaccacctcctgctcctgacctccctgggagggtgctatcagttctgtcctggccctttcagttttataagttggtttccagcccccagtgtcctgacttctgtctgccacatgaggagggaggccctgcctgtgtgggagggtggttactgtgggtggaatagtggaggccttcaactgattagacaaggcccgcccacatcttggagggcatctgccttactgattaaaatgtcaatgtaatctaatgcaaaagtctacagattcaaatgttagtctcatgcaacccctccccacccctgccagaaacagaataatgtttgaccaaacactcaggcaccctgtagcccagtcaagtggacacatacaatcacccattccaggaggcccacaggattggaggagctgctgagggttgggttacaagggccaggggtgctctggttccttcaaccaacacatagttactgagtatggagacagcaagatgaggcccccttccctccagaggcagtgcacactgtgtgaggggagctgggctgggtagcagcagggtgtcagggtgtgcaggggggtcccaggtgcgccaggagtcagggtatgcagggggctccagggtgtgcaggggttaggagagctgagcaactttctggaacttatcccgggaactcatttccagagaccccataggctcactgcagaaccatgcttggtatatatggggcgtgtagagggcgcttggggaacagaatcctgcgtttcccccgagggagggaagacatgcaggggaacagggaggaaacgctgcggcagggcagatggcatgggtacatcctccaccgccactctccccctggcaagagtcctggccactccccataaaacgagtacccaccacacccaggcacaaaggggacggtaggtggggtgagtccctgctgtctggctgagatctggcagtgcaggagctaagcgggggacacagatggacggtgctgggccgggagtccctgcaggctcccctgaaggccccctcctgtatgggtggatgtgggcatcagggcgggtggggaatgcccttgtgtcagggctgtgagcaatagaataaccccctgccccagcaaagtgcctggcagtgctgggagaccctggcaactcctcccacctgggcagaggtgcccccagaagagattgtcccacaggccacacgcctgtcccaggaccaaagctgccccgaccattcccctcaaagccagtttccctgctagcgcccattctcaggtgctgacgcagagcaagacgaggggcgcggggctgccaaaggtgcttctggtccggggacacaagggaagccagcaggcgacgcgggtttcaagtgaggcagactggtcttgggctccagaggaagcacagggaggtgaggaggtgtgtggggggctgcagacgggctttgcaaggaggcgtttgcttcagcaggcgggccctaggagctttcccactgtgggttcctgattaagcagaggccagaggcaggtagagccagagtccacaggaggctcctgacgtgcgtgagaagtctggggaggtaggtgaggcaggctgtggggaggtggacacccaggaagccacagagcgtgaggacgggcccaccccaagtagcaacatgttttatgtgggcctcagcaggtcaaggagggagatggtgccgggggccaaggacccaaggatcctgccaagaagcgtcgaaacgctgccaggcagaggaaccctacagggggcccctgggggctggccagatggtgctttccctgctcctgtcaccagcagctctgacacctctcagtcctggaaagccccctccaaaaatgaagcggtttggagtgagtccccagcaggccaggtgggccctggaggaggagctgcccgcctctgcttggctcagcttctgcccccatttatttttcattttcctttttttttagagaggttctctgtcgcccaggctggagtgcagtggtatgatcacagctcactgcagcctgcaacccctgggcacaagcaatcctcccacgtcagcctcctgaatagctgggacaacaggtgtgcaccaccatgcccagctttttttttttttttttcttgtagcgatagggtctctatgttaccaatgctggtctcaaactcccgggctcaagcgattctcccactgcctcccaaagtgctgggattataggcttgagacactgcacccggcctgccgcagtttcttggttggaattgccctgactccagcttgccagctggggcccttgccctgcccaattctgccacgcctcttcagtgcccggctgacccctgtccatggtacttgtgcaggacaggctcagactctggaaccagtgggtcagcagcccctggccaggcagagatgggcaatgtccaccctgggagggccctgcctggagaccagggagagcagggctggactggacccgtctgggtgtggacgctagcacctccctcccggcagcatctggctgagatctgctgctctcaggaggaaccgatggggtcttaaggtcagtcccacagaagctgcagcctggggcgggaggatgccggggaagtgcctgcggggctcagtcccacagaaggtgcagcctggggcgggaggatgccggggaggtgcctgcggggctcagtcccacagaagctgcagcctggggcgggagggtgcccgggaggtgcctgcgggggccagtcccacagaaggtgcagcctggggcgggaggatgcccgggaggtgcctgcgggaggaggcatccagctgtgacgggaagtgagctcctggaggtgcagagaagtccaaacagggagccaggcctcaaggccgcacttaaagccggtcgtggagatgagtgtgcggagtgagagggatgcttggaaacctgtgggcctctctcgcagtatccctctcagtacagtagcctttcgcggttctggtggcctcatggtttggcccaagcatggctgcaccactgtgtccagggacaagtgtcctgggctctccgtggggagctggccaggagccgctggggaggtgaggagatcttcgtgcagagccagtgccagccctcactgaccacggaacaccttcagctctctaggaggacagggagacaggtcctaggggtttggcttgggctgtttccacgtggcacctcccctccctcgatactctttctacaagccaccgtatgctactctgcaggtgcctgggaccccacccaccccaagaagattctggggtgaggggcagcaaaggagcctgggcagctccctgagtgtcctccccagcccgtcctgcccatctctatgacagtgcccagggaggggaggactgaggctccttcccaggagaagacagcaccgcagtgaggacgattcataaatccgttccaaattcgcgcggaggtgcaaatgagagcgggctcgaccctgtgaggaggagttggggtgtgggagtgagtggggacagcctggtgagcgtctgcccgcggggtgggggctgccagccccagggccaatcacccctggctcctgacggcaccgtggctccagctcccgctgtgtggcacggagggcgggtcctgaggagactcgggggcccgccaggtccccgctgtgtggacctagccctcaccgcccagcaatgcacgacttcaccctcccgcggagcaggatgcccagcggctcagggcgccctcccctcgccagcccagtgtggtgtggtaggatgaggacgcgagcagggaggagaggcaggagacggagctgcactcctggcctcagggccccgtgtgctgttttgtacactaaggttgaggcctcggaagccacgccaggaccatatcatgcccctagagcctgtgagactcgggctgtgtccagagcagggggagcaggtccccgacgactaaggacaccaccgtaagaaccacacgcagccccacagcgcacacggcgacaacgtgctgtggggctcggaggagttcctggggtctggcagggacaggcggagggacgcttctgagccttacacctcacggcttcgggactttggggccggcctgttcatggacggagcccaggaggaccccacagcccgtccccgccccttcctccccgctcacctgctggcggggcggccacccttcccctcccaggattcacagctgcgaagggaagagggtggaggagaaagtccagacacgggatcccccgtttatcttcctcccgagtcctcgccccctaccgctgggcatctccaacaagcagcgaagtctcccccgggcggagctctgggtacacgtggcgcaggaagggcctgggcagctcggggtctgctgcgcgggcggggatcgcccctcgctgctgggagctgccaggccgtccccgccccgcgccgctccgggacccccgagttggaatcgcggggccccggcggcgccgtcctgacgcaagagcgcctctgcctggcagggcccaggccggcactcgagggggcgcacgcagagcctgccctaggctgagcactcgagctggaaaacgccgccggcgtccgcgagcttggacaggggccctggacggcgggcgcaggagccaggcgaggcaggctccggctgcaggacgccgggggctgggggtggagacctggcgctttggccgtgcgcccaggcccgcccgtgagaccccgccaggcgctagagcagccagtgttgccagggacgacggcgcgcgggttgcgcatgcgcagtttgccctcccgccgccgcgccttcccctttaagcgccggccggcgcgtcgccgcttcatgaatggagcccacgtgaccaaacatcatgtgacgtctgtggagcggcggcggcggcggcgagatcccgagcctggtccggcccggccttcccagtgcgctcggcccggcccgcacagcgcgcaggtcctccgagcgatggagtcggagccctcgcgccggtcactgctgcgcgcggactcggagagcgcgtagcccgaccgcgcccggcatcggacggacggaggaagctgtagtgagtgatgctccgcagcgggcacagtcggtgggccggagcggcgactgcggggggccgacgggagtcgtcagcacgcctcctgcaacactaggcgaccgattggagaacagacgggaacctgtcattctgcgctctgagcgcagcgtgctcgagggcgatgctacagttgcgcacannnnnnnnnnnnnnnnnnnnnnnnnnnnnnnnnnnnnnnnnnnnnnnnnnnnnnnnnnnnnnnnnnnnnnnnnnnnnnnnnnnnnnnnnnnnnnnnnnnnnnnnnnnnnnnnnnnnnnnnnnnnnnnnnnnnnnnnnnnnnnnnnnnnnnnnnnnnnnnnnnnnnnnnnnnnnnnnnnnnnnnnnnnnnnnnnnnnnnnnnnnnnnnnnnnnnnnnnnnnnnnnnnnnnnnnnnnnnnnnnnnnnnnnnnnnnnnnnnnnnnnnnnnnnnnnnnnnnnnnnnggaagaccctgcccctggctggggctcgggttccgtcagtcgcgtgccagagcccggagggagacttgctgagtcatcagcgtgaggtcactcggtgctcaagctgataccggaggggattcgagcgaggggcctcggggactaaaaggccgccagcgggaggtgggagggagccgtggggatgtgggagggggccaggcccggcgccttggggtgcctgtttaagtgagcgccgagcgatccagttgaaggcaggggtgcttgaagaggaagtgggggtggctcgctgcaggtgttctcccggggtcaaaggtgaagccccgggcggtccaccccttcccaggcggctcttttccggcagctggtcctggtcccaagtctggagcagttttccaaactgggaaatagttccctgagtgagggaggggaggagcttcggtgggccgagctagccaaaggggaagtcggctttccctgggactggcctggttggacagcccctggccagagatcgaggtcctgggagaaagaggggtgtgtgtaccaagccctgggtgacagtgggctgggcagggaggaagcaggggcagctctaccaggaaacggcaaaggggaggaagcagcccagcctctctccccagttggccctggagtctgggttgagactgtaggtggtgggagcttcagggtgcctagccttggggtgcagcagatgggctggtgtggatggcacagggtggcagaacgcagcacccagccaccctaaagttgtcgctacctgaagtggggtctcagcgttgtgtgaagttagcaaagggagtggccctgttgggtgtctggcctggcagcccaggacgcttagaaagtggcagcttgggagtgatgtggccagagccacctttccttgggtatgtggagattcacgaaggttgacttcctttgcccaggagttcatttcatggctgggttaggctactttgtggtttgccctcagggatgccccccgccccccgccacacacacacacacacacacacacacacaggtccattctcagtgagcaccc

SEQ ID NO: 95807 - DNA, 30090 bp, Homo sapiens
  misc_feature (1)...(30090): n = A,T,C or G
agcattaccttatgtatactcttaaggtagggttccaaaatcttggtactgttaacgttttggacagaaaaattcattgtcgtcagtgggtgattctctgcattgtaggatgtttagcaacatccccggcctctatccactagaggccaatggcacacagtccctctctccccccgctgtgaaaaccaaaaatgtgtccagacattgtcaacatccccctggggagcaaaactgcctccagtggagaacctatgttctaagaagaggtggacttttatttctattagattgattatagtatcacatgtggcagctgttctggaacataaaatacttaaaatgtatactttgcatatttttagtgtaattgtcccacttaatatttcttccagttctggttgaaagtgaaactaggtaatgagcttgcaatctatccactactcttcaaaactaaatagattctattacttatagaagagttaagtgttactagttattatgaaaaaacaaagacacattcagaaactaaatttttaaaagtctgaaaagctatttactaagggaagttgaattcaactgtttattatatgtaaagttattgttatcccctgctaccccaaatagttaaaaggagtttggcaggaaaccctaaaaatggccagcattttgatagacattctattttatagaggagtactgctcacataatcttaatgcattgctattacatcaccacgaggcagttgccttcataagctacttgaaggtatttcgctggccctcggggagaccacatagcagatggctaacagttcaaactgtttggtttcatacctggccccatcacttcctagctgagttacctggggtaatctgacctacctctatgcctcaatgacaccagctgtagagtaggactatgtgaagcattcagaactgtgttggtgcgtaatcagttttcaataagtgttagctatttttatagatcaggaactcaaataatgtcaattaaatacatgtgaattttcatccaagttagagaactaggaaagtcaacctgttatttgacaatggaaaatattatatgtaatgacaatcataccatttattcaacaaagaaaatatgccaggattgtatctagcatcttccagacattcattctcatcacgttgtggagctagaattcccttcgccccgttccgcccagtccccatttacaaataaagcatgtgaagttcagagggattgcttagtttgctgaaggtgatgcagcaagtaagtgttcgagtcagagtatgaactcaggtctgtcttattacaaagtcgattcccatttcacaattctatggttcttgactacaataacaataatcctaatggagcagctaacaacataccaggaatcatgttcattcacaggaccaattcacacaaactagtccatttaccacgatcagcagccctgggtactcttactacatttcacctttggaaactgagctttgaggaggtgaaataagtatataagatcatgtagtgaagaagccctcgaagctgaatccaaactataaaacctgggctcttggccacttgtgatgctgcctcacatcttaccaaagaaggatattgagagactcagagtccaagagggaagccagagacaggattaaatggttttatagtcagaagaagaagtttggatctttctgtaaaggaagttgtcagatgaataaaagcaaggagctaggcaacagcgtgttatatctggggacttctacaagtctcctcatctataaaataaatagttggaccaggtaacctccaaacttcttttaattctacaatgatatattgttgtggtttgtattatatcctcccagcacataatatacctgtgcataagccactccctagtggcttccctgcgcaactagtataaaatcctttcttgctatcattgtctgcaaggctctgcaggctgtagcccctgactgtctctgactccactacttgtcttttcttcctcagtcaccatgcttcagtcacaagcttttctgttctagaaacttcctttctcagggcctttatacttgctgtttcctctgcctgaaatgccctcccccagatctttttttagtggttcctcaaatgtacttccttcaataggttttctataaccaccgcatctaaagtaggatttcctcactcattattctttacctcattcctgttttactttcctcatactaattttcagtattggaaatttacttttgttgtttattttgagtcatttattgtacagtacccccatccatccccatgtaaactctgtgagggcaggagtcatgttgatctggtttatggctatagcctctgtgctgatgcctgacacataatagcattcagaatgattcattgagtgaatggatgatgagacaagttatcttgtgtagctcacctagcacatagaaaatattaagcacaaaataggagctgagaaacatgtaacggtagtaatgataactgacattgatcaagctctaattattggcactaggttaaatccttcacacactgtatcatcttagtcctcaccacaactctgtgaggtaagtattattattatcctagttttatagatgaggaaactgaatcttagcacaatcaagaaatttgcccaaagtcacaaagctagtaaattaacccagattcaaaaccaacctaatttcagcacaatgttatttgctaactataatctgtaacaaaattatttactaacttctgcaaagtgcaactgccattatctccatttggatttttcaaagtttataatttcaaggagtactatgtgagtaactactatatgtatcttgggactcaggctaggtaaagggtactaggtgcctaagatacagagataaataatgtgacacagtactcaacttcagggggcacagtttaggaagaaaaacataagcgtggtagaatggacatctccatgacccaaacactcctctgtcctctcacaaaaaaaaacaaaacaaaacaaacaaaaaaacacctcctgctgtggagactcattcctcttaaatgtttcccatgaacctggcccaggtgtttaattttgcattccttaaattatattctaactgtttagcactgtctaggagggactgaatagccatcatttactgagtgcctacacgtgacaggtgatttatctatgctcactgactgaattcttacaacaatgaggtgagtgtcattattcctgctttacaaatgagcagtcaacagcttattggggcattggattataacccaatgattacaatagagtgtctgattacaatgcagaattgccaatattaggatagaaggatgtgtatgcaaagacctatgggagccccaagaaacaaatggctcttggccttcatagatatttatttatttttattttgtttgagacagtgtcttcctgtttcccagtctggagtgcagtcgcatgatcatggctcactgcagcctcaacctcctgggttccgatctgccgaccttagcctcctaagcagctgggactacaggggcacaccaccatgcctggctaacttcttattttttgtaaagatggggttttgccatgttgcccaggctggtcttgagctcctgacctcaagcgatccgcctgccttggcctcccaaagtgctgggattacaggcgggagccactgagtccagccccagatatctacttaaacactataatggtaacaaatatgagaatatctggctttttattagctttttaattaaatatttaataaataatgtgtatctcactttgtaaaatattttaacaatatctttacattttttgagaaaaagcaaatactttcacatttttactaagaataatatgttagaagcttttttattataataattggaacacagactttaagtttttttacattacattttcctgatatactgcctgaatttttttttttctggggcaaagaaaagtacttttcttaagctactgtcagttcctttacttaagattattctgaaatgaacccatccttccctctaatggaaagataggtacataataagataagcactttttttatttgaacaaatccagtattagagtagtcttttgcagctagtgaatcatgacagcctgctaagaagaatgccttcagtaaaataaagttaggttgggactgaccaacatgaatgcataaagttaactccattaaaaaaaattgaccaggaaaataaaacaatgctaagccaaccactgtaataccaaaaacgctgctaaaaaatttagattgcttctgagtaaccaaaggtgaaccactctccaccctgtggtgaacatgtgacactctccctaacagcagctctgtggggagggcttgctcccactgagaattaattcactttccagaagtgagagataaggaaaaattcccatgacaataatccatttggtgaactgcagtttggtggtgtttgaagttttacgcatatttaagaatcaaacatgctcttacttcatccctgttaggaaagccacaatccagtttcacggaaaatgaaagacaaggattcctgctgatcaaatcgcctggctccctccacagaatcccgggaagccactctacattcacaaactttgcactcaattcttggcacctatcaacgccatatctccagggccaagtgaagagtctcatagcaactaagttaatatttgaaaattatgtaaagaaacaaaattacatcaatgggccccaacagatacaatgcacctacagaggcacaaataaaagcttcttctttgctacaaactccattttgtaatggtcctaaaaatttaaaaactttattgctgctttcttgcctaagaattccctgtgacatcaacccaaaacccacataagcagaagtacacaattttctagaatcttagaacaagtaagtctaaacatgaatcatatttgtttgggtgaaattgactgaaataaatagtaaagagtgattttgagatacatattgcaaaaatgtccactaataacttatccttgtatttatctgtatattttcaaatgtaagtaatgtgatgtcaaggccgacacaatcacattaaactgtgtcctgcttccccaactgtaactctaatactattgccctcagagattgcagagaccacagaaccgaactccttcccacaaacccccggatttttctgtggcaaaatcccttgtaggaaatgaattctctctatatctcaaaacagcctcacttacccagtaggccctgtaagcacagtgtctcaggtccacaatacttttagatgcccaggaaaatgtttccttttaaaataagaacaaaaaagaaaaaaattaggtgttggttaaagaaaatgtttaaatatataatattaagatatttatctttatgtcagtgttggtataaatgcgtgtttatgaaaaagggacccaccaaggtgaaatgccgtaggacccacaaatgtcataatgctggctggcctcaaaatgtccttcctattaaactattttgaatgattcctaggtatgccagatgccaatttttcttggccagccagggaacgtctcatgtctttggaagaaattatctttctcttactggattcttctgagaaaagtgatttgttaaaagttttggttatttcaaatcaatatgtactcaactaggacgtctcctcacccacgttaattttttaaagaggaggaaagtaggagaagatgagcgcttcatgtaaggctctgccagcctacgaggaaatgcaatcctccaggctcgaccgagcgtgggctgcgggcaggggactgtggsgccgttgtctcgttttattccacggccgtgcagcagagggcgcgtgcctctcagcactcatgctgcgcgctcccctgcgcctctaggatcgtatccctatttgccccaaggtcatagctcctaacccagcttgccagccccaggccggggacaccagagactgagcccttcgcgctggagaccccggcgcgggtggggcgggagggctccggggccaagagacaggtcacaatggggacaggggacgaaaggcgccgggggtccgggtcccgagcagtccccgccgccgccagactccgcagccgggagggggatggggtgcgcgtagaggctccgcggcccgggttggacggaggagcccaggagccaccgcagccgccgcacgcccagagctccgagcttcgctgccagcccaggacaccggggccctgccgtgggccgaggggagccgggcggcgggagaggagccccggagccccggagccccggagccccgccgggcgccagccgagagggcgttttccccgcccccggagactcgcccgcccggcccgccccgccccgagcgcggggagttcacctccgcccgtcaccacctccccttgtcgcctaggtccacccgagccccctcccccgggccgcccccgagcacgaagttggcgggagcctataaaagctggtgccggcgcgacccgcggacacacagtgcaggcgcccaagccgccgccgccagatcggtgccgattcctgccctgccccgaccgccagcgcgaccatgtcccatcactgggggtacggcaaacacaacggtgagtgccggcgacggccagcgcgggggcgccccgatccccgatccccgakccccgatccccgagcccggatgccggcccggggcccgcagcgcccgcacatgctgtttaccgcggccgcggggagtgctggaggctcaggtgcgccccgggcgctcgctccgctcgcggctccgcggcgccggggatgtcccccttgccccagctgcgaggccactgtggaggaatccccgcgtccgccggaggcgcgtagggcccgagggaggggaggcgcagccctggccgcgggacccgaggacagtccctcccgggtcccgacctggggatcattttaaccggacctaggaggaggcgggaaagggttgtaacggaaaattctagttgttgatcgcagagaaattaagagactcccctcccccctcccccaccttccacccccaccccacccctccagcttcagcaccacctgtggctaaggcgctcagcacgaactgtcccggggcattttccagtgctggtttgaatccatggctctgatttccgagttttcccttcatctctcgacttctaatgttagggggtcggacatcaggaatcgggttttatcttggcctcagatctggttcttcggagccagcggagcagaggagcatgcgtctggcgcacctagcgcatctttggagggtgtggggcttcccaggtagtggggaaccctgacggttaaaggtggggtgggcccgggcctgggcagtgaggaaaggatccagacctccttgaatgtcttaagtgagcttgcatatcccaaaatcgcaaccacaagccctgacattagtgtctgcccgatttcagttgctgaatttcagtaaaacgaccttaaaatagctaatatttatatagcactcagtgatctaagagctttacatatatcgattctaattcttacagcgacatctatgaggtagatttctaattatcccatattacaaatgtggaaactgaggcacagattacgtgttttcccaaaatttagcccattgttaagtgatgcttctaaaattggaactgagcagattggctccggaatgattgctcttctctaggggtctgggtgtacctttccccacaatgggggattcacatgtcttctttcccccaggacctgagcactggcataaggacttccccattgccaagggagagcgccagtcccctgttgacatcgacactcatacagccaagtakgacccttccctgaagcccctgtctgtttcctatgatcaagcaacttccctgaggatcctcaacaatggtcatgctttcaacgtggagtttgatgactctcaggacaaagcaggtcagtgtttagaaaataacttgtgtcttttagccagtagctgttttccgagcttaatggaaggagccaggaacagtggcaggaaccctcttaataatacagtttgtctcaggactcaaggatgccaccctgatcattttcattaggtctcagattctgagaagtaggctaattagtttgaagtgtcccggggccgtttcttccctgtaaaacccttggcttctatgaaggccattgaataactgcgatatgcctgtgaaaaatcacaaaaggtgcaaagtcccctcgcaataaagatcagtcacgatgagatttgcaccaattgaacttttaagattgtaaaatattttgtcttgcagagctgatgcatatccattaaaaagtatatcttagtgagccttatcttcaagttagcagcgagaagagtaacaaaaacgtgccaatttaaaatactgaaattctgggaaaatgttttacttatgagtatttcttagtattgggctagtgtgataaagatggcagcatgttttgatatctactcagaaattcatttcacaaacgaagatgttttagagttggtgaacatacctggcccattactgacaaaaccaattaccgtatttattggtaatagagctgtttacaggatgctcactgtaaaaaaaaaaaaaaagaaagagaaagaagaaaaaaaatcctgcttttttttttttatctctctctcttttgaaacaagagaacaatcccattcacacatagtagctgccttctttgctaagcagttaatttaattgccagtgccctattttcctgagtgctttcctctgaaggtcatagaatgaaatggtgctgcaaacacattttgtttggtggtggtgtgggagtgaggggagtggtggaacaaaatgagaaagttttggagtagtgacctacggtactaatatattatataatatgtaattataaccatttagtcaggtagactattctttgtcagcagctatcctatatagtcaacttggttttgaaaaaagaattcttccctcctttcaactttaaaaaaatttgcaaacacctggctttctgaaatggtgattctggaagacaatttgatgggggataatgtggagatcatctgagaaatgttttcaacctacctgtgcctgtctgtgtgcacccctccccagtacacayatacatacatacatacacacacacacacacacacacacttacaatcatactcacactttctggcatagtatgatgatttattagaatcaagtaaaggttgtacattgaaaacagttcggtgattctgctacattgctttcccaagcattcctctcactccaaaggaacagtgctcatataattaaattaaacaatttttttcttgtaaagaatactgtatatttataacaagacaaggccaaaggtctcaaggtattacacatacagaaagaatactataacatttcacgtctagtcatttacaaaccaaaagaagtgagctactttagtctgtagctgtacttttttaaagagccacaatgatgtcattgttttcaatggatgtaatgtctgccaaattatgtatctcattggatgctacatagaaattggatagtttaagtcttttttggagcactgaagaaacaaatctccaacaaatgaaagcagatgaggttcctaatagtccttaaaaaatggatagtgaaataaattattctagtaatatgtattactggaaagtggatttgaacacatggtctggtggctatcagcatagactggggtcagagagacctggatttgagttctagagctgccggcaactagctcagagactttgggagtaatactgtctaggttttaattgtttttaactgtaaagttggagtaacaatagtgtctgccacagtggaaggatgaaatgggacagtatatgtaaagcccctagcccagtgcctggcgcatagaagttgctcaataaatggcctctgttgttgtcacaacttgaacccttcgaccacctctgttagaccattgctgtagatgttgcacctgcgataagatttctgaataaactttttctttaacagctttaagattagttcccatcatttgatgtattttaaatttttatttttatattttctgaagcatactgtttatcatactgaatatgtacttattttatgtatgaagttattatatagttacatattttaccatgaatctgttaaactttgacagatttctctataagcagtaactaattagatctagctacatttttcacagctatttcttctggagagcaatgcatacatttttaaagaagttggccatgtttagattgtgaaacagatgaaaaccacagggtttcggtaggagctcccacccatgcctttagagacacatgtattatccacctagttctacaaaaaagtcattattaacaccacttaaatgcatgggaagctaagcatcatgaaagcagggtggaggcctggtccctctcctgttccccggagcccatgctggaaatatctaaagtagaaagacatagaaatagtagaccctgactgccactttgataagtgcagaaaggaagtactccaaggaactatggaaacgtgaaggaggcttggcagtttaactgataagacaggaaagactttccagggtaaataaggcttatgtggaggcttgaaggattttgatgtcttggacgagagtccaggcaaagggagataggaaataccaggagacttaagagagcacagcatgtgctccagaaaggcaagaaggtatactaaaagcaaggtcagaaaggacttgccctcctttgcatatgaaagattcctttgtaattttgcctctcttttccacattttcagttactttggttaaacaagaatgcagaatatattaaaatgtcaatattaagagaaaagacatctacagaataaatttttaaaaatcataccatgtgggggacaggcacggtggctcacgcctgtagtcccagcactttggaagactgaggtgggcggatcacttgaggtcagaagttcaagaccagcctggccaacagggtgaaacactgtctgtactaaaaatgcaaaaaatgagctaggtgttgtggcatgtgcctgtaatcccagctactcaggagactgaggcaggagaatcgctggatcccgggaggcggaggtcgcagtgagccgagaccgcaccactgcactccagcctggtgacagaacgagactccatctcaaaacaaacaaacaaacaaaaaaccmcacacacacacacacaaaaccatgtggaaaaactccctttagactttctttctttttttttttttwaaataaaacaatcctaggctctcaaagccaaaacaaagaatagagatactctagttaaactcaccttaataaacatgaagaaacagaagctgaagagtttaaataacttgctaagtcgtctccttgctagtttgctggagggactaagtagcaatcacttaaaaatagaattttgaataaaaatatttgaaggataaccttatttgacatttagtttatacataccatgttttttaaaagctggcatttttttctgtacacaagtcaaaaagttatttattttagtcacttaattttaaaaaatcggcagtttaacatctctttttattaggagttatttttgtggtggtaacatttttagatttcctatacctcttatttcctgcatttaaatgcagttcatttacctgtcttctttgcctcaatgagatttcagccttctagaacttctcatagattgaggttttccaatatgctttaaatgttctcttatatccaaacttaagaacttgggtatcaggaactgagcgggttgactttattgctgatttaagcttgagagaattttttaaactacggagttaataggatttaactagaaacttgggttagagctctcatcaatcttctaaattcctttgaaaataagccaccataaattcaccttaagttaatgaaaaattgctaatccctttaggttcttaaaaaacttattaaaaaataactcaccctgcttgagatgttttattaatggccttatctgggagaaaataatagtagtcaaattattaactcctgctaacttattaacttttattaatgagtttaatactctcctgctttattgcaaagttagggacaaatattgaaagtcaatgccagaattattgggccaactcttatccaagtcttacatcatttctgtttttcagaaattggaattttttaaatctgtttgttatttcaagaaaagagtaaaggaagctggatgagtttacctgtgctctttttaagtgacccattgtctgtatgacgtaatggatcttcatacatggatcctgcttgactttcagggacttgcttttgaagctctaaaagttttctttcacagcagtcctaagttaaaagaaagcataacaacaaatgaaagggcttgtcatgcacgcagtaatggtgtcagccgaaccttaaatatctagaaaatggaccaacatattctaaacactgtagttactatattcacatcaaaacagcttctttttttactcctatataattgccacatagtttaaaccacgacttctgttgaatttcaactgtgtttactctagcgaaagtgacagctaaacatcttattgctttaaaacaaatggaatacgtgtattttttccccccagatttgtctatattggcacgtagccctaggattattggctgctgccaacaggcaaaacagtaatgcatgatttaaaatttttcaggttatttatagaaaagatggtaccgaaaatgacatgttttctgtagaattaatcttttgctttattagtaggaaatcatttaaattttatttttaaactaaagattactgggactagtttatttatattttggacttaggagaaactgttgacattcattacggtctttagtctgttactccagtgcatcttaatttagtttaagtgattagggagaaaaaattaaaaaatattaaatgttcagcttttaatttgtataagtaatgtgattcatttcaatattactggatttcttatttttctcaaaaagtaatttatataatttcctcaaataatatgtataggaagaaagattattctataacattatacttagtgcttgttttgtgttatatacagagtatgtataattgatgacaatcatgaaaattaaaattggctggagctcttggtgttgagatttgaatttaaattaaattggggggggtcttgaaaaaaacattagagtagaaaactgtatttatgtctccatccctcacagaacccatttctggggtacaatgaatcattgactctttaaagcaccactgccatggctggattttacagagaaaaaataggcagttagcaatttctgctattttttaaaattatttttacattagaaaatagatttcattttaaactgcaacagtttagaaaatggcrtgtagtcatttaaataaataagtagatccagaatatagcataaagtccctaacttaaaccaagatattatgttttatgtttctcaaataaaaagtttgagtttatggcaatttattataacaatgtttttgaaggacttcattgactaaactccatgctaagagtttgccagaaatgctgccttctgtagcaagtaaactttaaggatttaataacattttctagttacagtgggtttctaatcttcataggaacaagttttattttaacaggggctaaaacaggtatctggtgataacagattagcactgaatgtgtttaatcattgagcccagagcactttatctttttttttttttagtgttagctgttagcaagtattgtttactaaaggtttgcacacactcttgcctaattctaaatgtttttagaaacaaattaagatgaaactttaagatttgttagagaaagaataagaaacagcaataaactttattctccttaaaatgtaagatcctgctatgattcttcactggggggaaagaagatacatttagaaaattggttatctcagattcttagtatggttttagttagttagttttaccacttggtagagttaatgatttgacaaatgacatttgcttcttattatcagccagttggttgctagctttaaagagttattataaaggatttttttcagtattaatttatttcataaacatatatttaatttttatatattattatgaaaaaagggaattatttcattcttttttaaaaaagtctagaattagaggctaatatttccttatagaattgtcaggaaacaaactgttgtaataagttgtttttgtgttccaagagatgtgactttgtcagaatacatccaaattcatatttcttagcagatctttaacataacaccatttataattctttctgttttcattcttccttttttctcctggcctattgtaaagcagatctggcagccagaggttgtatcaggaaccacagaaagaccccactgcttaaatatcttcaaagcagtctttcactttgaatagatgaatggatattgctaccatgtaaggatatttaggtgaagctcatgaacaaatcttgttgtacagaagttatccctttgttctgcaatgccaaagtaaatttgggctcattattttatggaattataaagtaaagctaataaaatacacttatagcaacaaatgtttaattcccagtactagaaaaataaaatttaaattgtagaactaaactacttttaaaagcttttgaatatattggttaaatcccattaatacatacaaagttaggcacagagtttcttggtggatggaagaaagactgatttcacactattttaatcctctgtcaagacgcaacttattaattatatacagatagtttgtagccgatggatgtgatttttgttactgattttgcttaatgcagttacattaatgccagaatagtagaatcgtggaatagttatcaagttagaattttaagttcttggagataatagagcacattacactgcatatagaagatgatccataaattattagtgaaatagtaaatgatttagtgtgtccacagatgagtaaattaaggtcaaagaggtttaataaaaattttcggccgggcacggtggctcatgcctgtawtcccggcactttaggaggccgaggtggatggattactcaagctcaggagttccagaccagcctgggaaacaaggcaagactctgcctctactaaaaatacaaaaattaactggacayggtggtgcacacctgtaatcccagctactcgggaggctgaggcacgagaatcgcttgaactctgcttgaggcggaagttgcagtgagccgagatcgcaccaccgcactccagcctgggcaacagagcaaagctctgtttcaaaataataataataataataaataaataaataaataaataataaaaaaaattaagggaacaaagctagccagcagcagtgagagtctaaattctaaagaatttgggaagcctatataaggataattggattttgcaatgttaagatcaatggaatactgatttcacaaattcgggtgtctaagaactggtatcagaggttagcaaagcaggctgtatggcagcaatcgggccttggtggaagagagggtctcacgtttgcaagtgtgtgtagcagaccaatttattggccagtagctgcatgggcacttcctaaatgtttcacagattattagtttcacttagaattttctctctctggacctgaatctatgactctaaaacaaacccagaaaaaggaatcagtatgctcagaaagaaagatgtgaaaaacatccattctccagacaacgcatgtgaggaataaaaacaggtaaagtgattttgttcagcaccgtagactaaacttgactctggattgaattttcagagtaaaatgtgattaaaggcaaacatttagtactgtaaaacagaattaagattgtaatatttaggcatgtgtttcatgtgtgtgtatgtatgtgtgtatacctatgtatatatgtrtatgcagatacatacatatatgttacatatatatatatgttttaattttagtgctcaagggaggacccctggatggcacttacagattgattcmgtttcactttcactggggttcacttgatggacaaggttcagagcatactgtggataaaaagaaatatgctgcagaagtaagatatacttttttttttctttccagggaaaaatgtttataagttgatatttagcattaatttcaaaagcttaatttgtaaattcaactcacgcccagtgaaccacttcttttacaaaggaccttcacatttgctttttataacctttaattgtgacatcatacttaacgctgcaaaactttctctactgtctccaactccaccatttgcaaaaagtaaacggactcaaactggaggatcctgttttaacagaaatttagaaataaaatgtgtgccttctgtcaaaactgtacatttatttgtcttagagttattgatgaaaacacttgctgttataccaagtactgtgtggatgattagaattaaaatgaaaggaaaattttgatttaaaattatccatattttcaatttcctgagtaacctttattgtgagaaaaagaccattgaataaaatctgtcagctttgattatgtaaatcactcactgtggctttgtctcttcggccttagcttcacttggttcactggaacaccaaatatggggattttgggaaagctgtgcagcaacctgatggactggccgttctaggtatttttttgaaggttagttgatgacccaattcttttttttccctatttttaataaagaaygaccagacagagtatttgtaacatacaggacattctacaaaagagcttaggaaatgcctttgtccctgaaatgttttcaagtttatctcctcctttcatatctgctagttgcagtggagatggagggcagaaagacaataggagaggtacttatttggtaccttttggatgtaaatgtgaagaacataaagagatcaacttgggtgactgctaggtgtttgtttgttttcttttcatttaacctgaggctagacagtactatattatgataaagtaagatcaggttctgaagaggggaaggacagtgaatttcaggcaacagtgggacagaaccggttgagctgccctctaaacagtggtaaaggggaatggagaaaggtctgggctggagatttatgagctctgattcatatgttgaggtggaagctacaggtgtgtatgaaatcatccaagtacagcacgaagagggagatgagaaatctgcccagggagcaatcctgagaaactgcaaaatgtaaggcctttacaaggggagagatgcaaattaaacaacttaaaaggggccaggtgtggtggcttaagcctgtaatcccagcaccttgggacaccaaggcaggaggatagtttgaggccaggagctcaagaccagcctgggcaacatagcacaattccatctctacaaaatttttttaaaaattagctgggcataaaaaacaaactaacaaacaaaaaaacaaaacaaaaacaaaaacacaaaattagctgggcatggtggtatacacctgtagtttcagctacttgggaagccagggcaggaaaatcactgcagcctaggggtttgaggttgcagtgagctatgatcatgccactgcactacaagctggatgacagagcaagactytgactytaaaaaaaaaaaaaaaaaaaaaaaaaaagcgagagtcaagagagatttgggttgctggaaggcgtagggaaagccaaagaagaaaataatttttaaaaagaagggaagaccatagtgtaaagtcctacaaggaaatcaaggcaagcccttgaggagtatcctttggcagttagaggtcactggggacaattgagctggtggtttcaggactactctctgagtggaattagaggcgagttgaagattcagtgaaagtaggcaagtctatggtgtcagtgtcatcaagccagtactgatgggggtcatgtatgaagtggagaatttgggctcactatttggatgttttctaatagagctacccaaataaaaataaaaactggtacagtaccaactgggtgatagtatcttgccctttatgtttttctttaggttggcagcgctaaaccgggccttcagaaagttgttgatgtgctggattccattaaaacaaaggtaaatttgaattttctgccacctccttagggtaccaattttcaatactccattggttttagaaatttcttttgatcaaattgcacagtctcaatgacatgtggtgtttggatgagcagttagtaaaggtagaatattmcttaaatatttaattaacgtttctttcaacaaagttgatcctaatgctagcataattctaagacttgtatttatttaatcttgctcccccatcatttggacatccatatgtaagagtcagagaatcttatgcctgcaaggaggttcaaaggtcctctagtcaaattattcactcattcatacagcagatatttgttaagtatgtactatgtgccagtcgctttgcaaactagtagacacaatggtgaacaagataaacaaggccctgtttcatggagatttctattctatgacctctttgcattcatccatcctgcatttaaatcctctctgcagcatagttgtgttgaggtcgttgagcatctgtttaaacactacagtcacttccggtgatggggaacttatcaccaggggcagccctggctttataaagctgatcttcacattgaagcagcatctatcctctgaaatgctcactcactggcttgagccccttgaattcatagaataaacctgatctctcttccaaataactctactctgtctctactttgttttttcacctaccccaaactaattatctttagtttcctttaactattctcatatgatatagttttctctctttgccaccaccttgtcattcttccagtaaatcattcctgtttgcttgaaaagtgtagtgtccaaaacagaatgtagttatttgattctgacctagagcaagaaaatcacctcctcatcaggataccatatttctgttattgcaacttgaagtcacctcattttagtggcagcagtctcactttaaatactgggtgtgatcagctaatgacttaatggagaatgtaagggatcattttagataaaaggccaagatgaaaaatggacatgtgaaaatagtttttttttttttttactacgacttgccacatattttcaagttgaatgtcttctgttaatttctttttattttgtttgccagtgaatatagaacctcttttttaaaaagtgtttttgaccatcagaggggagtatacctatttgtgtctgctgctctcctaccttcctcctactctgtcaatgtgatagtttgaagctgcgtatttgccttgttctagggcaagagtgctgacttcactaacttcgatcctcgtggcctccttcctgaatccytggattactggacctacccaggctcactgaccacccctcctcttctggaatgtgtgacctggattgtgctcaaggaacccatcagcgtcagcagcgagcaggtttgttttgtaatgacaggtctgtttacgggtggagcatttagtcaaggcagaagaccttggcctccagagtgagagagacctgagatttaatccttctcctgctacttcttgctatggaaatagtgcctttgatggtgcctagcaaataaacagcgttcagtaaatctttgttgttattaactataaacttagttcgtttagtctctaaaattgaatagtcattgtaaggattcaatgagaaagatgtctgtcacctaataaatgccttttttttttttttgccagttatgaggaaactaaggcttagaaaagtgagagttcatattcaaggttacgcaggtatcagtgagttaccagcctactactcactcacataagggctttctgctattttatttatatcagaatgcatttctgaatcctgacagatgagagtcatcccttggagaacatgtatctattaaaactcactccaggttgctttagaggcttagagcaggtattcttacatttccaataaaatatagtgtgtgatcgtcaagtgattagtgcagcttctaagtcactgatgagcagccactaaagtggatacaaatgagtttttcctagacttacctcttagcgcacagttgaaatgtagaaagtgaacattccttaggattcacaagaggatggatcctgaataatttaaggatagctttaggagccaacagtcttgaaaatggtaactatgtgagtagtggtagtgtgatttaaacctacaaaaatgctgaataatagaggtttagagctgcaatgtgcaatagagatcatgttgtccaactttctcatttcactggcttgaatcacattgatcaacagtctgagatgcaggaaaattgaagtgttttccactcagctaccttgcaacagaatcaggcctgggagcaaggattctattcctgtgtcctcccttagaatatgaacttatgaatgctgaagatacttcatatctttctttaaaggaaatatgtatctgactggaaaattacttgtagcatatcaaagtgggcctaaaaaatagcatgcttggtatgtcacttgaagattgaccttgtagtaataacatatttgagtaagcttcttgaagtgtagcgtaaggaaagattataatgcccttctttttgtagatgcagtgtttacattataatttaaaacatgaatttttttttcttctttcactgagagcaatgcaactttaaagcaatagtctgacatttagagccattataacaaatggatttatggtgtatacacacccacaggcagaaatacacatatagataagggcagttgaacctactgcattaatccctgtaccctgagtttgctctttaaagttgaaagtggtattaaactaatgatgttaattgtatatattggcaaaataccaatagggctcttttttttgtcctataacatggaatctggaggaaggatcatgctcagctcaggaagctagggctgcaggtcctcctctatctgagtcccttgacttggccttgccaattggtgacttcatcctcaaggtggttgtaatagcattttgagcatcacatctagatataaccacttcttgaggaggaaatgaatacctcttccattggcttcctaagagcagagaagctctttcctgaaggcccctagaaaacctttcacttctcactggctagaattgtgtttcttgctcagtccctagcccgggaatgtgatcatcacagtcagttaagacctgcaggtttaccccactgaggcttacagggagagggcggatgtctgttaatgaggaagtatgggggggcgtggattttaggtaagcagtataaatgggtctgctaattctgctacctttattttctatacccaggctctgtctctgtgaygctaaaacaatgagtcaagttgactaatgtgacagtgtagtttaattggtgcagtgagtagcagaaatcggttatactggtttgatcaaaagtttgacctgtttacactttatgaacasactctctttcagattgctggaattctgttgtaaygaatcaaccctatatatccttagaatgctcccttgcattcagtaaccatagctgtgcatgttataatgtatgtgcatggaaggtggctctacgggggtgattgagggactattactggacaaaagagatcaggttaaaggctgttgattcatgggctgctatattactgtccaaaccacccttttgcatttggatcacgtcttggttagaggggggaaagtagcactttttgagaaccttgaagaagtgggagactgttcaacagctgcctgtatctcagtggtggccagtaaactgaaacaagtttataagggaataaaaatcaaccagtgacaaggggttctaatgttaaatgcatatattggcaaaatgccagtagggctatgtagggtggtgagcactcacaattgttcactaaaatgctgtttttaaaacaggaaagtagaatggttgagtgcaaatccatagcatgagataaattgagcttcttaaggcaaatcagcctaggcaaattcatttccgtgtttttgtgtatttggagatgccagctcgtcactcagcccatggagcttacaggtcctgatcacttgatctaattgtatggatgtggtagtwtgtcttccctggggcagaaaacaaagctttaatttggaactaaaattgttattattttgcatctaaaggtatgagtttatagacttttgatgttagatttttaaattagaaggtcactgaaaatttcccttaaaaatgaccccaacgaatttgtgtattttgtataaattggtttgttatattaaagcatacatacataatctatatgtgattatgtattcattaggaatcaaactgaattttggccattgatgcacagcactgaatgttgtggaatgtaatttttgtttgtttttgtttctgttttttgaggcagagccttgctctgtcgcctaggctggagtgcagtggcgcaatctcagctcattgcaatctctgcctccagggtttaaatgattcttgtgccttagcctcctgagtagctgagattacaggtgctctaccacgcctgtttaatttttgtgtgtgtgtgtgtgtgttttttttttttgtagagacagggtttcaccatgttggccaggctggtctcgaattgctgacctcaagtgatccacccgcctcatgcctcagccttacaaagtgctgggattacaggcatgagccactgcgcctggccggggaatgtatttaaagatataacacaagtatataactgaataccattgtgaaacattaattatcaatgttttattgtgtcttttaggtgttgaaattccgtaaacttaacttcaatggggagggtgaacccgaagaactgatggtggacaactggcgcccagctcagccactgaagaacaggcaaatcaaagcttccttcaaataagatggtcccatagtctgtatccaaataatgaatcttcgggtgtttccctttagctaagcacagatctaccttggtgatttggaccctggttgctttgtgtctagttttctagacccttcatctcttacttgatagacttactaataaaatgtgaagactagaccaattgtcatgcttgacacaactgctgtggctggttggtgctttgtttatggtagtagtttttctgtaacacagaatataggataagaaataagaataaagtaccttgactttgttcacagcatgtagggtgatgagcactcacaattgttgactaaaatgctgcttttaaaacataggaaagtagaatggttgagtgcaaatccatagcacaagataaattgagctagttaaggcaaatcaggtaaaatagtcatgattctatgtaatgtaaaccagaaaaaataaatgttcatgatttcaagatgttatattaaagraaaactttaaaaattattatatatttatagcaaagttatcttaaatatgaattctgttgtaatttaatgacttttgaattacagagatataaatgaagtattatctgtaaaaattgttataattagagttgtgatacagagtatatttccattcagacaatatatcataacttaataaatatwgtattttagatatattmtctaataaaattcagaattctattctgggttatttatttatttatttttattatactttaagttttagggtacatgtgcacaacgtgcagatttgttacatatgtatacatgtgccatgttggtgtgctgcacccattaactagtcatttagcattaggtatatctcctaatgctatccctccccactcccccaaccccacgacaggccccagtgtgtgatgttccccttcctgtgtccatgtgttctcattgttcaattcccacctatgagtgagaacatgtggtgtttggttttttgtccttgtgatagtttgctgagaataatggttcccagtttcatccgtgtccctacaaaggacatgaactcatccttttttatggctgcatagtatttcatggtgtatatgtgccacattttcttaatccagtctatcattgttggacatttgggttggttccaagtctttgctattgtgaatagtgctgcaataaacataggtgtgcatgtgtctttatagcagcatgatttataatcctttgggtatatacccagtaatgggatggctgggtcaaatggtatttctagttctagatccctgaggaatcgccacactgacttccacaatgattgaactagtttacagtctgaccaacagtgtaaaagtgttcctatttcttcacatcctctccagcacctgttgtttcctgactttttaatgattgccattctaactggtgtgagatggtatctcattgtggttttgatttgcatttctctgatggccagtgatgatgagcattttttcatgtgtcttttggctgcatatatgtcttcttttgagaagtgtctgttcatatcctttgcccactttttgatagggttgtttgttattttcttgaaatttgtctgagttcattgtagattctggatattagccctttgtcagatgagtaggttgcaaaaattttctcccattttgtaggttgcctgttcactctgatggtagtttcttttgctgtgcagaagctctttagtttaattagatcccatttgtcaattttggcttttgttgccattgcttttggtgttttagacatgaagtccttgcccatgcctatgtcttgaatggtattgcctaggttttcttctacggtttttatggttttaggcctaacatttaagtctttaatccatcttgaattaatttttgtaaaagatgtaaggaagggatccagtttcagctttctacatatggctagtcagttttcccagcaccatttatgaaatagggaatcctttccccatttcttgtttttgtcaggtttgtcaaaatattctgggttattttattgtgtactgagtggtgggtaatacagtaatggaggaacaaatgtctacttttacaattcacaataattccttattaataatgagccatcttaattggcttactgataattgaaaaagtctccagaaaaggaaaaactctggaagtcatttacttattatgccaagtacggttttaagtgctgtctgagcattcatgtgatcttcctgacaatcctatgaagattaatcctgcaagagaaatgattacattaaaagtagcaaggtagagaagggggaagagtgtgcacactgaatcaatataagccccttgggaaaaaaataaataaaagttcattttattcaaaaagggaattctagtgatatccagaagtgaaagaataatttgaattttaaaaagagaaattaagctgagcatggtggctcactactgtattcccagtactttgggaggctgaggcaggatgattgccttaggctgggagtttgagaccagcctaggcaacatagcgaggcttcatctctacaaaaaatgtaaaaattatttgagtgtggtgttgcatacctatagtcatagctatttggatgtctcgggcagaaggatcacataagcccaggcattcaaggctgtagtaagctatgattgcatcactgtactccagtcttggtgatagagtgagaccctgtctctaaacaaacaaacaaacaaataaaagatgaattatacaactattacagataggaaagagtgaataaacgaaataaaaatctcttactattatgcttttctggatttagctctgtgccttgaccatggagtctttggctgatgagttattctggaaaaccaaatagaacacataactcaggttctacatgtcagggaataaaaagtccttgttgctttagatagaaaatttcctaaactcaccttagatctttacctaacccaagcttacaaagattttattctgtgttttctagcagatcacaggtctaagagccaatttgagttaacttttgtatatggtgtgaggtaaggatttaagttcagttttttggcctgaggatccaactttcccagcaccatttgtagaaaagactatcctttccccactgaattgttttggtacctttgcagatcaagtaaccaaaacaacttacattcccaactgttttcctaaagaattgtgcttagtttgattattcgttttgaatcccagctcttctcaacctctctggtcctgggtatatgtagagagtgagacccaggattgttgctcttatttttttctttgaggtaggatctcactctgtggcccaggctggactacaatagcacaatggcttgatctcagcttgctgcaacctcttcctccagggctgaagtgatcctcctacctcagcctccctggtacctgagaccacaggtgtgcagcactacacctggctatttttttgtatttttagtagagacagggtctcactatgttgcccaggctggatcattgcactttatttgctacagcttatctcatcttccttgggaccaccctcgtctccagtccccactcagtggtggcagggtggctggcaattaaaacctrtcagtaaagggcatttcagtctgttcaggtttcagcagttttttttttaggttttcattccccactcataccagcccacacagatggtgtctgggtgacagaggagagggcccaggatctgtataattccccctagatccttgctagcctctgttgtggggtgtcctaggctagccctggctccatctgtgtctgctggtgttctgtctgttccacctggtctttggaggtactaataactgaaggcttatccccaccattgcctctagttgcaaagtctagtgctctttatttatgaccctggggaggggtccaggtgaatcttgtttccagaaagaaacagtaaaagggaagcctctgtcacacaggaagaatcacacagaggcaacctatcttctgaagaagaaccagtttccttgcttttcctcatcacccagattgcacccttaaagaatgagggcaaaaaggacactggtacctgacatctttgcttaattcttctctctccttcttcacacagggtcagaaaaggttagtttgtccttgtgtaattcttccctgggtggaggcatattctcttgtaccctgtttctttctgaaagcagcattcacctggcgccttccccagagtcataatagcagacaaaatgcacagaaagaaaattggttttacaacaggagaagggccatcagaaaatatttcaaaattaagacccatgttacacttagcaatatgctgctgccaaagactcagtgagatttctttagcccacttggtaaaatctagaagttcaacttctatttctcctttctccatctcctctccgcccctgacctctgcttctactataagtaatctatagtgcttccatatgtttaacaaaggtagcatcattacttttattttatttttttaatttttaatttttaatttcaatagatttttggggaacaggtcgtgacatgaataagttctttagtggtgatttctgagattttggtgcatccatcacctgagcagtgtacactgtacccaacgtttagtattttatccctcaccactgacctgcccttttccctgagtctacgaagtccagtgtatcattcttatgcctttgtgtcctcatagcttagctcccacatatgagtgagaacatatgatgtttggttttccatttctgagttacttcacttagaatgatagtctccaattccatccagtttgctgcaaatgccattatttcattctttttttggctgagtagtnnnnnnnnnnnnnnnnnnnnnnnnnnnnnnnnnnnnnnnnnnnnnnnnnnnnnnnnnnnnnnnnnnnnnnnnnnnnnnnnnnnnnnnnnnnnnnnnnnnnnnnnnnnnnnnnnnnnnnnnnnnnnnnnnnnatactacatatatatatatacccatacgtacctctgtgacacacatacccatacatacctttgtgacacacataccatggaatatatatatatcacattttctttatccagttgttgattgatgggcatttgggctggtttcatatttttgcaattgcaaattgtgctgctataaacatgcatgtgcaaatatctttttcatataatgacttttctctgggtagataattagtagtgtgattgcaagatcaaatggtagatctacttttagttctttaaggaatctccacagttttccatagtaattgtactactttacattcccaccgacagtataaaagtgtcctctttacactgcatccatgccaacatctattattttttgatcttttgattatggccattcttgcaggagtgagatggtattacactgtggttttgatttgtattccctgataattagtgatgctgagcatttttccatatgcttactggccatttgtaattcctcttttaagaattgtctattcatgtccttagcccactttttgatgggattatttgcttttttcttgttgatttgtttgagttctttgtagattctggatattagtcctttgtcagatgtatagattctgaagattttctcccactctgtgggttgtctgttaactctgctgattatttcttttgctgtgcaaaagctttttagtttaattgagtcctaactatttatcttttgtttttgttgcatttgcttttgggttctttgtcatgaagtctttgcctaagccaatgtctagcagggtttttcatgttatcttctagaatctttatggtttcaggtattagattaggtatttgatccatcttgagttgattttttatagggtgagagatgaggttcccatttcattcttttacatgtggcttgccaattatcccagcaccatttgttgaatagggtgtcctttccctactttatatttttgtttgctttgtcaaagatcagttggctgtaagtatttggctttatttctaggttctctatccagttccattggtctatgggcctatttttatatcagtaccaagctattttggctactatggccttatagcatagtctgaagtcaggtaatgtgatgcctccagatttattctttttgcttagtcttgcttcggctatgtgggctcttttttggttccatatgtattttaggtcttttttttttctagttttgtgaagagtgatggtggtattttgatgggaattgcattgaatttgtagattgcttttggcagtatggtcattttcacactattgattctacccatccatgagcatgggctgtatttccatttgtttgcattatctatgatttctttcagcagtgttttgtagttttctttgtagaggtctttcatgtccttggttaggtatattcctaagttttttttttatttgtttgtttattagctattgtgaagaggttgagatatctcaatttgattctcagcttggttgctgttggtgtatagcagagttactgatttgtgtatattaatcttgcatcctgaaactttcctgaattcttttatcagttctagtggctttttggaggtgtctttagggatttttaggtatacgatcatatcatcagcaaacagtgaca

SEQ ID NO: 95808 - DNA, 91340 bp, Homo sapiens
cattggttaaagatgagccttgagttaaaatctctgaagcccttataatgttgagatcctctacttctgtgatgcctttacactctatggggctgggtctacccctggattgggaattagtagggtggatgaaaactagaccagactagcatcatctctctgactacaaatgaccagagatgccatttaaccaattcagtcttgacaagaccctgtacctactcagattcagttcagtcatattagccagccttgttcttctgtaagcttagcagccaccgaactaatcctccaggagtcactgtactaaaagttctcaaggaggccaggaaatggctctgcatagattctggacagagcactgtgacgaagtgagcatgcaattctaggaccagcagtgccttgggaagccagctgagccacccattattgtgtctccccaaacacacagaggagaaggggattccgtgatttacttggtcaaaatgtccaacatgtccaacatggtacactcaggaggccaaccaacctgaaatcttctacataggaagggcttatttgtacttcatgaaaacaataatcagcattgcactaatgtctgcatgaggactggtaccatgcactgtgcagcataatttacatgtattactttaattatgctcacaacagtcttatgagatagatactcccattttacagagctagaaacgaaggaaggaaaaaagctaaggaatgttctacatggtacatgatagaagatatggaactggacctcaagtctggctgactcaaaggcgcatctctagttcactcgctgtaatcccaatttttagaattagtggaagatccttcacacaccaggtctggcaggacccagccccaggatattagaggcaaagccgtcttccaccgcagatgctggaggttggcagacagtcctctcacacccccaccccccacctccgaagataggaattccttcccttgtttgctgctgctcctgctctcttttttcccatcctctgaactccctgttcagagatgtcaaagagaaattgtactgggcacttatggaacacagcaaggaaggcttatcccagactattgcaataggagtcgaggcttctgcaacaggggaaagaaaatggacgccttcgaaacaaaaggcaagaaagtttttaagcgctggggtgagccagtggaaaagaatgggagaagcttagggagaggtggtcaatgagatctgtgtttgctacctggcccttatggaagttaggctcctgccctcccacagagactgggagacagtggccctaactctcttgatgactacatttcaaagggatggctgccaggtgcctgaaaaagacactcttgggttgtagaagatttacatctcaaaagggcagagaaagggggagatcagtgcctatcatccgaaagaaccctgtccaaaattgagtcaagctgaagggaacctcgaggcggtcttggccaggggtttttctttgtcagcccagtcccaggccagttcctcacgtggcgctttacctggcaaggacccgggggtcgaacttggctcggaagcgagccacctgtatcctctgcgccgcctgggccgccgcctcgggcccaggccccgcgcctccgacgccggcttggttttgaccttcgtgcttggcccaagccagcgctggtggccccgggaccaccttcctgctggcgccgcaccccatacccgcaacacgcccgccgctcgcgggacctggggactcgggaagcagccagccccgttcctccgccctttatcaaagagcagctgcgaggggcgggaccctcggaaagaaaccccactggggggtcgtggtcagggagacagcccccaggatacccgctaacgaccgagacgcctggatcatcgctggtcaccgtctgtgtgtgtaatctgacgtgatgaaagcaaagtcaaccaacaggcagaacctgcgcctaattgtctgggcttcactttctgcatctctaacctgacaaagtgaacatataaaattatacgattgtataaaggatatcgtccctctaaagaacttttcgctgagctcatattcggatgacatgaacattaaacatacatatatatatatatttaaaattctaagagcttataatatttaaagtataacttcactgccttctattgcattaaacggatgacaaaggcctgtgtctggcactcatgaccttcatcttccgggtaatccatctaagagagaaaaactgagggccacgatagatgtctagaacccagacgaacaccctaagcaaatacagtgagaaaacctgtatatacatatacagtgtatatacaaaacccgtatatacaaatatagtgagaaaacctgtatatagatataaatatatataaataaatataaatattatgtatggtaactttacattttctatatatttcattcttgtattatttatacatattatacatgtatgtgaatgtgtgtatatatattatacacacagtattataatacttataaatatttatcattttgataaatgtatattgattatatcactatattgattagatttcattgatatttgtcaattatattcattcacacacacacacacacacacacacacacacacaaatgatgtgtgggaaatgaaatccagtcacgaccaagcaagtcaagatcacatgcctcccaagttgtagaaccggaactggaggctgcttcccgatttccaggccaatgctacttcaatttgtgtaatttcctttctaatttcatttaatttgtagtttggcttaacagggaatgtctgtgatgaataaattagtcatgaactttcccagagctatattttgatggaaaatttaaaatacggcttgcatatagctgagggaaaattagttcatcctgcaaagagagcataactaccaaataatggacttttcttcctaaagaaccctcagaattctccaactactaagaaacaaggaaagaaggtttattttaagcaggtaaacaactcgttcttatatgtctcgagcttttgaactaatttgcagaataggctatctattaggttagagcaaaagtaattgtgtctttgccattaaaagtaaaggcaaggccgggcatagtggctcacacctgtaatcccagcactttgggaggccaaggcatgtggatcacctgaggtcaggagttccagaccactgtggccaacatggtgaaaccccatctctactaaaaatacaaacattagatgggcctgggggtgcgtgcctgtagtctcagctactcaggaggctgaagcaggagaattgtttgaacctgggaggtgaaggttgcagtgagctgagatcgcgccaccactgcactccagcctgggtgacagagcaagagttcatctcaaaaggcaaaagctgcaattacttttgcaccaacctaacagtaaaaacagaatggaagagagaaataaagggaacaaactgaagtcagatgttaaggtactactcaaaaaaacacaaaattttttcctcagagagcctgttgtaaggattgtttgcataaggatcgcacagcaaataggaagcatctactataaaacctaaacctgggcagcagtgaaggcgccagacacttccacgaggcaggcagtccctctgcctgtccaccttctcccagcagtgagggccttcatagtaggctgcagaaacctcttctgtcctgtctgcagctggccgcacagcagagaaagctttgtcacaagcctcccactaagtctaaaccatgttccttgaaaattggaaaacacagtcgctgattttaaagcccttaaaaaatgaaaacattgatgaaaccactgattagttctcttttggaaagccccaactattaactagaagtgttgttgatgtaaatactttgcctggagacaaaatttaagtacctgtgcatttgaaactttcactttcaaggacttccactaagctctgaaatgttaaaatggtcataagtatatccttttaatatgactaatctcagaaagaataattcataaagtaacatatagaaaaatatccaaatacatagactctcctgcatgtatttctctttattgtgtataattgcttgattatatggagaccactcaagcattgtttgggaccatttgctattcacccattaattaactattcatagttatttcaattatatatttaacttaattaaagtaataaaatgttaaaatagctctagacttaaggccagctttaaatgaagctttatttttatatcaatgtgtttagtgcttttaagtggctacctgtgacacttaaagcaactgaataaatggaaatggttctgtgacatggtatttattataaaaagtaattagattggacctccttcttaataaaaaaaaatcgtatttcaactgccatttattgcccaaaagtcacaaattcttactagtcaactgtaacattcataataatgtgtaatacatagctcccatcacctgataccagattctactctacacgaagtttttaaagagaagaattagaaggacacaaagaattaaatccagaatgtgtcctggactatcgagattctgaaactatagaaacttcctagaataactttctgacttacatttcatacagtgatttaattaagtggcttggtttatgacagatattcttcacaaagtataatccaacccctaaagagtatttcactgtaaggatttaaggaactatgccaaatcaaaaaatcattgcagatttagactaacatttagggaaaacacacttctttctttcatgaacaatattggtggaaaatatggaaaagaatacaatcgtgatattctgtcatcagtttttattatactccagcaacatgaagagtacaaaacaagtaactacggataccctaaggagtgatataccaggaagccctacaatattataccctcctttaccttacagctaaaaagatagaaccttcatttttaacaggtaaaatgaagaatttgtttcacttattagttctgcttgaaatagcttcaatgttgttgcttttcaagttttagttctctttagatccccccctacagggattaattttctctaaagtgatctcctgcctcaaacatcagtttgaaggtatacatcttatcagcttccttttccccaaggtgtagggtctgtgtttgtcatgacaactggcatggggctcttttaagccaatttcacatacaccatgacgtgtgaaaccaacaatgcaaagctactctcacagttttcttcccataaacaaataataatgagcttctaagtaggatgtctttgtgtgaaactcagagatggtgggcactttcctgccaccctgccaaactattttgcactatcacaacaccttacaaaaataggactgtaataatccaggcaagtcagtaataatttttgaattactgagaatatttttctgtcactacactaatgaataattcatgttaacttgcatatctttatatttagcaccaaagaaagaatatttagctttagtagaatttcaagttttatgttttgtcttgtaactataaaaaagaaaataaaaattagtatatagtaataagtgatagaaaaaatctctgctgtccagtaaaaacataaatttcattttgttattgtagtgacttaaagaaatctccaggcacaacaggaaatgaagttttcttattttgatgcacaaatttaaaaagataaagtgatagggtatttcactgtatttttgctgatttgcctaaaggatttctgccttttcaagttggcaatttgcacccaaagctttcaaaaacgatggctagaaatatgtttagttgcatggtaaaatagttacaatatgttgcaaggtaaaaaaaaaaaaaaaaaaagcctacatggcatgatctcatttttaaaatcacagataaaataagttcctatggtgaggaatggaggcctccagctgacagagagcaaagaactgaggcctgcgacaactataggcgtgatcctgggaaccgattctcaacctcatctgagccttgagacgactgctgctctggccgacagcctgacggcaacctcctgagacagctctgagaggagattttccaggttcaagtcccggtacaccacttaccagttctgtgaccttaggaaagatatttaacctctctgtcttctcagttttcttatctgtgaaattgaaataataataacacaaatgttatagggttgctgggaatcatttaattcttttactttttatttgttattttttacagactaggtctctttctgtcagccaggctggagtgcaatgatatgatcacagctcaccacagcctgatcacagctcaccacagccttgacctctgggttcagggctcaagcaattcgcccacctcagcctcctgagtacctgggactayaagtgcacacctctacacctagctaatttttttttttttttgtacagacaatgtcttgctatgttgcccaggctggaaataatttaattcatgtgaagcacttacatcagcacctggaatattataaatgctcataaatattatcttgtataagtgaatggtcctaggtgtggtggctcacacctgtaatcccaacactttaggaggctgagacaggcggatcagttgatactaagagtttgagaccagactaagcatatagtgagactctgtctacacaaaaaattatcctggcatggtggtgtgcacctgtagtcacagcttaagcaggaggatccctcgaacccaggaatttgaggtagcagtgagctacggatcacaccacttcagtccagcctggatgacacagcaagaccctgtctcaataataaataaataaatggcttcaaggggttgcattagttatctattgctgcataacaaatttccccaaaattttacagttttaaaacaacaagcatttattttctgaagattgagtatatgagagggtagatctggctcaggatttgaggaggaaggttgcggccaagctgtctgatgaggctacagtcatcacaagccttgacaggaactgaatccccttccaagtgcatgcacgtgactgtcagcaggcctcagttcccagctggctgttggcagaaggcctccactccgcaccacgtgggtttctccataggctgcctgagtgtccttgcagcatggcagctggcatcccccatagccagtgaggagtgtgagtgtgcctgagcagatgagcaggagaaaacacaaacagaagcttcggtctctcataactcaatctcagaagtggcatgccatcacttttgccacatgttgttagtcatgcagagcaactcttgtcaatgtgggaggaaactccgcagggatgtggctaccaggaggtggggatttggagaagccatcatggaggctggcttctactgtcatggaactgggactgatgagtgaaatttcactacaaagagaattctttttttttgagacaggatcatactacgttggtcaggctagtctccaattcctgggctcaagtgatcctcctgcctcagcctcccaaattgctgggattataggtgtgagccaccgcacccaaaggggaattttgaaagtcaaagataaatctagagatgaacactatgcttaggaaattgcaggctgtcgatcaccagagctgtttaagcagcctgggcaccccttggccttgctgaggaaaaggatactcaagcacaagagtgattggacttgaatcttcagatcccttccaagtctgggcttctgtgactttttctttcatgtggtcaattctaatcataactaggtagtaaacctcttgaaaacctaactctttgtgtccagcctagtattctaaacaaagaatgatctctataaatttttttattatactttaagttctggggtacatgaacagaatgtgcagtttgttacataggtatatacatgccatggtggtttgctgcacccatcaacccatcacctacgttaggtatttctcctaatgttttcccactcctagccttccaacccatgacaggtcccagtttgtgatgttcccctccctgtgcccatatgttttcattgtccaactcccacttatgagtgagaacatgtgctgtttggttttctgttcctgtgttagtttgctgaaaatgatggtttccactttcacccatgtccctgcaagggacatgaactcatccttttttctggcagcatagtattccatggtgtatatgtgccacattttctttatccagtctattattgatggacatttgggttggttccaagtctttgttattgtgaatagtgccacaataaacacatgtgcatgtgtctttatagtagcatgatttataatcctttgggtatatacccagtaatgggatggctgggtcaaatggtatttctagttctagatccttgaggaatcgccacactatcttccacaatggttaaactaatttatactctcaccaacaatgtaaaagtgtccctatttctccacatcctctccagcatctgttgtttcctgactttttaacaatcgccattctaactggcgtgagttggtatctcattgtggttttgatttgcatttctgtaatgaccagtgatgatgagcattttttctatgtctgttggctgcataaatgtcttcttttgaaaagtgtctgttcatatcctttgcccactttttgatggagttatttgattttttcttgtaaattcatttaagttccttgtagattctggatattagccctttgtccaatggatagattgaaaaaattttctcccattctgtaggctgcctattcactctgatgatagtttcttttactgtgcagaagctctttagtttaattggatcccatttgtcaattttggcttttgttgccattgcttttggtgttttagtcatgaagactttgcccatgcctatgtcctgaatggtattgcccaggttttcttctaggacttttatggtcctagggcttacgtttaagtctttgatccatcttgagttgatttttgtataaggtgtaaggaaggggtccagtttcaattttcagcatatggctagccacttttcccaacaccatttattaaatagggaatcttttccccattgcttgtttgtgtcaggtttgtcaaagatcagatggttgtagatgtgtggtgttatttctgaggcctctgttctgttccattggtctatatatctgttttggtaccagtaccatgctgttttggctactgtagccttgtagtatagtttgaaggaaaatttatggcactaaattcccataagagaaagcaggaaagatctaaaatttacaccctaatatcaaaattaaaataactagagaagcaacaggaaacaaattcaaaatctagcagaagacaagaaataactaagatcaagcagaactgaaggaggcagagacatgaaaaaaaactcaaaaaatcaatgaatccaggaactggttttttgaaaagatcaacaagtagatagaccactagaaaagatcaacaagtagatagaccactatccagactaataaagaagaaaagagagaagaatcaaatagacacaataaaaaatgatataggggagatcaccactgatcccacagaaatacaaactaccatcagagaatactataaaaacctctatgcaaataaactagaaaatctagaagaaatggataaattcctggacacatacaccctcccaagtctaaaccaggaagaagtcgaatcactgaataaaccaataacaagttctgaaattgaggcagtaattaatagcctaccaaccaaagaaagtccaggaccagatggactcacagctgaattctaccagaggtacaaagaggagctggtaccattccttctgaaactattccaatcaatagaaaaagagggaatcctccccaactcattttatgaggccagcatcatcctgataccaaagcctggcagagacacacacacaaaaaaagaaaatttcaggccaatatccctgatgaacactgatgcaaaaatcctcaataaaatactggcaaaccaaatccagcagcacatcaaaaagcttatccaccacgatcaagttggcttcatccctgggatgcaaggctgattcaacatatgcaaatcaataaatgtcatccatcacataaacagaaccaatgacaaaaaccacatgattatctcaatagatgcagaaaaggccttcaacaaaattcaacacctcttcatgcaaaaaactctcaataaattaggtatcgatggaacttatctcaaaataataagagatatttatgacaaacccacagccaatatcatactgaattggcaaaaactggaagcatttccttcaaaaaccgacacaagacaaggatgccccctcccaccactcctattcaagttagtattggaagttctggccagggcaatcaggcaagagaaagaaataaaggatattcaattaggaagagaagaagtcaaattgtmtctgtttgcagatgacatgattgtatatttagaaaaccccgtcatctcagcccaaaatctccttaagctgataagcaacttctcaggaagttgtagcaaagtctcagaatacaaaatcaatgtgcaaaaatcacaagcattcctatataccaataacagacaaatagagagccaaatcatgagtgaactcccattcacaattgctacaaagagaataaaatacctaggaatacaacttacaagggatgtgaaagacctcttcaaggagaactacaaaccactgctgaaggaaataaggaggacacaaacaaatggaataacattccatgctcatggataggaagaattaatatcctgaaaatggccatagtgcccaaagtaacttatagattcaaagccatcccaatcaagctatcactgactttcttcacagatttggaaaaaactactgtaagcttcatgtggaaccaaaaaagagccctcatagccaaaacaatcctgggcaagaagaacaaagctggaggcatcatgctacctgacttcaatctatacatttttattaattgtctgtagcccgtatgatatatagatatatttagatatctatagacatagatatatttagatatctatagacatagatatatttagatatctatagacatagatatatttagatatctatagacatagatatatttagatatctatagatatagatatctagatagatagatagatgatagatgataaatagatagatagatagatagatagatattttttaattgagagggagtctcgctctgtcatccaggctggaatgcagtggtgcaatctcagatcactgcaacctctgcctcccaggttcaggggatcctctcgcctcagcctcctgagtagctgggactacaggtgcatgccaccacacccagctaatttttgtatttttggtagagtcagggtttcaccatgttggacaggctggtcttgaactcctgacctcaagtkactgcccacctcagcttcccaaagtgctggaattacaggagctagccaccacacccagccctcatatgacattaaaactattatcagacttgctgggcatggtggctcacacttgtaatcccaacaayttgggaggttgaggcgagaggatcgcttgagcccaggagtttgagaccagcttaggcaacatagaaagacccatttctaaaaataaattaataatatttaaattttaaaagtttaaaaaaactattatgagactgtatctgtatgctcatttatttttaaatatatttatatctatgctttttaaatcaagttctttgactttgccataataagttatttatrtttatttgtttcatttcttcagggatgttccctccatttcataaactttttaaacgtctaagataactattaattcatgcaatttcaagtaaaacatcatgaaaggaaaatgtgcagttgctaggtgatagagaaataaatatgaaaaggaggaccaaatcatccaaaatatttaggaggataatggaaataaaaagaaactaaataaatatcagtggcatgtcagcagttaaacatttttaaactttccatcactgcactctagattccagtttcacagtctttttttttttttaccaaaaaactgcatttttattcctgcacctcaaattcaaccactgtaacctccaatcagaataccattctgagggaagaagctaccaaagagatactgttattctagatcttccaagaagcagatgccaagacagaactaaatgtgcaaggattttattaggtgtaatatccatgtaaaaaaaatagagtgatgggaaagactaggaaaaccactgaagagggttgagagaaagtgtctcagagtgctatgcaggtcatcggggagtccttgagtcaaagtcaactgagaaaggagtcccctgtctgtcagaaaaagatcacctttagcatcctcaccacaccacactcagtcagctgatgaggagctgctcatgggtggtgtggccgctgtgcaaactcaaagatggatttcaaagctgggaccctggggcccccgatcaactgtgttccccatagtaggaggtttgcaagacacmattctcatggatgccatagatacaaagcattcaatgcaactattattttaaaaagtaacactgaatatctagataaactattttcaaatgaacatttcaacaaataaaaatcaattctgcatttttatttgaaraatttttgcatagttttcacaaacatttcaaaactgatttctaatttaaataaatcaaagtttcttaactatttactgaaacatactctggctttccttgctgcaatgtttaagataaacaaggctttaaaaagttaatagggaaaaagaaccttggttcttgtttgatttgtagattctatgcattttcacaacctatataagatacttctcatatatctacaatttccacacaattctttctctctggggaaatagctttttcttcctagaacaccatcaattgcacctttgaccatacttttctccccagctgttagtctgtgaccaattttctttctgcaacattttggagaaccctgctgtggattgaaattggaggtcacagtttccttccaaacattagttcagaatgcaggacacagccccactgcccaagagaagactgtggtcaagctgaagccaattgtgaaagctttcaagacctaattatcttcaccctactatcaacttgtttggtgtccaaatttctcaggagtcatttagtttcaggaataccagaggatgtttagttccagaatttgttcccccattatgtgaagtgttctttctgaaatgctatctcgtgttttctttgttttgtttaagacattgcttcttggtttatttacttcagtttctaactacatgttgggtaccttaatgaaacagtaaattcctgagagaaaaagagctctcaggttattaaaattgcatcattgattgtctctatctgtttgggccttttaaaatgttgattatataatcacgtgctaggaaaatagctcagataaggastcaaataaaattcagaatttaaaagcattcacaggttgggtgccatggctcacgcctataattccaacatgttcggaggccaaagcaggaggattacttgcatccaggagttcaagaccagcctgggaaacatagcgagaccctgtctctacaaaaaatttaaaaattagctgggcatggtggttgatgcctgtagtcccagctacttgggagggtgaggtgggaggatcgtttgagcccaggaggtcaaggctgcagtgagccatggttgcaccagtgcactccagcctgggtgacaaagcaagaccctgtctcaaataaataaataaataaaatttaaaaataaaagtattcagggcccggacacagtggctcatgcctgtaatcccagtactatgggaggccgaagcgggaggatcacttgagctcaggagtttgaggccagcctgggcaacatggcgaaacctcatctctataaaaaatacaaaataaaattagccgggcgtggtggcatgagcctggagtccgagctactcrggaggctgcagtgggaggatcacttgagcccaggatgaggaggacacagtragccaagattgcaccactgcactccagcctgggtgacagcgccaaatgctgtttcaaaaaaaaaagtattcactagttcaatatgtatattgtcatttttgtcacccttgatcccagccattatcaacagttctccaactttaatgtgcataaatcaaggtctgggcacagtgtctcatgcctataatcccagcactttggcaggctaaagtgggaggattgcttgagcccaggagttcaagaccagcctgggcaacatagtgagaccccatttctaaaaataataataatcataattcattttaatgtaaaaataacccagggagctagttaaaaatggaaattctaagcctgggcaacataaggagacctcgtttctacaaaaaataaataaataaataaataaatagccaggcatggtggtgtacacctatggatccagtgactgggaaggctgaaaggcaggaggatggtttgagcccagtaggtcaaggctgtattgatctgtgattgtaccactggactccagcctgggcaacagagcaagaccctgtctaaaaaaaaaaaaaaagcacaaattcgagaacactgttctcaaaataccagcctgcgaaagccaaaaagctgtgtttttcacaagcacccaatgaactgaaagttccacccctctaatcacatggttggttcccctggcaacagcccacgtcctgaggctcttgaggaacctccaagatttgcctcattagaacaaaaaaagatcctgtcacccaggaaatttcaagggatttaagagctctgtgtcagaaactggggtcagagaccaaatactattagaacaaatattagaacaaaaaatacttatagcacccccatctatgagggttttaggaggtctatgccaggaactgggggcagggaccaatatttctatatttgtaaatatatctatacagatgttcctcaactatagctatatctatctatatctgtacatatagacagatatagttatagatatagacatatatagttgagaagcatatctacatatctgcccccagttcctggcaataaatatatagatatagttattcatatcaatagatatagatacatagcagatatasacatagattgatatagatagatatagatataaatatagatagatatagctagataaaatctgtatctattgatacagatatagatagcaaaatagatataaagagagatagtagatatagataaactatagatatacagatagatatttcttcttatatcactgtatcacagatgactaataaaagtgtgcaaatgtgaaacttacatacatattattaaattccacagtaatttcaattattttgacctaagaccaacaaaagtttggagagagagtattttatcactgacattgtttagacttggtggtgtatggtggtattaaaaagaagacctactttgtaggcagttcgttattgtttttaaattctctacaggcatcgctcttctttcttacctgcacccagaggtggctgctcccactgccccaccctctgtaagcccctggctggttcctctttgggaatgcctcagctaaagaaaattgcctcgcccaaggtcatgcctaagctcatgtctaaggaccaatatacagaaggtataaaggcccagctctttgtttccaatcactctgaaggtcatcacaactccagagctccctgcrgggtggactgaggacttctttgagtctgcatcagagctcaagttctccctctgcccaatcttacttccactcctttccacaggtgttgatkccaggacccctccctaataaaagtcctacacactaaaattaaagttaaaaattaactagaaatcctgcttcctgaggaactcaacgggtaatacgaatttttcaattttttgaagaattcaataaaacctgatagttagaatttacatttctttgattattagaaagtttcagttttgctcctgacatctttcggccacttatacttctgtttgtgaattgtctcttttttgtcaakttttcttttgaattgctctcctctccaccctcacaataaaactatctgccctttgtcaatttttctttcctttattaatgggctctttataaattaaagatattaactctttggcatattcagttctgcccaagggaatactcccttcttagcagatggttcagtctatgggactgaaaaataaatgtcagtcttgtctttcagttttgtttatgatatttttaaacatatatatttttaaaatatttatgcagaaatttttccatttttttcctttgttgttttgccttttgcatatayccagaaaagccttctatattggatacattatgacattgaaatgcactgtatgatcaatctcagtgcttttgattaaattttctcattttctactcaccacatctgtgagatcaccaaagcaagttacatcttagggttcaggagacattagaccggatctcattgctttagcggtagagtggagtgagaaggtgatgacctcattctccccaagttaattccactcacccaaatcttataacctcctatctttgctgactttgcaattcaccactcttttcattgatacctgtatctgagatcctgtattgtgtactattcagtagcctgccatctcatggtggaaatagagaagtagaagtttttctccagaagaataaccccatttcagaatagagctctaaggtaaattaatagttaactaataattggaaaaaattatgtatcatttataaatcaattttaaaataaaacataaatgtatcataaacctggaattgtaatatctttgttttatccccagttctgccattattgatttgtgatgtctgtttttttaaaaaaaattcttacaccattctggaagttagccttaagaaagaatttatgaccaagtcctcaaaagcaattgcaacaaaaacaaaaatttacaagtggagcctaattaaagagcttccgtacaacaaaagaaactatcaatagagtaaacagacaacctacagaatgagagaaaatatttacaaactgtgcatccaacaaaggtctaatatccacaatctataaggaactaagcaaatcaacaagtgaaaaataagtaaacccattaaaaagtgggcaaaagacatgaactggtacttctcaaaagaagacatataagcagccaacaaatataagaaaaaaaatgctcttgatcactaatcatcagataaatgaaaatcaaaaccacaatgagatactatctcacacctgtcagaatggctattattaaaaaacaaacaaaaataacagatgtgagtgaggcttcagagaaaagaaaatgcttatacactgttgatgacaacgtaaattacttcagccactttggaaaacaatttggagatttctcaaaggacttaaaacagaactaccattcaccccagcaatcccattactgggtatatacctgaaagaaaataaattattttaccaaaaagacacagggagtcacatgtttatcacagcactattcacaagagcaaaggcgctgaatcaacctaggtgggcatcagccctgggcaacgtaggtgcccatcaatggtgggttaaataaagaaaatgtggtacatatatacaccatggaacactatgcagccataaaaataatgaaatcatgtcatctgcaacaatatgtatgcagctggaggtcgttatcctaagcaacttaacacaggaacagaaaaccaaataccgcatgttccatttgtaagcggaagctaaacattgagtacacatggacataaagatgggaacaatagacactggggactgctagagcagaaagagagggaggagggcatgggctgacaaactgcttatcaggtattatgctcactacttgagtgacaggatcatctgtaccccaaacctcagcatcatgcaataaacctatgtagcaaatctgcacatgtacccccgaatctaaaataaaagttgaaattatttttaaaaaagatttgagacagaaaaaaaagagaaaggaatattatttggcaataaaaaggagtaaagtacttgtatatgctacaacacggatgaatcttgaaatcttgctgagcaaaggaagccaaacacaaaagaacacaaattatattgttccgtgtatatgaaatgcccagaataggtaaatctatagagacagtagattagtggttgtgtagaggtgggggaaagtaggagggagaaaatgggaaatgagtagtaatgggtatgagatttctcttttcagttataaaaatgttctaaacttaaattttgagagtgattgcacaattctgaatataagaaaccactgaattgcacactttaaatggttggcttttatggcattgaatcatatttcaataaagatgtttacaattttaaatttaacttaatttaacatttaaaaaattttcttaatcttttagaagttgagtttctctttctttaaggtaagaaggctgttgttgttgtcctaaattctctgtcattgccaatatgtcctattattctattccatgtgatctttggagaactctcacatcaagaaatttattttccagaaaataaaaaagtcatttcaataaaagaaaacctatatattgcagaaatagaaccagtagattagtttcatgggaacacgttttgctttgctaggaaacagatatttctactacttgaagatatctgaaaatttaatgatcagcctcaaacagtcatgagtccttcccgatttctgcaggtgatatgacattatatcaaatgacactgaggtctctttgtacactaagattgcaaggtttgttagtataaaaccttttctgattactaatctttcttctgtgacatttttgtggccttataataatttaaaataatgacctttctgcctataattcacttttctttgttcattatttctcatgaaaatagtattctcatcataataataccatttacaagtccagctggtaaattttccatcattagtttatgtaattactatacaagttactgctgtagcaagacagctcctgggatcattgccatcaaaatacaaaaaaaaaaaaaaattaaaaataggaaatatttggaagacagaagaaaatactgtcatgctttaaaaatacatattttaaaatacaaatttttaamttcatgtgaattcaaaagatataatttattcaagttaaaaatgaagtggatatgtatagaatagtgatatatgagttttgtaacacttttaaaataattaatgttataaatcagaatttcccagataatggtcaaaagaataccacttcttcaggttgctaaaggtattaaatagtcatatggtttggctttgtatccccacccaaatctcatgttgaattgtaatcccctgtgtgaaaggtggggcctggtgggaagtgattggatcatggggttggtttctaatggtttagcaccattcccgtagtactgtctcctgatagagttctcacaagatctggttgtttttaagtgtgtgtgtggcatcttcctcctctctctcttgctccttctctggccatgtaagacgtttctccttccgctacgccttctgccatgattgtaagtttcctgaggcctccccagccatgcttcctgtataatctgtggaaccatgagccaattaaacctcttctttataaattactcagtctcagctcttgggaggccaaggcaagaggatcatttgagtccaggagtttgagaccagtctatgcagcatagggagaccctgtctctttaaaataaaataaaataaaataaaataaaataaaataaaataaaataaaataaaataaaatatcaaatagaataaaataaaatacccaggctcaggtagttatttataccagtgtgaaaaaggactaatacaattatctaaacaaaggaaggcattgtccaatcaattgtttggaaagcactgggttaaagttaaacacctttaattacaaagggcttctcggagactttactatgctaatgcgcacgctgactgtccaagatgatacattgattatcaactgcatttcccaaacctgtttgttcacagagctctctttttttttttacagagcatctctcagggattcttaaaataaaataagtcactgtgaatacacaaaggaaatgaaaacatatacagagtgtgaaataacagccaaaaaggtaaaaagtcacttactgtttaggaaagaggagaagggcttgacatttgtgatgaagacaaacagtggtttggggagtgagtaagagctagggagtagcagaacttcttgacacttagtgagatgtctaaagaatctcttaacataaacaacccgaagccacttgttaaaactttgacatgacatatttcaaattaaaaatgtgcagatgggaggaaccaaatgtagacgcttgctataatgttatggcgacctcttgtggttcaaaatcaaaatgacctttgaaaaattaattcggccacccgaagcaaatattttggtgcttcaataagcaactttagtgttcccccaaattgttatcagaggttctctttaagagtggtattaagtagctttaatctcatatatttttgtaatggttcaatttttataaaaagtatgcattgctctgataagcagaaaagaaaataaggacaataaaatataataaaatatagacaaaaattatcatctttcccaggtaattactcatttcactgcaatcagaatatagaatttggattaaagtactaagtaattcctttaagcatttgaaatatatagctattccatgattttgaacttcttacttttgctttgtagttatacctacattaaatattttatccaaatattaacaaatgatgattgattttcccatttttctaattcaaataaaaattcttgccactagacagattttgtaataagagatgaaataaggtccctgaagaacagtgagatactatgaaggaagatgtactaaatcaggtccaggtttaattaatatataatagcaaaaatattattttgttaaaatacaaaaggtaaaccatttgggcaaataacacattacaaattactgccaaggaagatttaatagccatccaacacctgaaattcttttagtcttctcttcaggaagaagaaaatattaaaatactcataactttaaatygccaaaatcaacaaagcataaatggccccacttccaactccaaatataagagatccttctaggtgaagtagtccagaaagtcaatgactctggcgacagttcacaaattcttctctgtttatcaaaagcaagttaaaccaggagtgtgctctggctgaggagcatagtatctgttcagaatcaatgtcaagtgagcaatcaggtttgcctgctgtgttctgatactgaagacagacacatgctaagttttctcactgtaatctgccttagtcaagttagaattcttgaagaacgtacacaggcatcaagttcatacgaccttataattcactttttccaggataatgtttttcttggactgatatggaaggtttgttttgttttgacatgttctaattagaaaaacttcagtagtggagggaaagttaagaaaaggtaaccacatagccatccacaaaagcactgttccctactgagcacatctgctcttagaatctgcctcctgggccctcactttagattccagagagaagtgtggggccatcacaccacgtattgtaccgtccacgcactgcaggggctttgcatttttctgaacatgcattaagaactgcaatcttcctggatcccagcactttggtaggccaaggtaggaggatcacttgagcccaggtgagcagactgggcaacatagtgagatcccatatcttttttttttaatttccttttttttaacaaaagaactgccgtcttctcaaagctaatcaacgttgctgcaaatggatttccttctcttttaggactaaataaataataataaataatacatactccattttatatatatacacacagacacacatatgtatatacacatatacatataaatctattcgctttatcarttttctttatccattcatccattgaatggacactgtgtttccatgtcttggctattgtgaataatgctgcaatgaacatgggagtgtaaatatctctttgagatactgactttgtttcctttggacatatgcccacaagtgggattaagaagacaaaaactgtatgatctcacttagatgaggcatctgaaaaagctgaactcatagaaaaaaagagcagaagtagaatgctgattgccagggrctggaggacgggggaaatggggagatgtttgtccaggagtactaatgttcagttacaaggtgagtaaatctggggacctaatgtgcagcatggtgagtataggtgacaatactgtatggtacacttaaaatttaagagactagatcttaaatttttctctttatacatacacatacaaaaaaagataatcatttcacaatgtatacatgtatcaaaaattcacattctatacaataaatatattcaaattttgtcaattatattttaataaagcagcaggaataagaactgcaatgttaaatcagagcttctcagagaacagctcattccaggtctgggcaaaaaattgtacaaaatgagcttggaagatccagtcattacagaaagcaaggaagctatcaaaaagtcagagttggctgggtgtggtagctcatgcctgtaatcccagcactttgggaggctgaggtgggtggatcattagtggtcaggagttcgagacaagcctggccaacatggtgaaaccctatcgctaccaaaaatacaaaaattagctgggtgtagtggcgggcacctgtaatcctagctactcaggaggctgaggcaggagaatcacttgaacccgggaggtggaggttgcaatgagccaaggttgcaccactgtaatccagcctgggcaacagagcaagactctgtatgaaaaaagaaagaaagaaagaaagaaagacaggaaggaaggaaggaaggaaggaaggaaggaaggaaggaagaaagaaagaaagaaagaaagaaagaaagaaagaaagaaagaaagaaagaaagaaagagacagagagagaaagaaagaaagaaagaaagaaagaaagaaagaaagaaagaaagaaagggacagagagagagaaagagagaaagaaagaaagaaggaaggaaggaaggaaggaaggaaggaaggaaggaaggaaggaaagaaggaaggaaggaaagaatgaaagaaagaaagagaaagagagagagagaaaggaaggaaagaaggaaagaaggaaagaaagagaaagagagagagagaaaggaaggaaggaaggaaggaaagaaggaaagaaggaaggaaggaaggaaaagggagggagggaaggaaggaaggaaggaaacacaaaaaaatcctgccagagttatatcaaaagaacatgttaatcatgtttaaatatgtaccttaataatatctttatttgttagaaaccctggcctttatcctgcctgttctttttttttttttttttttttggagacaaagtcttgctctgtcgcccaggctggagtgcagtggtgtgatctcagctcactgcaaactctgcctcctggtttcaagcaattctcttgcctcagcctcagctgggaccacaggcacccgccaccacacccggctaatttttgtatttttagtagagacagggtttcaccatctaggccaggctggtcttgaactcctgacctcatgatctatctgccttggcctcccaaagtgctgggattacaggcatgagccactgcccctggcctatcctgccttttctatacaaactatatactagggtaaccaatagttgatgtagtttcttttttagagtatttcagctaatgaatgaaggagtaataaactaaaaatataattattttgttattcctaatgaaatagtggatctaggtggtgatcataaatggctgctttgaaaaaaaaaagtgagagacaaatgttacatgcattctgatgcaagtattcagtactgttgtgagtgttcttgcaaaagaaaaatctaacataagtgtgatctagcctccagatctaactaccaatttataggaattacaggggacaccacaacatgttaaatgacgccacacgatgcaatcagcaaattccaaatgtgcaaaactctacagggtacatgacccaccagtttcttaaaaagaagggttagaggagggaaggcatatctaaaagaaaatataaaacacgtaaaccaattgtagtgtctcctattcaaataaaccgacggcaaaaaaataaaataaaaattataaaacaattgggaaaatttgaacattgactagattttgggtttttgttgttgtttgtttgtttgtttgaaacagagtcttaccctgtctcccaggctggagtgcagtggagtgatctcggctcactgtaaactccgcctcctgggttcaagctattctcctgcctcagccttagctgggacaacaggcacccaccaccatgcccggctaatttttttatttttagtaaagatggggttttgccatgttggccaggttagtctcaaactcctgacctcaggtaatccacctgccttggccttccaaagtgttgggattacaggcgtgagccaccgtgtccagcctagattttgttgatattaaggaataactttaagtatgctaatagaattgtgattatattgcaaaaggatctttatcttttagagatattgaaatgtttatggataaaataatacatcttggttttacttgaaaataattcagggtgggaagaaagcaagcaaggttatatatagatcaggggttggcaaattataccctagtagtcaaatctgacccacgaactgtttttgtaaataaagctttactggaacacagtcacattcgttcatttatgtgtgatatgcggctgcttctccactacgatagcaaagttgagtcatttcaatagagttgaaatggccsacaattcctaaaatatttactatttgacctatataaaaaatactttactgatcctttgtataactgacacaaggttggccatgagtccataattattgaaggtaggtgatggatacgtgggggttaattatagtagtgtttctttcctgtatgtttaaaatttcccatcataaaaagcttaaaagtttggtttggttttggtttgtttgtttgttttgggattttttttggtttttgtttctggttttttgagacaggttctcactctgttgcccaggctggattgcagtggcgtgatcaaggctcactgaagcctcaacctctgggggctcaattgattcttccacctcagcctcccaagtagctgagactacaggcacgtgcccaccaagccaggtcaatttttgtttgtttgtattttttgtaaggacgtgattttttcatgttgcccaggctggtcttggactcctaggctcaagtgatccacctgcctccgcctcgcaaagtgctgggatcacaggcatgagccactgtacccaacctaaaaagtttaaaagttttgttttgtttttttaaagtgctgatagtcctaggagagagctttgacctggcctttgattggctattaacgatggcatcatagttctgctctgaggggcaatgtgtaccacacactgcctctaaagatgctttcaggggctgagggtgaatatgactgtccaccctgacaattattttagagttggcaaagccttggctgccttagctgcatcgaagacatcagaggactgtgtgctgtgtgggaagcagccttcttctcctttgcttttgcattgcgctttgaagaacctaccacatctagaaagaaactttttatgctcaaaataacagacactttacctcttcaaggaatatctcctttccttgcagaataaattgatcctctaatgctatgaagataatgactcttgggagcccctgaagttgacaaaaagtcacaataattcctatacatcctatacaggtatacacgcatccacaattatatatgtatgtgtgttaggctacaaaaccacaaaataacctcactcttcagatacacttgccaagtatagtgtttcctagagaaacagggaattaaagattctgtaaaagtaattttaagtcattttaaaactctgactctagttaattcacgaaatgagtattgaattatctgcccccacaaggcatgctactaagcactgaagagatggaaaaatgagccaggactgttggtgtgcatctgtagtatcagctgctcaggagcctgaggtgggaagatggcttgaacccaagagttcaagactgcagtgagccgtgatcacaccactgcactccagcctgggtgacagtgagtccctgtctctttaaaaaaaaaagaaaagaaaaatgaaaaatgaataaggcactgttcctggatttaagaaattcaatctaaaagtgattacaggccaggctcagtgactcacgcctgtaatcccagcactttgggaagccggggtgggcagatcacttgaggccaggagtttgagactagcctggccaacatggtgaaaccccgtctctactaaaaatacaaaaattagctgggcatggtggcacgygcctataatcccagctactcaggaggctgaggcaggagaaccgcttgaacccgggagtgagaggttgcagtgagctgagatcgcgccactgcactccagcctaggggacagagtgagactccttcttaaataaataaataaataaataaataaataaataaatgtgattacagtggtttttgtacaatagtccctcctaatccaccccaacggatgccaaactctttatatactatgtttttttcctgtacatacataccagtgtaatttaaagtttatctataaattagatgcactactcttgcacgttgggtccattattaagtaaaataaatgttatttgaacacaaaacaactgccttgacagttggtttgataattgagatggctactaagtgactcacaagcagggggtgcctacagcctggaggacaaagggaggattcatgttctggctagggcatagggggctggcgagagaaagatttcatcacactattcagaatgacacaaaatttaaagtgtatgaattatttatttctggaattttccatttaatattttcagactgtcattgaccatggataactaaaactgtagcttcctttcaccaagtacttagcacacacgcccacctgtgctaagcatgctaaagattttatcttatttaatttttgcaacaacctatgaggcaggtgttattatttctattttacgcatgaaaacactggccattagagagatggagccacaaacccatgcctgccacattccaaagcccactctcctgaacatcattggtagtttaaacactggaatgacaattttattatgttttcaccataaggacccatttataaagaaactccagatcttgtcattctattgggtttcctctcatctcttgtgagcttgatggcatttatgacgagtacctttagcaggagtgagacatttttgcttctgccaggcgagaaggacaatgtgaagggaaggggaatactttgctgccttacccatcaatttcataataacaaaagatgtgggtgactattattttaaagatgcattgaaattgtcactacatataaatgtaaaatatggcaaattggaaagttgttttgcacacacaacagcaaaattcctttttttttttttttttgagcatgttgacgtccaggactggctctaggcaagactgtgaagaagctatggtgtgcacatttaacaactggctgtccataaaaatgtatggcatgtttattttaaattttactgatgcaaagaatgtgtctcaaccaatttataagcaacagtaaaataatacttttttttgagatgtgctttcactgtgtcacccaggctggaatgcaatggtgtgatctcgactcactgcaaggtgcgcctagccagctcaagtgatactcccacctcagcctcccaagtagctgggaccacaagtgcacaccgctatgcctggttaatttttaaaaatgttttgtggacactgggtctcactatgttgcctaggctggtctcaaactcttggccttaagcaatccacctgcctgagtctcccaaagggctgagattacaggcgtgagccagccaaaaaaatactctttattgtaaattccaattcaatagtcaattgattttcacagaatgctttcattgatttttttgtttgttcaattcttctatctgtacccaacctatacttggaattgacaaataagtgaatatccaacataaatgttggctaatatttctatttacattaatgaacaatatgaaagtgaaacaacgaagacatatgtaaaacttctcttgatcttcataaagggagtggcttccttgctgaatcagataacagtttttaaatactgaaagaacatttcttcaaatttttttgcaatttacaatataatggctataaacattacatacttttactttgctttattaacattttctccatctttttctcaagtccagacaattaaccaaacagtgaatcaagccctgatttgtagcatttgcccattttcatggtataaatacttcattcctgccatggtctgctgcaagctaccgtcattatgtcattaaacccggagttgagaagagatgcatgagagcatgtcattatatagaatatctaccttacaaatacaatagacataataacctcaagtgcataaataacagtaaaacatagtaaaataatttaaaaaagataagtgtggtatttataatttatttaagttgtattagtttgaactctataaaactgtggatatgtaaccatctttagaccacagaagtgataaataagtgactgattcaacataaaacacactcaggatgtttaaggatggtggaattgtggtgggtggatagagaatgataacaataatggcagcctctactatttattgaatactttcaaagtctgggcactgtgaaaagctaggtttgattctctgtgattttcaacaatcaaagcagaatttacattgattcctttttatctagcttctcccaaacagttcggaaaaaccctgatagagactggagaatttctgggactttagttccaattaaagatttgacacaatatatatgaaacactttatatgcaaatagcattcatgatattttacataattttttaactaaatacaatatatagcagaacaagcactccttttggagtatgaaactcaacacaagtcccagcttcattaaatacttactgtattgccagctgtgcattttgagctgcctcacagcttctgagggctggttccttatttgtgattttagtaataatactgtctgtgcagattcacattgcagaataaacaggagattcaagtaggaaaaagaaaatagagtgccttctaaacagtccaattwtgcagaggtagtggcttattattatagaatcatagccttctgtatctgtttccaggattgtttcctgggctatgcccttcgactggctgggaagcaactaccagcctttggcaattttagggcatttctgaccatttgtcttacaaatgaactgtgtggtagaattaggttctcatgactcttcaaattgcctagtcacatttratttacttatattataataataatgataataataattatcattattattttgagacagagtctcactctgtcctccaggctggagtgcagtggcacaatcttagcttactgcaacttccgcctcccacgwtcaatcgattgtcgtgcctcagcctcccgagtagctgggattacaggcatgcaccacaaagcctggctaatttttgtatttttggtagagacgaggtttcaccgtgctggccaagctggtctccacctcaggtgatctgccccgctaagcctccgcragtgctgggattacaggtragccatcatgccagcctaaattaaattatttttattaaaaaccctctctttgttcatattgatagtcctcaaagaattttggattagtgtaaattacagttgaaagctcagctggtggtaggaatgtttacaaaacattcaggagtttgaagcctcccaatagtaaagctgggaagggtcccatctgtgggagagtaagaattgagcctggatcctcccctgactctcatatctctttttcccaatcgtggtttgttgcctgggtttacttgggtcatctggctgattcattgttgctgtataaacagggctgagtgtgctgtgttgaaagccactgaaaccagaggaaactagtcacaaaaaccctgactatcacctgatagattgcttgtgctgcctgataattaytcgcacttttcccaggctagtgcaaatcttcaggggccgtccrggactacagagctgtttcaccctaccttggcttcaatctcttcccccatgctcgaaggtgcggagctgtacttcaacgtggaccatggctacctggagggcctggttcgaggatgcaaggccagcctcctgacccagcaagactatatcaacctggtccagtgtgagaccctagaaggtaagtgtagctcttctcaccctttaaaaagaaaaaaaaaaaaatgaaatgatgtccctctccagaagcatggagaaaaaaagcccataatcatatggtttgagagttctgagcagatccttattcctgcagtccagatttctggggtccataaacttgaatgaggaaaaaaaaataaatctctatttttaatctctaagtgaactataacatctttcattactaatgtaggcaacaaatcacagtagttgagataagtagtatctgtgacactgtcaccaacaaaaattcaatgttttcatatccctttaaagttcttgcagataccttgaaatgtcatgtatgttttctctattttgaagtaagataycacactcatcctttattatttatttatttattgagatggagtttcactcttgttgcataggctgaagtatagtggcgtgatcttggctcaccacaacctccgcctcccgggttcaagcaattctcctgcctcagcctcccragtaactgagattacaggtgcccaccacctggcccgactaatttttgtactttttggagagacgggttttcaccatgttggccaggctggtcttgaactcctgacctcaggtgatccgactgccttggcctcccaaagtgctggaattacaggcgtaagccatcatgcctgccagattcttatacattttaaagacattttgacaactatatctaaaaatatttggtttcctttataatcctgtgtattttcattctacatatttataaacatttggagaagggcttcaccaaactgccaagggatctatgacaaagaaaaaatatatatatttaaaaccttgttctatagaattttattctatcacatttctcagtatctattgatttgagagtttgaagtctacctttaactgaagttaaaaaaaaaaaaaatcaagagctgttactggtggggccagccctggattcaaaagtcctggatttgacttctgtcatgtcaccagtaggtgacctgtggctccaagcctctgagtctcagtgttctcagttataataaataaatactcaacaagtggaaattgtctctaaaccacattttttttttcaaaaccttaccaaagattccacgtctgtaacagtatttttattattaaaaacagctacactcactgattttgaaacatacttacaaaacccatataggtcaataataaggtggtttaaagcttccagattattctagaaaaggcaagaaagcactaagaataaagcctcctaggaagggtattaaaaggcaaaaacgaaccaatgaaccttctaaaggtgactttgcagtctcctcaattagggctgaagggtcctgaggccacttgtttatagttctgaccagttaaagccagagttcagacagaaccacccaagttacgacaaaccctgcacttccattagcattggaaacagcaagaaccttttagataactaattctgttggctacaaataattacagtaaaaccccaaatcctaagtcacttcagcatattaaaataagagtttggtgactggagaacgtcggtcacgtatagaaaatctacataaaataaagaacacagggctgactaagtgtttctgagaggagacattttaatgaattctatttagttttcagccaagctcttaaatgagctaaggaatgcaaatttaaatgcaaggaatacataaaatatctttgtgataccaaaaaaaaaaaagaaggaaacaaaaaaaagaattcagagataaatcaagggaagccatatctaaagccatataaagaattctaggcctggagaggtggctcatgcctgtaaaaccccgtgtctactagaaatagaaaaagttagttggatgtggtggcagacacctgtaatcccagctactcaggaggttgaggcaggagaatttcttgaacctgggaggcagaggttgcagtgagctgagatcatgccactgcactccagcctgggtgacacagtgaaattctgtctcaaaaaaaaaaaaaaagaattctagaaaataggtcgggtatagtggctcatgcctgtaatcctagcattttgaaaggcctaggtgtgaggactgcttgaggccaggagttcaagaccagcctgagcaacacagcaagacctcgtctctactaaaaattttgaaaattggctgggcatggtggtgcatgcctgtagtcccagctgcttgggaggctgtggcaggaggatggcttgagcccaaaaggttgaagctgcagtgagctgtaactgcaccactgtgctccagcctgggcgacagagtgagaccctgtctcaggaaaaaaaaaaaaaaaaaaaaaargaattctagaaagtaaaaagataaaaatcaggaatttaaaaattgtaccctatattttctgccaaggtcccttttaatcaaaagacttgtcgagggaaggggatagatagaaggaggaagaaatgagattaacagatctatcctctacatagacagttagctgaatctggtatcttcattttcagtttgggacagaagaaaaggtttcaatccctctcaaagacctcaagaataaagcttgtgtttagaaaaacatacataagcaggcatatgcagaattttccatacagcgtcaggggatgagaaaccacctgaagccaccccacctgtgctctactgctttattgtcattgtgtctcatgatttctaactctctctcttcccaattctcaactacatttgaatctgtgtgccaatctactgttcagagactcccagaaatatcaagcatgaatcatcaaaccatgtttaggttatcatgactgctgagaaaacaaatctaaacaagaatttcatgtcctctgttagttgaggacactggggcttagaatggctgtgaccacctaacacgctattggtgatggaggatggatagagctatctgtgtctccttttccacaaaaatatgccattgcctcctgagtataaattgaagatatatgaataggtctgtgtggagttgatgtccactccattttgaaacagaaaataatgactgctctacctgattattttataggatgttgagaaataaatagtgtgtgaacagcagttcaactgttgcatctgtgaatgtacttaaggagactcagtctgccccaagctagattcagagctgagaagaaatcaavttgttggaatagaatcctaaaggcttaaggattttagtttacttttgcacaaaatatacaccatacaaactatggataaacaacaggttacactgtgccattccaatactatatgttgaagcagggactttctgtaaaagaaaaactaacttggccaagattaaatttgctttcagtctttttaagtcatctggtctttaaaaggaaagtgttctgatagcaacaaattgttttagaacaacttgcaaggaacataataaggttttgggtaaatttagaagagagaaaaagatcatccagcaaagctttgaaaagtgttagtattcataattgtgcttaattgtgtgcataattgggttaagtgtagtaagaaatacccatgtattctgaggcctgcccctgactaattgtgacttgattcagatctctggatccactgtgactcagtctttcctaggtacagaagaaggaaattagttcccattgcctttgtcactggtattgctttaaagttgtatctataaagaaattttagggtctttaaaagtgactttgaaccaaaacaataactttaaaagagcatattttaaaaactaacactactgcttgcatcagaatttttaaaaattacaaataagacttttggaaatattcttccctcctcaaaaaagacaaaatagtaaatcaatacttaaagtttagtagtaaataatcttttctaaaacatatgacaacagtgtccactggctctcaagatgtgggaggtcattctggattaagtcttttttttttctttttgagacggagtttagctcctgtcacccaggctggtstccaatggcacgatcttggctcactgcaacytctgcctcccaagttcaagtgattctcctgcctcagcctctcaagtggctagaattacaggcatgtgccaccatgcctggctagttttgtatttttttttttttttttttagtagagatgggatttcaccatgttggccaggctggtctcaaactcctaaccccaggtgatccgcctgccttggcctcctaaagtgctgggattacagacgtgagctgctggcctggattaagtctttactttgtccttgacacagtttgtttagaagggaattagggaagctgattatatctcactaacaatggtgcccccctgtcaaggggcttgagcttcagagcttctccagcagtgtcttcaggtaggaattaattcaacaccatctagtaagtactttctagctagcgccaagaaagtaaagatgaacaagatagagtccctgccctaaaaaggatcctacctggagaataaaaatattagaaaaatgagaaccccttaaggatggcaattgggtagtacctactgaaattccaaatgcttatacactttgtccaggaattccaagtctcatagacaaacttacacacatgtgagatgacagctatacaaggctctttatgtggcatagttttttgttgttgtttttgagacagagtctcactctgtcaccctggctggcatgtaatggcacaatctcggctcactgcaacctctgcctcctgggttcaagtgattcttgtgcctctgtctcccgagtagctgggactacaggcgtgcaccaccatgcctggctaattttttgtatttttagtagagatggggtctcaccatgttggccatgacaggtctcaaactcctaacctcaagtgatccacccacctcagcctcccaaagtgctgggattacaggcatgacccaccgcggctggccttttatgtggcatagtttggaatagcaaaagatggaaacaaatcaagtgtccctctgcaggaaataagttttcattttttaaaatttatttttttaatagagacagggtcttatgttgcccaggctactctcaaactcctgggctcaagcaatcctcccaccttggccttctaacatgctgggattataggcctgagccaccacaaycagccaggaataagttaaataagttatggaacattcacataatggaatattctgcatttaaaaggaaaaacgcatgaggaagcactctaaaaggagaaatatggaaagattaccaagatacattaagtcagaaaagcaaggggaagaaccaggtgtggcatggcactctttagtaaaaagtgggataaattttaaaaatatacttcctatatgattacctagctacaaagaaactgtgaaaggattaaaaagaaactaaaaatagaggttacgtgaagctaggaacgagtggcagggggtggtgggtaggtgagtgacaagcatagggacctgtcactgtttacccatatatacacctattacttatttttaatttcaaaataacatatgggaggatgactgatttcaaagagctttctctttgcttccttagacattatttgtacctctaattatagcactttttctgccttatattaaaaagacatatccaattctctcctgtttaaaacacatacacacacacacacacacacacacacacatcaagagcttccatcaggcaagataaatgataaatgacagcttaaaaggctgatccaccttgtaagcccttcgtcagaatgttttgccttttctagagctgcaccttcaatcacaaattccatcccttatcccatgttcctggaaagcgaccatctccctttaaagtcttcatttaartcacttcctctgtaagccccttcctacagaatctatcatgggatggaattgacaagcttcaactttagctccacggtaccttgtaatgaacctaatcctgtataacatctgtgacatttgcatagatgtgtcatcctgaggcagaacatttgcctcgtttgtctatctagctccagaggctgctgcagttacaggcttaactgataaataaatatatagctctatctgccttattgcaagcttttttatttttattttttaagacggtctggctctgacacccaggctggagtgcagtggcatgatctcagttactgcaacctctacctctcccggacttaagcgaccctcccacctcagcctcctgagtagctggaactacaggcacaggccactgttcctgactaatttttgtatttttgtagagacagggtttattcatgttgcgcaggctggtcttgaactcctgagctcaagtgatctgcccacctcagcctcccaaagtactgagattaccggtgtaagccagcgagtgcctagcctgtaaacttcttttttcttttctttttttttttttttgagatggattctctgtcgcctaggctggagtgcagtggcgcgatctcggctcactgcaagctccgcctcccaggttcatgccattctcctgcctcagtctcccgagtagctgggactacaggcacccaccaccacgcccggctaattttttatatttttagtagagatggggtttcaccgtgttagcttggatagtctcgatctcctgacctcgtgatctgcccatctcggcctcccaaagtgctgggattatagacgtgagccactgtgcctggctgcctgtaaacttcttaaaggcagaaagtacaccttaaacttttctctctcctacctccctaagcctaagagtgtattttgcatgtagtaagaatctgaaaatacacactggaaatatctacatattgggttcaagtcctggatcttctgctttatggttctgggattctaagcaagtgcttaacctttaacatggtgctttttttttttatttttatttttttattttgagacagggtctcattctgttgcccaagccagggaatgcagtagtgggtagcgtgatcatggctcaatgcagcctcaatctcctaggctcaagtgatcctcccaccttagcctttcaagtacctgggaccacaggtgcatgtcaccaagcctggctaacttttttgtcatttgcaaagacaaggtctcactttgttgcccaggctggtcttgaactcctggcctcaaacaatcctcctgcttcagcctcccaaaatgctgggattacaagcgtgagcactgataagtgctttcttatctcatctttagatggtatctccktggcctaactcccagttcactgggaggatccaaaatatctgaagatgttttgtaaattgtaaatcttaacaatacacccctgcactgtagtttacatacaacaagaatttgttttcccycttctgctagactttggaattcctgaaatagttctttccattttatggttttggatagtggcatttggatatgaatccatttagtttattctgttcttcagagagcaccagttttgaaaatatttattttggtaagtaaaaattaaaatgaagattttcaaccctagtaagatttactggactgtataatgaagttctgtggggccactgctacatggatcttaagttttaatcacaaattaatatttgaggctcatttatgtggcaaaaaaatgcatttggagctgtggagagtacaaaaaagaacaggctggatgcagtggctcatgtttgtaatcctagcactttgggaggccgaggcaagaggattgctagaggccaggagttcaaggttgcagtgagctatgattatgccaccgtactttagcctgggtgacacagcaagaatctgtctaaaaaaaaaatgacaccatttactacctagacaactgtgtagttgataggatgtcacaaataagtaaaatgagataaaaattcagaatccaaaaatggttcaaacctattgatagcagatatacttgaaggtgaaccaaatcttgaataatagattgataaaaggccatgaaatggggtttcaggaggagaagaattgagatgtcaggacattcagcaagcagataaaacaaatgaatttaaaaagggaaaaaataaaagcctgtggatggggagtatatcagttaggctgcaatactagaatacttggagagaaggctggaattcaggctgggaaaactctgaaaaaccttgaaggtttgatttgaagtttcaagatcctgacgctaacactgaatgaggacaagagtcaggtatgattctcagttaactacttgccagcgtggaaaacaggaacaagttacttctctgagcctcagtttcttcatctatgaaataggattattgttaaagttaagagattatgtatactaaaaccattctggcaatggtaaaacgctctacaaattttataaaagttgtttttaatctgcctaaaacttttcagtggctscaagctatttttaggatcattacagtaccaaaacaattcttaggaaagattaaacttgaggcggggagcacatgaggagaaatgagcctgggaaaatcgattcaaagattgctgcagtaatcgaagtgccagatgttattcaaaacgggagtgagcagcagaaatcagggaagaaatgcagggcatttggagtaataaagcaccaaagaggactttgaagtttcaacaccctgagaacggcaatatattagcaaaaatggagaaagaagtgtctggttgtacatcttccggtgtatttattaaaagtctgagtaattaccagatttsatggttgattccaatatgttagttggaaaaattctggtttagaggataaaagctgaattccttagcaatttattttggagataggtgggtacaattgaaaaaacaatattttgtggtggattctctatgctggctctttacctacctgaatcatctttttttgtttgtttgtttcttttcttttttgagacaggatctcactctattkcctgagccagagtgcagtagcttgaacacagctcactccagcctccacctcccaggctcaagcaattctcccacctcagcttcctgagtatggggaccacaggcatgtgccaccacacccagctaactttttttttcttttgtagagttggggttttgccatgttgcccagtctagtctgaaactcctggcctcaagcaatcctcccaccttggcctcccaaaccccttggattagaggcgtgagccactgtaccagacaaccttgtttaatccccaaaacaacctgaaagcgtagactatatccattttgtagatgaggaaactgagttcrgaaaattcagataatttccctaagttcagcagcagcagagtgtggggaaaggcagggggctgcttggatagaacagtagatagtcacttctctttatttttagtagagacggggtctccctatgttacccagactggtctcaaactcctgggctcagcaaccctccygcctcggcctccagagtagctggggttacaagcatcagccaccacgcccagccaaaaaggaattttctaaaaatagtctgccaacaaattagtagacaataaccatgaagtctaacttccctatagccaagtgatctcagataattcccttcatgcagtgaccacaacccacagaaaacgcatgtttatattatgactcagtgcatacattcaggcacacattcacactatgtgatagactctatttgttaaaatggtgtaatctattttttttattctattgctgtgtggcacctattaaagtgatttagttggtagtgatcctacagtttggaatatattctattttccttattttaataaaaaggaaaaaacaccatttgccactctacctttctagataaaaagtagtgtaattttcccaagtgtgctctgtgggcggcccattgttttttagtggcttgggaggttctgtcccttactgttttcaaagaaatcactttcatgtagtaaaggcttttaattcctacagtaaagaagcttgtgccttccaaatttattttaccataaagtcttattactcacacacctatttagataagcatttagggaaatgtaggaaaaaaaattcagtgaactcattttgaaaagtataaaactatgagtactgttgttattattgacagtctatcatcatcccagagtgcatttcagaccctcagattctcttggaatctgaaagcaagcatcccttggatcattttagtgctggggaagagaggttccttctattccacttttcactgattacagtattataagattcctacagggtatgaaacactgagacatttaatttcaggatgtccctggcagctgaaaggtttgaaagttatttagcttgaaagaaacatatgtcacatgagcaaaatatcatggttttgaaagaaataccatttgtgtcacttctgttggcaaatattccttggtgctgagaattcaaactgtcaagttgcataaaaatctgaaatgccaaaatgaaagctaaataaggcatggcaacaaagtagaattgttttaagttaattaaataggtaattgagcaaataaattctgctgtcagatgaacagcatttacgatgcaaaatctactccagacactgaggaagactgcaagaaccacattgtccctaattgcaggtgcaccctcccccagctaccagagcaatccattcatagctcgcagtggcttcctgttatctcaggataaacatggcataccaaaccctccctaggacagttctgcttatttctttggcttcaattctcacctccccttctctaccactcctttaaaattgacacataaaaattgcatatatttatcatatgcaacatgatgttttattttattttatattttattttttgagacagagtctgtcattcctttgcccaggctggggtgcagtggcgcattctcagctcactgcaacttcagcctcccagcttcaagtaattctcatgcctcagccttctgagtagctgggattacaggcgcacaccaccacacccaactaatttttgtctttttagtagagacggggtttcaccatgttggccaggttggtcttgaactccttacctcaagtgatccacccgcctcagcctcccaaagtgctgggattacaggcgtgggccaccacgcccagcctatggtgttttaatatatgtattaattgtggtatcaaccaaaattaagtttgttgaggcagaaatagttcagtaaaggtttattggaagccaaatgtaaggactgatcaaggaagacacagcaacaaagctgtgtgtgtcccagagtctgctgcgagttggaaggcttttaagggaaagtttagaagaacagaggaggactcttcatactagagttgtccttttcattgcaggtcacaatacagaggttacaatcactggctacagatgatatacaggctaaaatgtctacgtgcaagacaatcagtaaacttcatgatgcagaaaccaatcaccaaaacttgatgatttggaaacaaatcagtgtccttttcagtgccagtaggttatgtattaatcagtacattaaaaatttgagggactcacggtaagattctttactctgggataggacaggacaggacaggacaggacyggcatcataagacctccgccaggcaggtaaatttggaagcctgcccaatgtgacctacatgttatcaatcaagtgaattaacaagtatgtgaattcacatacttattttttgtggggagaacacaaaatctactctttacatgattttaaaaatacaatamattgttatttactatagtcaccattttgtaccataggtctcttgaagttattcctcctaactgaatctaactgagttttgtatcctttgacatctttccaacccctcaccctctcacttgtcccccactaagtcgtttttttctttttttttctttctttttttttttaaatgtagagacaaggtcttgctttgtcacccaggctagagtacagtggcgagatcatagctcactgaagcctcgagcccctgggttcaagagatcttcccacctctgcctcccaaagtgttgggattacaggcatgagccaccactgctggcccactccttgccctttgatgaccactactttactctctacttctgagttatcaaaatgaaagatttctttctttttgaaggccgagcagtatcctatggtatatttataccacctttcctttgtccattcatccatcaatgggcacttagcttgattctatgtcttagctattgtgagcaatgttataatgaatgtaggagtacagatatctcttcamcatactgatttcatttcctttggatatatacccagtagtgagattgctagatcatagggggttctatttttaatttatttctctcccacttaatacttcagcaacactgaactgctttgagctccttgcacacagcatacctgtactaagtcatcgaatgcctgcctctgttcttaatctttctcccctcttcctccactcttacataatattctaaggctcatctccttcaagacactttcctaggcttcttgctcctatctttatggatctgggtctcattttctatgttcccataaatcaaggaccttatctttatcactaaattaacacattgtttgaatcatttgtgactgcctctttctttaccaaacagtgggtttccttgggaatgaggaatatttctggtctatctttgggtctcctgtagttggcagcacataatagatgcttaataaatgtttgagtggaagatccaataagctccatatgtgtgctggatgttgccaaggacattttagatactcagatatgcaataacacttacatgttgggttctgcataaggagtcacaggtaaaagatataactaagatagtgtaactgccttctgggttaacatgcttaagactatataatatcctataataggtgttatgctagaggttttatcagagtactttcaaattcagatgcatgagagtgaataattctgcctgagataattaaatctttacagaacaagtgataatctaattgaattagttggcaataaaataaagttttaagtgactttgaagtcaggaatacctggcttggaatcacagtttatctacgtgagatttttaaattttttaatctatgtgatcttgaacaagttactaacctctctgagcttcagtgttcttatctgtacaaaggcatagaaatcatttttacctcataaaattgccatgagtattaaatgagataatacaagttcagtacaatacctggtacctaataagcactcaatcactggtaactattattttaatgttaccagtagggtaacattgaagtgtagattataataagccaatctgaaaaggggtgggggaagaaattctagagtggggttgggtcagcatttaytgaagtatggatgctagaaaatacmtggtttgttcaggaggaagtgacaatcaacaaagctgaaattcagttcaatccaattacctggcaaccaaaatggatgacatttaaaggatgcatggcatggtctggtggaaacgatgctgggttataagaataaggggactaatckcctacttcagtctcattagataactccaccatttagtcccactgaacttcaatttcttcrtctgtaataaaaggatactgaaacagagcaccgatggctgcccgtgccacctgcccccacacccatggtagctactactaatacatttatcttttccatcaagttgggatggagcatttgtatcctcaacagtttcccaggtagctatctccaaaagactaaaacctgtttgccatctgtggattaggtgtttgttaggtttttttttttttcagayctgctaaataataccagatttcttagtaattgaaatattttgtgagggccaggcacagtggctcctgcctgtaatcccagcactttgggagcctgaggtggacagatcacttgaggtcaggagttcgagaccagcctggccaacatggtgaaaccctgtctctacttaaaaaaatacaaaaattagccaggtatagtggcamrcgcctgtggccccagttacttgggaggctgaagcaggaaaattgcgcgaacccaagaggcagaggttgccgtgagctgagatcgcaccacggcactcctgcctgggctacagagggagactccctctcaaaacaaaagaaaaacacattttctggtgtgctggattatccatattcacataacatttttgttgctttacagatcaagtctaaatcatatttagaccttatattaaaatctaataagataatacatatgtatgtaacacaaaattagcatgaattcaactaatgttgaaaaagctatttgtgtatgttcaaaatttaacctgaattggggtttcatttaatttcagacctgaaaattcatctccagactactgattatggtaactttttggctaatcacacaaatcctcttactgtttccaaaattgacactgagatgaggaaaagactatgtggagaatttgagtatttccggaatcattccctggagcccctcagcacatttctcacctatatgacgtaagtgatgacagaaagccctaataagccccaatgtactcrtgcggatgacccctaacaattacaggstgggtatcaagccagagtgagacttaagaccttttccattgtttgtaagtttaaattcattcacattttagcaactgataagctcatagagccacatttttgcattagaaaatggatttcattgatttataaacatgattatatcagcggtggtggcctccatctaaaggaatcttttcagttttcatttaaaaaaaaaaagtgttgccagtgtttaaggtgttagtactgaaggtaaatgttatgtgacattcttggatcacttttcagggtggggttgacaatatctcaaagtattcataaggtcacataaaccactcctaattccctttgtaacagtataagtagcagttgtgaaagttatatatgttttatttttatccatcatctgtggttccaattgtgcaacacatgagctcctcattctamaaaatatttggggccgggagctgcggctcatgcctgtaatcccagcactttgggaggccaaggtgggtggatcacgaggtcaggaattcgagaccagcctgaccaatatggcgaaaccccatctctactaaaaatacaaaaattagccaggcgtggtggcactcccctgtagtcccagctactcgggaggttgaggcagaagaatcgcttaaagccgggaggcggaggttgcagtgaggtgagattgtgccactgcactccagcgagggcgacagaatgagactctatctcaaaaataaaawaaattaaaaaaattgaactcccacataatagtgaactgcacttttatgacaccaattaataaattttacttagtgctcaaatggaccatttgaaataagcttatgccctttcagytctcctagctgaaaaactgggaacaaagacacacaaataaatgagctgtgtgttatgtagataaaatgtagatgtaaagcacaaagttctgaagactaggtccaagcccaggtctggtgcctggcactcaggcrtcaatatatttgtggaaagaaaatatcaatgaaaaaatgctgcatagtataagccaaagattagtcaaaggggaacaaaagaacaggacttcatgtcaaacactgtgctcagtactagaagtaggaaattagagacatgttatacgaatacaggaaactgggcgttggctgtatgaaagcatggctttgggagacaatctaagatttttagaggcagattccaagaaaatataataagagaaagcctggaaaaatagagggcagagactscttctgaaagagcagagcagtttcagcctctgtctggttgaacgataaaatgatggcgctgcctcaaggagcagggaatgaaaagaatccgcttatctgaccaggaagatgatactccctctatccttctattctttctttgtccttccgtatcatccatttttttttttttttttttttttgagactgagtctcrttctgtcgctcaggctggagtacaatggcgtgatctcggctcactgcaaccttcgcctccgtggttcaagagattttcctgcctcagcctcctaagtagctgggattgcaggcatgtgctgccatgcccggctaatttttgtatttttagtagagatgggggtttcaccgtgttgtctgggctggtctcgagcttccaaccgcaggtaatcctcccgcctcagcctcccaaagtgctgggattacaggtgtgagccaccatgcccggcctccatcatatattcttccactttacaaatgacagtatctctgcccttcagtccagtgaacaagaaaatggaactaagaatatccaaatatacttgctgagctgaacaaagttaagtggaccttaacttctacacatgcctttaatttcaggggaaaataatatgtcagtcagaaagatttctcacactatagcagatattccttggcatctaaatacggcaaacagaaaatattccatgaaaacagacctgcattcctaggcctttggcacaaaggaaaaccaatgcaaatttcctattattgacagtgggcaagagcagaagtaaaggaaggctcttcygtttggaatttcacatcgcrtcatacaatctgaggatcaattttacttaatgaataatatctttaagaaaaaaagaaaagtaattaagggacatgattacaatctttcaagagttcagaaaagcataaaataaaaatatcactctgtgtctacatttcctcttcttccccactcagtttctcttccaaaagtaaccacttctcagtttcttatgtgttattccagaaaaatacttacatgtacgtgtgtctattgctacacactctcccacccacacatttcaaatttatacaaatggaatcatattccttctgtacttttttcccacttaatatttcttagaaatatgcttgtgactgtcattctttttattttattatttatttctgtttttacagacagagtctcacttattgccccggctggtctcaaaccatcctctcaccttggcctcccaaagtgctgggattatagacgtgcaccatcatgcctggaaaacatcatactttttaaataactgcatagaattggctatatgtgtcatgactccatttaccaatcatttattgacaagtagctaaattatttttattttttccgcttacaaaaaaatttgcaattagcttatttcctacgagattagacgagatcaggcacgttcagggtggtatggccgtagatcaattagcttatttctatgcaggtcttgaacttatttctaagctcagtttttagcagtggaagtagtgagtcaaaggaatgtgcatctttatattttagtaaatatttctaagttctcaacaaaggtagcaccaattttaaccccctacaacaacctgtggaaagacctgtgtccttttaccattaccaacattggatattttctttttaatttttgccagtccaataggttaaaaaaatagtatctctttgcttcaatttatatttcttcaggagtgaaattgatcatttcatatttattatttatgtggatttgatacaggacctaattgtctatttttgttagagttttcagcagtttttaatgacatataacagctmtttgtaaattaagaaagtttagcccttcataatatatgttgcaaaactattttctttgtgttatatattttaatttttataatgtttgtggttttttgctgtggaaacattgaacacttttaattagctatactcatcaatgttttcattcattgccttctgggtattttattgtaccctgtttagaaaggccttcactccaaattcataaataaacccacttgtcttttcttctatttatttgttgttacacatgttgcttcattttttacatttaaaactttggtccattttagaatttattttcgtgtaaagaattagactacagatctagctcaaattgttttcccaaatarctctccctttctactccatttctgtaagtaagcaagtagaagaaaagaccataggtcaaggaaggaaggaattgtggatatacctgaggcatgactttagtgcggatgtttcttgtttgccatactcagtcctcctatcagcgctatgggttaggataattccttccatgttacttacaggcaagacacagatgctgatgttttctaagaattcacaaatatacatacagctagtcaggagtagagattagatatggacttacataggactcagttcagggattctggaaaaccttcccagaagggctgatgttactgagcctggaaatacggtagaatttggcaatacgggagaagccttagcatccgggtctgaaacatgtagatgggaaggttgttccatgcgtgaggaacagttcagttttggctggagtgggtgtgccatataggaaggaggaagtggggaaacgaggctggagacgcaaactccagtcagattatggaaagtctttgatgccaggctaaggaagttgagccttatcacatcagagtgtttttcttttctttctctttgttttctttctttctttctttctttctttttttttctttctttcttctttctttttctttccttccttccttctttctttctttcttttttttttttttttttgacggagtttcacccttgttgtgttgcccagacgtgaacctccgcctcccgggttcaagtgattctcatgcctcagcctcaggagtagttggaattacaggcgcacgccaccacgcccagctaatttttgtatttttttttwttttttttagtagagatagggtttccccatgttggtcaggctggtcttgaactcctgacctcaagtgatccacccgcctcagactttcaaagtgctgggattacaggcgtgagccaccgcgcctgtccgcagagtatttttcaaggttgtgtgtatatgtggtgtattttgttggtatctgcaaggcccttcctaaaaagtaaaaaccttaaggagaaacccaaaatgtaaaagagatgaaagaagatgccaggattactcacagaacrtattcctcctcccagtgatggttgggaggaagtagaaagtgcttaggctttgggctgagtcagatccaaattcatacctaatcttcaatagctggcatgagagaggctctgcaagcagyggtgcctcctgcaaaaatacctggcatggataattatggaaacagtaaagattcctgagctgaaggacaaaatggccctagttgtgtggaaggaaaaataacaatcaatatactagacaacatttacagaatattacaatatgccggggactttattaggttggaaagctaagtgctttacaaatattacctcatttaaccctcctgacaagtcttactcaattcttaccatcaccattctaaggatgaggaacctagaacttaagtgcaataatctgccctgatcacagatctaacgagcggtggagtcatgatttgaaatagttgttagcagtaggcttcataaaattattttgctcagattttagttgagttcagaaaatctgaccatgacagtgacagagggcagcccaattttatctgaatcagaaagctgccagggtttgtactttgggattgggaaacaaatctcatataaaggcaatgtgcccagaatacactgggaaatgctctagttctaaaaacagctgtgagtcctttggtcaaaggttccgctcactgatgatcccacagatttcttgtttcctaatcataggatcttttttttttttttttttgagatggagtcactctcacccaggctatagtgcagtggcgcaatctcggcttactgcaagctccaccccccaggttcaagtaattctcctgcttcagccttccaagtagytgggtctacaggtgcacaccaccgtacccagctaatttttgtgtttttagtagagatgaggtttcgccatgttagcctggctggtctcaaactcctgacctcaagtgatctacccacctcggtctcccaaagtgctgggattacaggcaggagccactgcccctggccctaatcatagaatcttagacatggaaggaaacttagcattcattaattaagcaagcatccttatttcacaacaaactactrtgttacaaatatactgtttctaaaacaaaaataattacttaaaattttaaatatttctagttataagcagtatttttaaaaattatgtacaaaaatacagataatcacaaagcccagggtggaatgctaacacaaaattagaattggaaaggtggttttggtagtatcagtattgttactaaaggatatattttaatttatctactcttcctattggctatacatgctttgaattagtgcttttagtatctctgtctggactccctattacctaatrggcattgaatatttgttgaatcaatatagaatcctgcattcagcagtactttacacggagctagaaaaatatatccagataactcagcagtttatattttatatagcacttgaaaattagttttttattgaccattatgttaggggtaaaactggatgtcatgcctgcagatacattttgtgaggccagctcagtgttttaaaaaataacttttaaaaaatacactttgagccaggcacagtagctcatgtctgtaatcccagcactttgggaggccaaggtggaaggatcacttgaggccaggagtttgaaaagcctggtgaacatagtgasaccctgtctctacaagagaaaaaatttaaaaattagcccagtgtggtggtacatacctgtagtcccagttactggggagtctgaggcaggaggattgcttgagtctaggagattgaggctgcagagccatggtcatacaactgtacctcagcttgagtgacagagtgagaccctgtctcaaaaaaaaccaaaaacaaacatacaaaaaacactttgaagtcaggtgtggtggcttgcacctgtagtcccagtttctcaggaggctgaggcaggaggatcatttaagtgcaggagtttgattcaccagcctgggcaacacagcaagaccctgtctctttaaataaataaattaaaaaaattttttgtcaaggctgcattcttccattagccacagtctccaacactcttgtatttaagctacttatcagacccctgaacatatttactctgacttaaatgttttaccttcacctctacacaagaaccctgcaaaacaggtgtttatatctccaattttaaaattacggaaatggagtgtcaatgaattaatgcattttccaaagttacaaaggtaagagacatggaagggattccattccaggtctatcagtctagcaagataatgatctcaccactgtcctcctagtttataataaggcaaacaaatcagaaatatctgtcggtcttcaaaaaccactcatattcttgacccctacttcagtagattctgatctagttggccttggaatggagcccatgtgtatttttgaaggcacccaggttatactgaggtgcacatctgatttaaaatgtttaatcagggggcctcagattgattacttgaaggtgactttcacaaatacttccatgagtttctgttgacagttacctatacagatagcattatctccctgtcagagactagatagcaccaaagcctaggtcttctgaatctccatccatgatctgtcccatcatgtcatgtgatgtcttgtgactagcaaccctggcagcattcarttgctgtctgtagaccttagagrtttattacaataagaaatgatatatggccagacacagtggctcatgcctgtaatcccagtactttgggaggccgaggtgggcagatcacttgaggtcaggagtttgagaccagcctagccaaaatggtgaaactctgtctttgctaaaaatacaaaaattagccaggtgtgggggcgcatgcctgtagtcctagctacttaggaggctgaggcgtgagaattgcttgaacctgggaagtggaggttgcagtgagctgagatcgtgccactgcactccagcctgggtgacagagcaagactccaccatttcaaaagaaggaggaggaggaggaggaggaggaggatgaggaggaggaggagaaggagaaagaaggaaaaggagaaggagaaggagaaggaggaaagaaaaaagaatatacaaatggtggaaaggtatcccacagttctgaaaccatttctcttatctctcttccagtatatcttgcaaattcgagggtctctctagcacccatgaaattccatcaaatgaagtaacttcctgtcctattagaaaatgcccgagacaacgttatacaaatgattaaatctgttttattagagacagtctaaatttaagttggtataataaatacaatcttaarcattgcacattttatgagatataattactgtacatgtgaaacttattttgaaaatctggaatggatatttttaaatacttaatagcaggaagatctgctggagggtttgtatactataattatacacagttgtgtgaaacaaaggaatgaatgcaataacattttaacgaagagatcatttaatatargccttggttgttttatttttcctycttcctattgaacattttccatcagcatttcaacttctcatctcttttgaaaccaggcatctttttaaaaataatctctcaagcattcaaagtatcccacctcagaggctgtaaaatttctgagtagaggatgaccaaggaaatgtcatcttcggtacttaaacagtaatgagtaatcctaggttaaagtcctaattctcagtttactaagaatctgackttaaggaccacacactgaagaaatctttaaagattcattcctaaaggctaattaaagttttaaaatatcccaatgacacataataaaccatttacagcctttgtggtgtgctgtacattagggtactgaacaccttagtttacccaaagtgtttcccaggactcagaacttgtagtgttgataccaggaaagtccttggaaaaccagatcatttgatcaccytatcaccatatagtcaaaaaatgaacaacataactctggctcactaagggcttacattctaatgcagcaagcaagtccacaaatggtgtaaaagtaagacagaattaagccacagctataagagaaggctgaacattcaatgagaggaacctagaggactgaaacaatgaattttgactttaaatgattctgtagagaaagtagaattttggccattgtttaaaattggcatagattgaaagaataagtgaggcatgaaaggattttgtgtttggagatgacatggcatctctgatattgctggaacctagacatgagtagggagaacagagacttgggcaagagagtaaagaggttgaccaggtgaagggctttgtcactaagtctctaaataaaagtcactacaggaaggctttcagaaaatactatcaattccatgcttcttgtgtgctgcagacgataccccctcacttaatggtcaccacgctgtaaggggagaagtattttccccctgggtggccatgtgatagagtggttgaacayttccgctacctctgactgtgtggccaaaggcagtttgacatctaagcattagtttctcatctagccaatgggagagtacctgttcttaggattattgtgcatgtagtacttattcaataactggtgattgctattattatgctgctttcctggggcatacttaaaaataaagtgtccaagtccttgtagctgctaagtaaaaagcctaagatgtgatatcaagtcactccaaatagcattccaaaagtgatcatttttttcttttttgcttatttgtatgtttttactttttaactcctgcttcgcaaagtgagggagctgatcggatgtatatcttaggaagatgattttgttagtattataaaagatgcatggaggggatggaacttaaagcagagaaacaatagaggaagctattttaaaagcttagactggaactttgaatggtagagacaggaaggcggggaatatgattagattcatttgagagagagatttaacaggatttagtatcttgatttatgaggcatgagggaaagcagacaataattcctgggaattctaagttaaggaaagaaaggatttgcaagtaagataagtggattttatttttagttcttatcaaagagactaggaagaccatggtaaattagaggaaattatagaagtaaataaatcaccctaaatctcaccatcaattgacatatgcctatactctttttctatacatttttaaagaactaacattatcatcactttaattttgaatcttggtttttctctgtatattatcagcattttccccacatctttaaatgagtaaatagccttccatctggtcatgaacatagatatgttgagttttgtgtctttctttccccaaactttgcataatatttaatttgttgaattccagtttcaacaatcaaatttctaataatatgaaattggctttttgacaccaccatgcccttgtgatcctgagtctctggtcggaaaagttcttctgtggtcttatagattgcactgtcttaaaggctttgcactcagagattcaatgggaatagtcaaaggggagcaagtgcagggcaaacacatccctactgtagttgctgataagaccttcagtgcttaaaactctcaagcattttgtgaattgaaaaacactggcgctattctgccaaagctatacttggtctccctgtaactgaatgatattcatttaatcagcataacagtaagtgactactatgagtaaaggcttatgcgagactccaagattagaaacgaattgaatatagactttgttcattaaccaatggaagagttacttaagatgcagattctaagatcatgcttttaaaaatcatgatttactaggttytggaatgcagtcaatgaatttgctcttctaaaagccctccaggcgaccctgatacaggtgagaaattcttataaccagtaggtagactctaaactgggtctacaatataccaactgtaggaccccaaaaatgtcccttagtcactcaaagccttggtttcctcatctgtagtacagggatcgtaattatatacaatatagagttgtgagtttaatttaaaaacagaaccagatacatagtttgtgaggcccggtgcaaaatataaagctccttgtttaaaatatgttcagtgatttcaagagaacagcagcagagaattaaaccaagcattgagtcctctgtgactacatagatcacactcccctgaaactggctgattgaaaaaaatgtatacttatacaatatataaatatacccacacatccatacacatgctcaaaaaatgtagctaattttatttgtgtatttgagtataatgttcacctgtgtgagtgagaaaaggtggcatgaaggaggtgatgcccaagctaaggcttgaaaggctaagcgtttgtaggtggacatggctggagagaggcaaacagcagagagaacagaaaacacaggccccaccactactgttgttgggttgctgatgccacatgtcagcaaaatcagcgtctgaggttgaggatgttaaggtaatggatgtgaaagagcttaggatgccatcgctacaacaacagttttgagtgggatacaaatcagtaccaaggtgggcttgggcaactgtatggcaaggcatcaatcaaccaccaggaggcgatattgatcccaataacctgttttccaaaacactactccttccccagttgtttagtttaagagatttgagactgtcccataaccttcattttcaggatggagactgaaatccacacttatccattgtcctagttttattttaacttgtttattttttaactgaaaataagcacgtgtgtttaaaaaatgaaagaggttttttactaaaatgtattttgtgctcactacacaagttagtacctttataatcactttcctgtattaaatttaatmrattttcacagcaaccctatggagtggtactagtattgttggctttttagaaataagacratggaytgagtaaagactatacttcagaattcatgtcacagagcccagaggtaaccactcaaaactttcatgcatatctttctaaactttttccttgtgaaaaatgtttttttatatgtgcatgtgtttatatttaaacacaaatataaatatgcatagttgggcttattgtttgttttagaacagtgagatcatacatgtattgtccacaatttgtccttttaaaatgtaatctattataatttttgcatmaatatataaagatatattttatttaatatatttttaatttatgtattatttacttaatttaattcattaacttatttgtttttctgagacagagtctcactctgtcacccaggctagagtgcaggtgtgtgatcttggctcactgcaacctccacctcctgagttttagtgattctcctgcctcagcctcctgagtagctgggattacaggcatgcaccatcatgaccagctaatttytgtatttttatagagactgggttttgccatgttggcaaggctggtctcgaactcctgacctcaagtgakccacctgcctcagcctcccaaagtgctgggattataggcgtgaactaccgtgctcagcctatatatatatatatatatatatatatctttttgtatatagtataaagttcaggtgtacatgtgcaggatgtgcaggtttgttacttaagtaaacgtgtgccttggtggtttgctgcacagatcatcccatcacctaggtattaagcccagcatccgttggctactcttcctgatgctctccctctcccactcccctatagttatttattatctgtaaataactatgtttgaaatgaacatgtaaaacgacttactcaaaagcacacagctctacagtggcagaattagtactggaatccaagccttatgtcacactaaatatgtattaaatatttgtgaatgaatgagctaactagtccttatgttcatcactgctactgccaatgtatatagaaaatttatttcaccccaggataaatataaatacagaaatttagaaagaaaaaagatatcacctctagctggagacawttgaaaagcttcatgaaaaatatgatactagaatatggccttaaaggattggtaaggaagggaaattttatacctctggagaagggtaggaaccaagacattaatgtagaaaaggacaagttaagtttgaagaatttttaatctaaacagttgggttagaccaagattgtagagaatcttaaatactgaagaggtttcttaaaattccagagcaaccaagggcttgggaaatgcaaagttatcagcattcttgttctaaaatatgctattatggcaatgctgacttgtaagtaacttttcagtattttattttgctwcaaggaaaaacaagtgtgacagcaaaattgtttgctttttcaaattattttaattttcacttcctctatttaaaaaagggaagcttcagagaaggaagaaatgttaccaaaaatgtgaaattttaagagagagaagaatgtttatggggatattctaaattcagctgactaggaaatcacgcgatatgacagggtttccccatgtaagcatatgtggttagtgctggattgaacaaatccacagtataacaaaaaatgtttaccaatgtaatcaaggaaaactttcatttgaaaattcatacattgaaaaagtgtgaaatatatttggtgtacttttataaattatttaattcctcaatgaaactcgtaaatgaaaggtgcctttcacacacacacaccgatcctttccatgaacaatgacccctgaaatgcttttttttttttaattgagacagggtcttattctgtcacccaggctgyagtgcagtggtgtgatcatggctcactgcaacctcagcctcctgagtagctggaactacaagcagtcaccaccacacccagctaatttctgtcttttttgtagagaggcasctttgccatgttgcccaggctggtctcaaactcctgagctcaagcgatccgcctgccttggcttcccaaagtgctaagattacaggaatgagccacagctcccagcctgaacatgcattatatgtccctatccttgtacattctgtatgtataattgttacctagccaacatctcacatagttctctggtcacctaaaacaaaatggttgtcattaagaattagattacatgttgcagatgaaggatgtggatctggcctcctaggtagaaaggaaacctgtagcaatcaaggcctgataaaaggatgtggctttctgggccaggcacagtggctcatgcctgtaatctcagcactttggaaggccatggtggaaagatcacttgagcccagcaattagaggttgtggtgagctatgattgcgccacttgggtttggatgacaaagaccctgtctctaaaaaaataaaataaagctgggcagtggctcatgcctgtaatcccagctctttgggaggctgaggcgggcagagaccagcctggccaacatggtgaaaccctcatctctacgaaaaatacaaaaaattagccgggcatggtggtgggtgcctgtaatcccagctactcaggaggctgaggcaggagaatcacttgaacctgggaggtggaggttgcagtgagccaagatcacatcattgcactccggcctgggcaacaagagtgaaactccatctcaaaataaataaataaacaaacaaacaaacaataaaagggatgtagctcctgtgatcaagccaaatattagtcacaatgtgtgtacacagtgaagctgttgtcatcaccaagttaaatgttctctcaggcccaaaggacaaagttcagactgagtattgaggtacctccatctagcaaaggggctcaggtctctttacaggaaagctgttatcagttttgacaaacagttggcaagcaatgttttgagattactgattacatttccaaagaagtaatattgaactttttgaagttcggataacttaaaggaaacatcatataaaataatgaccacacaaagacaactctggggttacaagatacaaaacaagatggtaataggttttatgaaataggtgtaaatcagacttgagggctagtatcttaacactattgagtaatacgatttatggtcttcttttttggtgtcccagccttccaaatgactgtatcactcagcttcttgtcttcacaccacaactgacatgataatctcctattatctaagagcaataggtaaatttagaaagaactctcttagctaaaactaaatccaaaactacagagatgaagaaagctcaggcttacctcaactaaacttttcaaatgttttacattaaagatgatgtggcttataatttcctgcaaagtccagtttacaggaaaatatcttcttctaacagtgtatgtcctcctttatccaaggcactctacgagtgctttcatatgtgttactaagcctgatgccaaccattcaaagttgaatgaatattttcatttcaaaactgaagaaactgaactcttagggtttttaagttgcagagctgggcttaaatcaggtttatctgtttcaaagcctgggctcctactgtgacaacttctttatgatttacaaactgctttcctatgtgtaatttgatttagtgtgcacagcgaccctgtgaagacagtaattgtctacttcttctcaccctgtgatgccaagtttgttgaaaagaataatctggccaggcatggtggctcatgcctgtaatcccagcactttgggaggctgaggtgggaggactgcctgagcccaggagtttgagaccagcctaggcaacacagggagaccctgtctctataaaaaaggaaaaaaattggccgggcacagtgtttcatgcctgtaatccctgcactttgggaggccgaggcctgcagatcatctgaggtcaggaattcaagaccagtctggtcaacatggtgaaaccccatctctaccaaaattagctggatgtggtggtacgtgcctataatcccagctactcaggaggctgaggcaggagaattgcttgaacccaggaggcagaggttgcagtgagccgagatcgtgccactgcactccagcctgggcaacagagtcagcctctgtctcaggaaaaaaaaaaaagggaaaaaaattgaccaggcatgatggtgcatgcctgtagccgcagttactytggaggctgaggtgggaggattgcttgagcccaggaggtcgaggctgcagtggtctgtgattgtaccacagcactccagcctgggtcacagagagagaccctgtctcgaaaagaaaaaaaaaaaaaaaagaaaagaaaagaaaaaagaaaataataatctatacttctctattttctcacttatttcctcatcccmcttcggtcttatttccttccccatcaggtcaccaaaagctattctaatagctaagtccaatggatattttttcagctgtttcctaattcgccatggcatttactgttgttaccttgtcccattcactttgtgacaattctttgtgctcttttttaccattttcactctttctccttcttccttgcaaaaatctcctttctatcccttaagaaccaaggaaataacacagtatggactttaattaataacaatatgttaatatcgattcattaattataacaaatgtgccatactattttaagatgttaatgagaagaaactgggtatggggtatatggaaactctctgtaccatcatctcaattttttctatgaatctaaaattattctaaaaattaaattatgttaaaaataattttacaaaacagagtttttctaatctcagtgtgtgcaatgcttaagagacagacaggaaaaacaaaataaagaatgagctaaatagaaaaagaaaacgacaggcctgggagatagggcaaccataagacaaattatcacagaattcaagttccaggaaggaggaggaaggtgtcctggaggggtgtttacactcatcaaataccattgcaaatcctggcagacgcaccctgagaagcactccctccccagagtgaagccctccttcctgctgctacttgaaaggaagaataatatgcccagctgcctgcctctgtcctcttccccatgtgccctatggggaagcctcggagcatgtctgctggccataacgaccccccaccccagttcttcccctttcaattctgttctcaaggtctgggtttatctccgtctctgctcactctgactcagtacttgtaagcacatcagaaatcttaacyctccccttctctacctcagagacccttttggattttatcttagagataaataacagtgtggccagcggttctttgtcatatagtgtccaatgtcccttctgtccccttagatcagtgatcaccatcctttaatcatayacctatcattaacacacaagcccaaaataatataacatatttaattatatattatatgcatttttctaatatattatgtcaattttatatttatttatttattttgtgtgggaggtggggggaacgaagtctcactctgtctccaggctggagttyagtggtgcaatctcggctcactgcaacctctgcctcctgatttcaagcgattctcctgcctcagcctccccagtagctgggcctacaggcgcacaccaacacgctcagctaatttttgtattttttagtagagacagggtttcaccatgttggccaggatggtctcgatctcttgacctcaagatctgcccgcctyagcctcccaaaatgctgggattacagatgtgagccactacatccagccatttttatttatttatttttgagatggagtttcactttgttgcccaggctggagtgcagtgatgcgatctcagctcactgcaacttctgcctcccrggttcaagtgattctcttgcctcagcctcccgagtagctgggattacaggcacctgtcaccacgcccagctaattcttgtatttttagtacagatggggttttaccatgttggccaggctggtctcgaactcctgacctccggtgatttgcccacctcagcctcccaaagtgctgggattacagctgggagccactgcacccagccttatgtccatttaaaaacatatgcaaaaattgaaatttaaaaaagaaagaaattaaaacctatcttagtgaataattttgaacattctataagacagcaacctttccactgttatacatgtccccctaggtctacaggatgctttccaagggttatggagacaggagtgattataagatgaccactttccagatcctgagtgcctatatgtatatatactaaaactacctaagagtacttgaagtcagaacactgtgctgggttccccttatcacctccttatcacaactgttctttttccaccatccttttacaccatactatgatgtatagccctgaggtataaaaagctttagggcactaaacaaaccacaggaccatttgaagtgttagtgtgttgtttttttaattgatamataacattttccatatttatgrggtccatgcaattttttttttacagttatagaatgtgtaatgatcaggtcagggtatctgaggagtctatgactttgagtatttgtcattctgtgttgggaaccatcagtctattttgtaatatgtcatacattgttgttaactatagtcactctgctcttatgtctaactatagaacttataccttttatctaactgtatatttatacctcttaatctacttctcctcctctccccctccctaccacccaccattcctagcctctattatctgtcattctactcattacctttatgagatcaactttttttagttcccacatatgagtgagtgcatatgatatttggctttctgtgcctggtttattttacttaacatattgacctgcaattccatccatgttgctgcaaatgacatattattctttttatggcagaatagtattctattgtgtatctgtaccatactttctttacccattcatctgttgatggatgcttaggttaattccatatctttgttatcgtgaatagtgctgcaataaacatgtgagtgcaggtatccctttgacatactgatttattttctttagtatagatacccartagtggcattgctggattgtatggtgtttctgtttttagttttttgaggtatcttcctactgttttccacagtacttgtacyaattgaaatttctaccaatggtgtataagaatctccttttttccacatcctctctccagcatattttattgtttgtctttttaatactgtccattctaaatggggtaagatgctatcttattgtggttgaagtattggcgtcttggaggacactaatgactaaaagatagagagaagaagactgattggctaagaaacttgagacccagggaatgacctggttttgagtttctcggattttccttcgggttgcctcatacactcctaactggatgctagaaaatcttacagcccagaaagccaatgggcacatacaaaaaygcccccaaggaaaggctgttctctctagccaaaggaccaggaaaggggcagcttcacaaacagaaagtctttttttttttttttttttttttttgagatggagtctcgctctgtcaccaggctggagtgcagtggcaccatctcggctcactgcaacctccgcctcctgggttcaagttattctcctgcctcagcctcccgagtagctaggactacaggcgcccaccaccacaccctgctaatttttgtatttttagtagagacgaggtttcaccatattggccaagctggtcttgaactcctgaccttgtgatacacccacctyagcctcccaaagtgctgggattacaggcgtgattcaccgcgcctggccacaagcagaaaatcttcagataataatggctctactctaaccaagtgccatgggaaaaactgcaaccccacccctgtcagcaaatgctcgatggggacccagatgtctacccttacccggctgtaagtggggtcagagagggctgagcgggaagctgggcctttgaccacctcccagcagtaatgagccctctttttagccttggtgtcaatagaggccacacacagagtagtaataaatcccagaaggagaggagaaaaaaagaaaggttgaaaaagtattcaaagaaataatggctgaaaattccccccatttggcaaaagacacacaccgactgattcaagaagctaagtgaaaccccaaacaggaaaaatccaatgaaatccaggccaagacatgtcataatcaaacttctgaaagaaaaaaagacaaaacaaatcttgaaagctatgggaaatgacaccttaccaataagagagaagcaatttgaaccatagcagatttctcattaggcacctcatggagccagaagcaagcggtgtagtatttttcaagcactaaagacaagaaaaaaaaayagcattttgtattcagtgaaaatccttcaggaatgaaggggaaatcaaggcattctaagatgaaggaaagctaggagattttgtcaccagcagacctactctaaaagaatggctaaacgaagcttttgaaacacaaaggaaatgataaaaagagtaatcttgaaacaawgggaaaaaagaaaggacaacagaaaggagaaaaatatgggtaaatacaatataccctttctcctcttgagttttcttaattgtatttcacagttgaagcaaaaatcattactctgtctgatgtggttctcgatatacatagaggaaatataagttataaacagggaaggaaaagacacttaaaaagaagtaaagtttttaaaactgcactaaaattaggacagctactctgaaaaatagtcttgcagtttcttaaaaaactaaacatattcttactatgccactcagcaactgcacttcagggcatttatccaagaataataaaacttattttaatataaaaatcagcacacagatgttcttagcagttgttattcrtaatagccaaaaactagaaaaaaamcacaaatgtccatcaataggtgaatggttaaatacactgtggtatatcaataccatggaatactactcaccaataaaaaggaacaaactgtttacatgcaacagcttgaatgtattacatgtatctcaagaacactgagcagagttaaaatagccagtctcaaaatgtcacatattatctgctgccagttatatattattcagaaaatggcaaaattatagagtgggagaactgattcgcattttctagacaytgggggtggtgggtgggaaagggtgggtgtgacaatgaagaggtaataccctggagagcttcttcactgaactgtgtttttcttagaaggtgtttctctttttctatctcatgccagagtgcttagtgaatgacagtcatttytcagctattgctaatgacactgaagtactaaaatttttattcagagaagagcaattcctctaacttaccaaattatggctctataatatttgacctcttagcaactgttatagcagcagaatgtggtagttatcatacagaaaatatattatagttttctttgagatccttaaataagctagggagcaggaggagaaagaatagctctaagatcaaatggaaatgttaaaatatcatctggcttgagctcttttatctgaacctactagggagccagcactttgattttagggacccaactctgctgcttgccagcactgtgatcttgggtaaggtatttagtactgctaagcctcagttttccttaatartggttcttacagcattgagttgttgtgaagcttgagtgagagtgtgcatataattactgccacatagtaaaaacttcaaaaagaatcagcatttaaagattttttaatatcctaaaatttttgaaattgagtaatttgctcatcacagttttaggtgactatgatttttacaggtgtcaaaggacatttgtctagaccatgagtaggagaaaaattaacctaactgaatgggtggctctgtcactacttatgaggataattatctaaaacagaggtttgaactaggtaaacatcctggtgtctttttgttcaaaaattactcaggcaatgtcagcaattatttgcttcccaaccactgcatgcatgaccccctggagatctacaaagattatagtctggagaaagtaaactgtcttctggttacattatgtccctgtcaccccaacagccaatgataattatatacctggtacctatgtgtgatggagatgagagaggggacaggaaagagacacccctgcccctcattgtgggccaagccctgggttctccatgtttctgaggaacactgcaagaactggtattattgttccattttagaaacaaggccactcagtaagagttgaaataaaattgaaccccatctataaagcccttgctcattgcaatatggagcttagcctgtctattagtaaaaaagtaaaaataaaaatcctgaatacacacacatgcacacactgtagaggcaggtctgggtgttatatgcaggctgcatcctgctcacaccattgacgctggtcgcccgtcaacgttgctctaatagtcctctgctaattaggaatgttcgcagctcagatgcttttacattgcaggggrggttgtggggaacaattaaatgtctggagtctgctaagcattattaagtactagcaattgccctctgaggtaattgcttttgagccataaagggacagttaaataagcacttccattttaatatctttttgaagagataaaaaggattctaaaattccataatgtctaaatttggtactgctgttcaggaggtgaagaaactttatagtcatgtgctttttataaagggataattgcctgcttcaaaatcttctctagttagaatttttggggttaagctctagaagttccacaatgaaggagacccccttttccaaccagaaacgaattccctgcccaggaagtctgtmccccatgcagccagactctggtgacaatgtttctacgtgttcaagtaaattttcatccagtaaaaaggtatcatttttcaagtgtatctcacaaaggtggctaagcttcccatcactgtgaaacctcgaggactaggtttgcattgtcccttcctccttctgatctgcgaccttgccttgtcaactgcctcctccccctcagcacttaaatatctttacttctcttcctcccaccctaaaaggacacatattaaaactaaaaatcgaaagcgtccttggcccctgtatctccatatatctggtttttctcttccttcaaggtcagcttgcagcatgaactccattctttaagcctccatgtcccrttaatttcagacacacaatggccagtcttccgccatcctcttctccctttcccttgcacagacacactccactgaaggcgttttcattgcattctctgatgaccccttagttgctgtaccctacagatgcctacttccaggtctcaacttrcatgtggactttgactctccaatcacttcttagaactctctagaacttcctaaaattctctcccctgattctccttcccccatctagtcatccctctgaatttccttcaaggtccttaaaagctggggttccccagagttcccaagaaagaactctctacatgcactctacgatgtgatcctacttactcccaagacttcagcttccacctttaaactaacccctcctgacccgctcgcccaaatgtctcgaatcggcagctgtcttcagggcacacacttcttaggcttacttgacatctcctcttggttacctcctggttaccttgaactcattccatctaaaacatctgcacccaytgcaacctcctcttcccctaatgctctcatctcaataaatggctctatarcctaactgtcaagcccagaaacctacacatcaccccaamaactaaaagcacataatgtgagggttcagaggaagatttcagaagcagactgcctgagtctgagtctcagctctcctacttgtcagctttgtgtgtcatcatgggttgtattttcacctctctgggcctctggtttctcgtctataaaatggagataataatacgacatacctcacagtgttgcagctatggtttgaaaagataactttttgtaaagcacctcattgtataggtgtttgtttaccttttctcctgttttaacatttacataggtcataatattcccttcagtgtaagggcagtcagtatcctccgttgcccttaacattcaagttcctcatcttgtctttcggggcccaacatgctcagccccagccccagctccagtgctcggcccaggcaaaggaaacaccctgagtatccttgtgttcccatctctggggcttttcaaatgttctcccttctgccttgaaatgtgcttttccccagttcccagccccttttggctggccagcttctactaattcttcaagtttctacttgactgtcatttctctagcaagtctaattccaggactggtttagcgtccagctatgattctccacaccaccctataatttattttgcatagcatgtatgccctattgtgatttgttgtaaatgattctttgtccatttcctcacttaagctgtattctttgtaaaggaaggccctaggtctcatttacttctcaacctcattgcttgtaatatcttaggtgctgactacatgagtgaaccaggacatkcacccagggtatcccgagcagagcttataccaaataaagaaatcacataaaaatgattaaaatatgaattaatatgaattaataaactcggggatgtgaggaaggtggcctagaaaattcacaatgtgatctcatgcgaggacagaattacacagtattttttagaattaaattttgaatcctcagtgataggcttcattgcagtttcaaatatagtagtcagtttttaaagtagagtaagatgctccagctctgtgtttttcaacttttcaagccctttgtccattctgataaaccaaacaagttcacaccctcaccccccaccatcacatttgagaatgactgtggaggrgcttcttccgcatattcccaccagccaaggttttatttagttagttgttagaatattgaatatgctttttcatggccaggtgcaggcaccrtggctcatgcctataattccagaattttgggaggccaaggmgggcagatcacttgaygtcaagagtttgagaccagcctggccaacacrgtgaaaccctgtatctactaaaaatacaaaaattagctgggtatggtggtgagagcttgtaatcccagctactcaggaagctgaggcaggagaatcacttgaacccaggaggcggaggttgcagtaagccaagattgggccactgcactccagtcagggtgacagagagagacttggtctcaaaaaaaaaaaaaaaaagaatattgaatatgctttttcaatttatgacagtctcagaggtcatatatttttctccacatctcctaaaccccagtgtttaaaataaaaagagactcatgtattttctgaatgaaacagtgtgtacctaaasagtgtgtgttttttacttgtgggatgcttcttatccttttgcagctgtcctctaatgattgagttgtcttctgaaccaggtgcagttatatgatagacaatgtgattctgctgatgaatggtgcattgcagaaaaaatctgtgaaagaaattctggggaagtgccaccccttgggccgtttcacagaaatggaagctgtcaacattgcagagacaccttcagatctctttaatgccattctgatcgaaacgccattaggtaggaacacttaggtaattttgtagctgcttgtgtatgttatcacagtcattagaaaatgtactatttttttcttccctgtggtccaaaagaaaatgtactttgatttcacaatttttttccatgaatacagtagcataccatgcagattcctggaagtggcagagacattaaggaattatctagttcagctccctcatttttcagatcaggacaaatgaagcaacctgctcagatcacatgtgaaccatttgtagtagagaaggaactggagctcatctctcaaccttcaaacttttcactttataccaggtcatagcaaataaataatagcayttgtcattcttcaaaaaaaatgtaattttctagcttggttttacagaattagtttcttgtccttccatttaaatttttgtctagataaggctgcatataggaagcattttctttcaggaagtttaaaaatgtcatttttctgagatgctcamgagtatctgtcaagtcatcagaagcaatgatgaaatgattgttaatttcattataatttggcactaacaagagttgtgttcaaaatgctaaagagataattgtataagcatcattatctaatattgtcaggaaatctggatagtagcaattcactattgatcgtttgtcaaaatagttgctgtttaagatagatattttaaaaagcaaaaaaaaaatatttgtgtcatcattaagcacccgatactgagatagcataggctgatcgagagaggttgagactgcaatcagacaaccatgagcatgaaaccaggctctgcccggtcccagcaaggtgactaggagcaattcaattcaccccagtttcctcattttggaaataatcgtatctttttataacagagttttaaaaataaaacacacttttaagtacaactcaatgcttggcacatactaaagttgcaaataataaatattattattagatagtgaaggaggagggacttcaaaaaaaagccttaagtgaatagctccaaggwgttgtgaagattaaatgaaagtatattcagtgtatagtgtagtgagtgaggtttagggcagcagtccccaacctttagggcaacagggactggtttcgtggaagacaacttttccatgacaggagagaggggatggtttcgggatgattcaaacacattacatttattgcgcacattatttctgtaattattacactgtaatatataatgaaataatgatacaactcaccataatgtaaaaccagtgagagccctgagcttgttttcctgcaactagacagtcccatctgtgggtgatgggagacagtgacagatcatcaggcattagactctcataagtagcacacaacctagatccctcagatgcacagttcataatagggtttgctctcctatgagaacctaatgctgccgttgatctgacaggagggggagctcaggtggyaatgcaaacagtggggagcagttgtaattacagttgaagccactctctggcccactgttcacctcagctgtgtggctcagttactaacaggccacggactggtgttggtctgtggcctgggggttggggacccctggtttagggcttacacatgataaatgcttaaaaagtaataactgctttcaccctcattactattagccctatttagtggagtgtatggattgcaactctgcagtgttcttgtcaggagtgagcagagggtggtgtgttcaggatacgttttctacagcttataatcttgcttaagattcattttttggtatggcaatttctgctttcagctccattcttccaagactgcatgtctgaaaatgctctagatgaactgaatattgaattgctacgcaataaactatacaaggtaatggttttcccaaatattgtctttttcttgattacacaatgtattgtgactagagttctctattaaaacttactttactcattaaccaacttctgcaattatgaaactgtgcatatttggaatatagcttttatagttctggyctgtcctctagttaaatgcatgcatgtcagcttcccctagccagcaagatatttgaaaggaaataacatgccctattcttccatattcctagctccttgcatggtacctggaacataaaaggtgtttggatgatggtaggtgaagaaatggggtgaacaatatcaatccatttaaagcaaccagcatacatagcaaaccttctgctatgtagtgttcatctctgtcctcaatcctgttagtatccctgaatctcacagctaatctgcccacacaattttaatctacagtgtgcagcataccagaatgaacaatttgtgtacactgcatcmtaggtaccactttgcataatgtgactgtctggactgtgctgccaccatttgagtagctgtatatactttaggctgagcaaaatctgtccatttttagtcaaataaccatagcctctttggacactcacacacagtaactgaacatatatggcatgctgtgttcaaacatgtggtcctttcaaaagcattgtattgcaggcagtgttccttttggtaaagtgacttatgggcctagaggaggcatccttgagatataactaacagaaggcaccrttctaagcaatttataggccttaactcactaatccacctggcaaaaatatgatgtttatgctatctccattcctcagaggwgaaaactgaggcttggagagccaaggtttctttggaagaagtcagttagctaaaacgtattagagttgggatccaaactcaggcagtctgaccctacagcctttcccatatagctccatgctcaaagccatcccaaatgtgcctctacaagagactaaatgtcagcatagggctaaatctaaaattattcactgatctcagaaaagaacttggcactcttgttaaaatagcaagaattaaccatatgaaataatccaaaaccatgcaaaaaaagtgcttgttaagtaattataagttatgataaatgcagttttgtccttttctggaattcttttttagactgtgcaacatgctgcaatgtgaaagcttctaccaaatttattataaaatatcttcctatgggagatgtaattcagattccattaaagcatttaataaaccatgaaaagctgatctagacattttcaaaaggaatatatattcattatatcactttatgatctttyttctttttaagtcttaccttgaggcattctataaattctgtaagaatcatggtgatgtcacagcagaagttatgtgtcccattcttgaggtaagaaagagtccttgaattttgttatgctaaataaggtgcttacatatttttattgttttaaccttacttatatttccttatctttgaatttttttttaatctagaagtaagacaagcagtacattttattatacatatgatttgatatatttgattaagagttgtattttccaactcttaagttggaatatggaagttttctacatggaaaagttagcttggaattagaaaataataatgtttacacagatttggttatgattcattttaatgtagtatgtaaaaaatagattgtaaacaataacaaatttagtatactgttgttactggaaaagggtcccaatccagaccccaagagagggttcttggatctcagcaagaaagaatttgggtccatagagtaaagtgaaagcaagtttattaagaaagtaaaggagtaaaagcatggctactccataggcagagcagccccaagggctgctggttacctatttgtatggttatttcttgattatatgctgaacaaggggtggattattcatgtctcccctttttagaccacatagggtaacttcctgacattgccatggcatttgtaaactgtcatggtgctggtgggagtgtagcagtgaggacgaccatggtcactctcagtgccatcttggttttggtggggtttagccagcttctttactgcaacctgttttatcagcaaagtgtttatgacctgtatcttgtgctaacctcctatctcatcctgtgacttagaatgcctaaccgtctaggaatgcagcccagtaggtctcagccttattttacccagcccctattcaagatggagttgctctggttcaaatgcctctgacactatgagcaatggatggactatagacactccataatcacccaaattccctctggtgagggaacattgggcagctgggaacccccacaacttggcatcaaaagtccactatagcttcatycacagggacattgtgccttacaaatcctaaaataaaggctgccccaagcaacccatgaacattccagcttttggcaggaagactcatttgttatgtgattcacagttggtaagctcatttaattatgtgtcaaacaccaccattggtatctacctctctagctgatgttataacttaattcctcttaaggaccayagatttcatctatgcttaggagtcctcttgcataagaatgttgacctgcatatgcatgggagattcagggcagagatcagaaggatttgtggggcatcctgcacataatttgcactgagtattttacctccattcctcttgctagtaaataatttcctaattcacttaaaaagaaaaaatatcactttgggcttttgtaagcccttactttgccctgtgaaactaaattttatctaaagaatatttttcatcattacattatctggtacagtgacttcactggtgggtggaattctgatttcaagaaaagcctaataagcattacccttcaggtaaaaagaaaaaaaattaacttcatttgcaartatttcaacctaatgctctgaaactgcatatgataaaactagctcccctcaaaacatctaatcattaaaattttacttggttgatgacttctgatatagaaaaaggaaacaaaaaagttttatagttgaagatattttgctattccttattgagattttgtttgtttgttttgatttttgagacagggtctcactctgttgcccaaactggaggagtgcagtggcatgatcatggctcactgcagcctcgacctcttgggytcaaatgatcctcccacctcagcctcctgagtagctggaaccacatgcacatgccaccatgcccagctaagtgttttatttttwaaaaaagtttgaaaagaccaggtcttggctgggcatggtggctcacacctataatcccagcactttgggaagccaagctgggtgagcacctgaggttgggagttcgagaccagcctggccaacatggtgaaaccctgtctctactaacaatacaaaaaaaaaaaaattagctgaatgtggtggtgcacatctgtaatcccagcttcttgtgaggctgaggcacaggaggtgtgaaggttgaacctgggaggtggaggttgcagtgagccgagatcgtgccactgctctccagctgggcaacagagtgagactcagaaagaaagagagaaagagagaaagaaagaaagaaagaaagaaagaaaagaaagaaggaaagaaggaaagaaggaaagaaggaaagaaggaaggaaggaaggaaggaaggaaagaaaagaaaagaaaagaaaagaaaagaaaagaaaagaaaagacgaggtatctctatgttgtccaagcctgaaattcttaaaataaagcctaaatagttgtgaagtgaaaatcttatcactaaagatctccaaaaaatattcttgttcttatctatattatacagaaagtggatatcgaataaataaataacattttgaggcatagtaaatgacagaatgaaaaatagtctctctcagtcatgctaatcatgcaacatcattaactggtgaccctatgaagccctatcctttcttttcataaattcaactactagccatactataagaatccatattatctatggctcaaaagtagaatttctactcagcataattcttgtggtttggaaatggtttgcttactttatacccatgaaatatgtgaaataaaagttatatcaagactcataaccttatcaaaggtatacaatagcactattaatagctaacacttactacgtgctagatgctatcttgagtgctttacatacatgaattcacttagacttcaaaaccacacagaataggtagtctagtatctatttttcaggaggagcaactgaggcacagagaaggctaataacttacccgacgtctcacagctagtaagtcasgattggaatgcaagcagttggctcacgtacttatgtgcttatccactctgccatagtgcctctgcattaaattcaccattcacaattcttttatataaacgtgagtgctaattcataagcaagatcatattgtgtactataaaaattggtaaataggtaaggtaagaattacatctttgaataggtaagaaataggtaagaattatggctttgtaatccttggtaatgtaaaaaaaggatagtatcataaaaatgcttatcactgggatgatgtgatcaaactacgatatgcccagtgttctcatkgtacttttccartcttcatggtatcagatgagattagtgtttgtttgtttgtttcaaacagcattaaaaaaaaatccagctaggcatggtagtttatgcctgtaatcccagcactttgggagacctatgcagaagaatcgcttgaagccaggagtttgagaccagcctgggcaacatagcaaaatcctacctctacaaaaaatacagaaattaaccgggcatggtggaacacacctatagtcctggctactcaggaggctgaggtgggaagatcgcctcagcccagaaattccaggttacagtgagccataagccacctcattccaggctgggtgacggagtgagatcctgtctctaagaaataaaaataaaaatccattgaacagtttttatttatacrgaaatatcagctacacagggcatgaggttataacatttataattatatgatcaaagggtgtttgtcagctttacataaatactttcgatcatgtaattacctcccttttacttttgtaactataaagcacttactgtttataggttccatgtatattctcaattactctcatttggccagagacttcaagagacttaatatggtagaagagaccattaacctcagcttacatgtgaaaatttgacctaattacaagattataacttcatatgaaaaaaaaagaaattgacttatgttcaaggcaaatgcactgtagtataatatttgccttttactcctactcttcaatcttatggttaatagggcagtgaaaaacaatcataaaatatgtttgtttgatctctactggtcagtgcatgtgctgataaggctgggctccattccagttcacttcactcttttccattgccactgacatctccgcccactgcctcctgccaggtgcacccttcttcccatgaggaactggagagaatgtgtgaccccatcggtctgagtttatgatgtgcaaccgatagtgattttgagcaagtaaacagttcattgctatctcttgaaataacaaaaaaaataaggtctagttttaacatgagtaagtttttatagggaaaagtaaaaggaaagtcaygggactgccaacatacaccataccacacagcgtgccaactctctgcaagaaacaggaactaagtcacactaacaccagcccattcagtctcctctaatcaaatgcgtgtcaaactctgcttagggatggtcaaagaacagtccttttccaattctaaaacgatgggtgttttcaccataggataatacacacacttacccaaaagagcctctagactagaagagtaaggtagatayatagtcagttatgataaaaggaaaatggaatgtaatcagggttcaaagggaatcatatccaattagagaagaaatggaagggcttgttatgaaaaagatgacatttgatgggacaggagcgcagggaggatttcagcatgcagagttatggaacagagcacatgcacggtaggctaagggaagaagtggttacaaggacaaggaggtagcgagaagatggagggctcagataacctactgtatcagccaaagccctttcttcttatattcatattctctccccagccagctgtccttcccacttctccaattgctttcccaatgattgagccatgacaattcctccaaatcatcctgctttgtctcctgcagctccctcttctggcctggactctgctgtttgccagtctgcaatgctgcctacgttgccctaattctcttcgtaagatcatgacattttagaatcwgagagcacattaaagaacatctrtgacaatyacctccattgttgctctagttgccctaatttttgttttaagttttcttattgccacgaaatcttcttcttccatttcttctcttatccctagaaggtctaaaattactgacaggactggttatattcagtagccagagacagctgcccttgcttccacataaagccactccctacttttcagctcacacataatctccatgagagcaatcaacagggtcagatggaactaactctcactctcctgatagaaaacacctgttcttacataggatttccagtgaaatctgttgcaagttgggttttgttataggttaaccagtcaaaagctgattagaggatagcatacagcaattcttttcagctttcacgtgcatatagatagcctgggaatcctatgaaaatgcagattctggttgagtagggttggactgcggcctgagactctgcacttctaatgagtttccaggtgacgtcaaatctactgagccataaaatattgctttgaatagcaacattatggagaatgttggagaatttcaaagtagtaggatcacacatcactctgttggatacagtaaatacttaagactttcttatgtgtcaggcactggctattcaaaaatgaacaaaaggctgggcgtggtggctcatgcctataatcctaacccttagaaggcccaggacagaggctttcttgagcctaggagttcaagaccaacctgggcattatggcaaaatcccgtctctacaagaaaaattacctgggcatggtgtcacatgcctgtagtccctgccacttgggaggctgaggtgggaggttgaggctgcagtgagtcctgaccccaccactgcackccarcctggatgacagagtgagacccaatctccaaaggaaraaaaaaaaaaaaaaaaaaaamcaatgaacaagaaagacatggttcttcaaagattttagagtgtagtggggagaaatgcaggcacagatttcaaaatgaagtggtaattactgggcatttggagtacctagagaagagctgcgtagcccaagraaaccatggcaagcccccacaataggcagaggagcccctaaaggagagactgagatggaatggccagaggaggagaaccaagagactgtagaaacatggagctcaaaggaatagaaacgaaatttcaagaaagacttcagtggtcagatgaaacaggaatgatgaagggatacgagcccaggtgcctagtggtgttcagcacagagaagacaggccgtgagtatgtgttgacctacctggaagatcatgtagccacaytccagcatcttacaaagaagaaaacttcttgcgagaaagatgatttgccctaacccacatagttcttagctacagtcttagatttattgatacctcacctaggacactaacaaagaaaaccaaagccataaaagtgtaaacaaatggtaggtagcacaacatttcattatgtaaaaagttatgctgacattgacaactaggaagggatattaacatgtatggcatacactttttgttccaaacatcatgctaagcacttccacttatgttacctggttctgcccctgaatgaaccctaagaaataggtattctcctttttatagaagagacacttgtgacactagcggcctaatgtgacagagacacatgaggaattcattgcagggtgcccgggaaataaawcttactggggtttcaggagtcataggttatcattgctgctgtgtgatccttctctggcaagcagagttactccattacaagaaaagactaagggaacactaataacacatgtctggagtataattagacatagatccagaaaggaaagcgaatcatttcagaaatgaatgtgtgcacttaagagtctgtttatagcatttagcagtttattagattttactggttttgtcttgcaaattcagtttgaggccgacagacgtgcttttatcatcactcttaactcctttggcactgaattgagcaaagaagaccgagagaccctctatccaaccttcggcaaactctatcctgaggggttgcggctgttggctcaagcagaagactttgaccagatgaagaacgtagcggatcattacrgagtatgtgatgacactggcttccctaagtcctttgtgttcattcatttccatgtgctttagaagctcacacatcaaatttccgcttatactcaaaagaagtaataatatttgtaaggtagcaatcagtgtttcttgctgaagcaatctctccctaagaaacacgttaagtttctagcccaagctgctaatttttaaagttcctgccaagcaagtacttgtttaaatctccaaggaatggtcatctgagcactccttttgaagtgtttgataaarcaagttcccccaggagactggttcagtgttctggaaatgtgagctcatatcaacgttatgtaaaatagtctaacccagcagccctttcaggtacccactagggaaacaaggttagccacagaacgtctaggtggacggcaaggaacaatatggatgtattagtttttccactcaccttgctgagtggccagaaatcaggagaggaaacatagctgcttgtgtccttcccccactccagcatccatttgctcttggagcgcctgaagctcctcagcttaaggttgtacactttggctcagcttccattccctctsacttgcacacatttacataacctccaggtaacttttccagggctagaatgacactcatcttttcctccagatttctgaagcactccaggaaagatgaaagtcagcaaatgcgtaacccttgtgacatctcatatgtaattgcgtgagactctttagcgtaatattaaaatttgaatttctcccaaattccaccccttccacactggaaactacatgtgaattttatcaattttcatctcaaagaaccatgaacccttactgaccaaatcatgaacattcactgagcttctataatgtacctagctagccctaagaacctgagtgagaaaatgagctcaaacactgtatacygagagttgaattgccttgtagccctgaacaagccaataggctagaatttcatccacactcttgttatttggatttttttattgtttcttcgggaggccaaaatcctataaaaaaacattcagtcctcctggtatttttttttaaataggtacacaatttctataatgctaggaaaaatatatttatatacatttataagaaatgaaaatgtctttaaaattartgtctttgtttttaaggtatacaaacctttatttgaagctgtaggtggcagtgggggaaagacattggaggacgtgttttacragcgtgaggtatgatataagtggaaatactattagcttatttttctcttactgtggattttayatattttcttactttgggttttctttttacagctgatcatgccaattgattaggcacattcatagcttgatagtcagtgatgtattattgctacaaagttacacacagacctaggaatctttgtgctagcagtgctgctaaagtttgtagcttttctttcttttttttttttttttataccctcctaaaagagtttacttaaaaactgcgagaagtaatggaagtacattcaattcctcatggaatttgctgaagaacattattacaaatgctacaaattttagtgtaawattttggttaatcatatgagataatgtttcttttttwaaaaaaaaattgtgttatactttaagttctgagatacatgtgcagaatgtgcaggttttgttatgtaggtatacgtgtgccatggtgggttgctgcacccstcaacccatcatctactttaggtatttctcctaatgctatccctcccctattccccccaccgacaggccccagtgtgtgatgttcccctccctgtgctcatatgttttcattgttcaactcccccttatgagtgaaaacatgtggtgtttggtttttctgttcctgtgttagtttgctgagaatgatggtctccagctttatccatgtccctgcaaaggacatgaactcatccttttttatggctgcatagtattcyatggtatatatgtgccacattttctttatccaggctatcactgatgggcatttgggttggttccaagtctttgctattgggaaaagtgctgcaataaacatatgtgtgcaggtgtctttatagtaggatgatttataatcttttaggtatatacccagtaatgggatcgctgggtcaaatgatatttctggttctagatccttgaagaattgccacactatcttccacaatggttgaactaatttacactcccactaacagtgtgaaagcgttcctatttcaatttggagcttttcttgtgattctacaaacttactttaataacttccgttgtctacatttatctgcagagtgacactctctctttagaactttctgagttgtcaccatactcctctatttggcccaatttagagattgcctgtttaaacacaaataagcactgcacaagttcaagccagtcagtagcttaatattattccataatgttccaaataagytgatgatctgtgttactttttttctttcctcaggtacaaatgaatgtgctggcattcaacagacagttccactacggtgtgttttatgcatatgtaaagctgaaggaacaggaaattagaaatattgtgtggatagcagaatgtatttcacagaggcatcgaactaaaatcaacagttacattccaattttataacccaagtaaggttctcaaatgtagaaaattataaatgttaaaaggaagttattgaagaaaataaaagaaattatgttatattatctagactacacaaaagtaagccacactatatcttcatgagttgcaaatccatggaaacacagtaaaccagccctgaaacaaagcatttccttgttttcagtggtattagatcttgtttccacatgtctgtctcattcttcactgggccttacaggttagttttaattaactctatggtatttttcttattcttgtttgatcatgttaaaaattggacctaataaaagtattttattcttgcttttccatgcttctctacaggtccaaatactgaatgtctcctttactttttctcttttaaatttttttctagacagggtctcactctgtcacctaggctacagtgcagtggtgtgatcacagctcactgcagcctcgacttcccaggctcaagtgatcctcccagctctcagcctccaaagtagctggcactacaagtgtacacccccacacaaggctaagttttgtattttttgtagagacagggtttcaacatattatccaggctggtgtcgaaytcctgggctccagggatccacagtcccccttggcctcccaaagtgttgggattacatgcatgagccactgtgctgggcttcatttacattttaactgtctgttccttgcctagattcacagaaatccaaagctgtatgtagtcaacatggttcacaagtgttggaaaatgtgttttttgttttgttttgttttgtttcgttttgttttgagacagagtttccctctgtcgcccaggctagagtgcaatggcgtgatctcggctcactgcaacctccacctcccagattcaagcaactctctgcctcagcctcccgagtagctgggattacaagcacccaccactacactcagctaattttttgtatttttagtagagccggggtttcaccatcttggccaggctgatcttgaactcctgagctcatgatccacccgcctcagcctcccaaagtgctgggattacaggccccttgttcagccactgcacctggccccttattttgtttttgttttctaatatactttgatgtaatcagcttgagaaagcaacacaatttcaaatcctatcttctagatgcaagcagtgttaaatttgttaataaatttgcttttcacacctttctttaaataaaaggtatatctctctttcttgtggtttcttccttctttacatgagaagaaaatgacctccttaattgtagtttactcattcaaaaatcgcaggttcagttttcagggtatgaattatctattaaaatctcagtagaaatggtgcatagagctaccaggaaaaaaaagacaacaaagcactgctcaagtccttcctttaaatataaaacatattaacatattcctaaatgtaaaatctatatttgccatgttttaaaaaataaacccatatatatttgaaaattcttcaaatcagaatatgtacagagagtatacaaatactgatatctagaattagatgcatagaccaaggagtaaatcaaattttcttcaaaaatctagcttttttagttaaatattttaataattttagtgataggaacttttttgttgttgttgaaacagggtcttgctccatcacccaggctggaatgcagtggtgggatcacaggttactggagcctccacctcccaggctcaagtgatcctcctgcctctcagcctcccaagtagctggaaccagaggtgtgtgccaccacaactgcctaattttttttttcttttttaaggtagagacagtgtctctacatgttgcccaggctgatctcaaactcaggcaatcctcccacctcgacttccccaagtgctaggattacagccacaacgcccggccaaaaggaacttttaagcatacagtaaaatagtggctcatagaaccaggaagaaagccaagtgcctagcctcacatctatgcaggaggcccagcccacaccagggtcctgttagtacttgaagtgccccctggagggctccagtgcagacccatcagctggagccaaagcagccactgaccaagtgtggcccctggtctggaaagcatcttccctgccttgctcaggatgctgtccttcacgggggggtggggggttggacccagagacacctctattgtacattttaacttgtggtttctggtgatgggtttaaggcttagggctcccttaaaggtcgggaggaaaagacactgatgggaaagggatagcttaaagaaaggcaccaaggtgattctcagactatccccttcccaccccacctctacatgatatgggtagggcccttaatgtgccacaaggctgcaggctgaagttaaattccctttctctggatataaacagacgattccaatccttccaaccccttcctcagccacccaagagtccaaccattatgtgaatacagaagagaggaacttccctaatcccttgaggcaagtagaaagtgcacctagcatggataaggatatatacattgtgatttgaagaatttgccttgaagtttcatagcttttcagtggctgagctgggatctgactgcttcatcatgcctcagggaactgggctgcaatggaaaacatgaacctttgaaaaacatcttacaaaatgaggcccaaaagttcagatactatacatggaacacagaaaacagtgaggcaaagactaatttcttgggcagggtgcagtggctcacacctgtactcccagcattttgggaggccaaggcaggtgaatcacttgaggtcaggcatttgagaccagcctgaccaacatggtaaaaccccgtctccactaaaaacacaaaaattagccaggtgtggtgacacaggcctgtagtcccagctactcgggaggctgaggtgggaggattgcttgagcctgagaggcggaggttgcagtaagtcaagattggaccactacagtccagcccgggccacacagcaagactccgtctcaaaaaataaaaaaaattaatttcttgttctaagtaactgaagctgaggctcctcaccatcccttctccaccctcctcctgaacatttcatcagtccctcaaattccctcctctatctgctgcagttggtgtcagaacattatattccaattaaactctagacagaattcttggtggtctgcagccagtcctgcctgtactcagggtctctagccttctgctcccatccattgctctcaagggttcgcaggtcctctatcagcctatctgtgggcagaatttgttagtcctctaatgagattttgcagttgcagaattgtgtttctctatgggatacaaatgcagcagctgcaattctcaggacatttggagaacatttcagaagaaaggcagtcgtttcggttgttcagatgctttaggaaagaggaacactgactaagggctggcggagatactgaatttgagtttggcccaaaagctaagtattattgaacattgacagaattccgttaagtacctggagagccctccaccccctccacagcatggtaacagtgtaataggtcattgggaggctaaaagaaatatttgtaggcctggctcacgcctgtactaccagcactttgggasgctgaggcgggaagatcacttgaggtcaggaatttgagaccagcctggccaacatggcaaaaccccgtttctactaaaaatacaaaaattagccaggcctggtggcacatgcctgtagtccaagctactcaggaggttaagtcaggagaaccrcttgaacccggggagggtggaggttgcagtgagccgagatcacagcattgcactccagcctgggcgacagagcaagactccaactcaaaaacaacaacaacaacaaaactgtagagtgaagaaagtcttggtgataatcagatctgaggggcttcattaatagtaatttttgagtctaccacttaaaaatgcattaataatgtcttagatctcacagacaagacacaggaaagatgcaattacagtttcactctgttttgtcttagttactctcaggagcggacaaaattctccctgttgtatgattcattttattcattttgagtcattttgtcttcacctcagcaaatggaaacactagtacttatatatactgaataagaattgctgggcaatatatgtggcattatcagagggcatcattttcagtgatttcatcccttatgtctcacaatagctgagcccaagagttttgatgtcatcttggatgactgcataatcataagatgtgtaagttttatatatacacaaacataggatatggaaaytataataatgcccaaactactttccctaagtaatccctctctctggcatcttcattattccatctggccttccatagtggcttttccactgactccccctttctcctcagtcattcgtgctgcagttttcagcttccaccacttgctgaacgtttggtcagtaattgaaatccaactcatcacagccctactcaacatcaatgacatctggctccttatgtaagggaggccaggttagagttatctttggaatgaaagcagaataaggaaagaagatgcacatacagaccattgtgaatatcaatatattagaaaggaattgtccccagagaattaccattctaactagatctacaaacgccattccaaagctaggcttactgacaaaatataaacgtacatcagtagctctattgcagtagcagactgctgtactcccagcactttgggaggctaaggcaggcagatcacttgaggtcaggaatttgagaccagcctggccaacatgacgaaaccccgtttttactaaaaatacaaaaattagccaggcatggtggcacatgcctgtaatccctgagactggcggtacttgctagtgggacagatttcttattgatggtcagacagcagcaccagattcgctgacactgagtcaagctcttcagtggtgaatgtcattattaccgttatcttttaaacaaatcgaaattctagattttaaataatttatacattttctgattctacttttggaggttttaaaaaattaaagcatctatttagctgctcagttgttaatgctgagatgtacatttcattgtgtaagatgctcactgtttcacattttggatttatttcaacttgggttttaaacaattttgtttttcatatagatgtaagagtggataccaatatatttcaggttatttctacaacaccaggaatttttaaaaattaaaagattattctgaaaataaaaaacttagaactcagatttaatatcttcatgattcaatttttaaaaattcagtaatatatttattaagatcagcttggatgggtgggtgaccaggaatcccagctcccagtgtccagatcatttatttgtacacaaggattcaccatggttgtacaatgacagttgtatatgctgattaaattcttcagagcctcaaatgcttttcagaaagtagatcataagaaagttctgcaggattcagatatgcaaataaataagcaaacataaattatgtcatagggaattaacacttcacagtttaactgtgtcttatactggatgtaactccatgaaacacgaggattattttagctatagaatttaatatgagtccttaacagtgactttaatccatggatatctttcttcagaataatagacatttgcacatcctcccaaaattttgcataacgcatgaaaggactatagatgctctaaaatccactgagcaacctagaggtctatagactccaggttagacacctccattgcataagctgaggaagaaatgacaggttagacagcaataaatggaaaagaattttaatttgaaaaatgaaatatatgtacacacgtacctttcccatatcttaaaaggacatcctgttgtgctgagcaagtagcttcaggatggaggcaacattttaggtggagaagggctccctacctgcccaatcaatcatgtcaatcacagagatggtgaagagaccaaggtcacaagtagtttgcttacataacaaattgaaattataatccaaagcatccatattctacttcttaaaaatattaatgttcctatccattaaatgcattactcaatgctattggtttttgcaagaacagtaggtgaaaatttgtgggttgtttttaaaaaaaataattgtgcggagattatgttgtaggaaaataaaaaataaaataaaag

SEQ ID NO: 95809 - DNA, 21997 bp, Homo sapiens
accctcacccctacaaaagaaaagaaaaatgggcaaaggatataaatagggaattttcagcagaagaaactcaaatggccagtaagccaattgagaaatgtaaataaaaataatcgtatgatttgaaatacatcaactatacaaaaataaaatatgtcaatgtttttcatgaggtcagatgttagtgaggaatgtaaataaaaataatcgtatgatttgaaatacatcagctatacaaaaaatatgtcaatgtttttcatgaggtcagatgttagtgaggacgtggggaaacgggagcctttacatgctattcacaccttgggaggcaatttggcaatatctcataaagttgaaaatgcacacaccttacaacccagatattccactactagacgatatcttataggcccacatctccatggaatacctttcatcttgtagttaatgtgcaaggtgacaaccttcctaaagaaatttttacaccactacataggtcatatgtataaggatgttgtttgcaatgttcttgataacagcagaaaatactagaaacaatctaaatgtccactagtagggtgatagatgaataaaatgggatatattccttttttctttctttttgagacggagttttgctcttgtcacccaggctggagtgcaatggtacgatcttggctcactgcaacctccacattcctgggttcaagtgattctcctgcctcagcctcccgagtagctaggattacagggacccaccaccatgcccagctaatttttgtatttctagtagagacggttttgccatgttggccaggctggtctcgaactcctgacctcaggcaatccactggcctcagcctcccaaagtgctgggattacaggtgtgagccaccacacccggccaagatattctaataataaaataccatacagtgataagaatgatccagatttatatcagtatgtacatatccccaaaacctattgagtgaataaaagaaagttgtagaatgagaaatgttttttaaaggttaccatttgtgttaattataaacacatataaaagtatatttcatattattttgtatgtataggtagtaagagtttaaaaacacagactcaaaagatatgcaccatagccaatcctcgtgagtatagtggtgagtatccctgcgtgtcaaaacatatgcactaaatttatgatactagttggggagagagtgaaggaagtggggagagaaaagggaacttaactacttcaagtttatttagaatgtttttgttttatttaaacaacacaatggaagcaaatagatcaaaatatccttacctggatttaagatttttttccccaatgaaaaacacacaggccataacaataatatgatagaggaagtttagcattctttttgaatgcataatagtaggatctaaacaagtctaataggagtcagtaaagacttccaggaggaaatgagagttagcttggtaaggaggatgggaagagcattccaggcagaaagaagagcattaggcgaagttggaagtcagagaaagcaaagcatgacacggatcagtaactaggaaagagtggagtagaggggagagacgaggtttccaaacctgtttggtcttgtttcctttttcacagatgtggaaacatagccctaatgaagggagtagagacaagggttcctactctgtcaactgttccatgataatagtaatgccaatggtaataataataataatgtactgtgttccagtctttctactaggtatttgaaacatgtcctctcatttattcttactacagacctacagagggttttttttcctccctatttcatagatgatgaaactgaggcccagagaaatttaaaaacttgctcaaagtcagtggcagaaaccacatcccacaaggcctccttgtgtgccatgctaagcaggttggacattttcctaaaggtgttggtgagtgtatgaatttcctgttgctgcttgtaatcacaacaaacaaagtgacttaaaacaacacaaatgtagtatcttagagttcttgaggtcagagatgtgaaatgggtctcactgggctaaaatgaaggtgtcggcagggttgagtttctttcgtaaactctaggataatctgtttccttgccttttccacttgcatcccttggctgtgggcccccttcgatctgcaaacccagcaattacaccactccgacttctgcttccgtcatctcatcccctctgattcctactctcctgcctccctctttcactaataatgacacttgtgattatgttgggcccctctgaataatccatcataatctccccatctcaagatcagctggctgggcgcggtggctcacgcctgtaatcccagcattttggggggccaaggtgggtggatcacttgaggtcaggagttcaggaccagcctggccaacacggtgaaaccccttctctactaaaaatacaaaaattagccaggcatgggtgggcacctgtagtcccagctgctcttgaggctgaggcaggagaatagcttgaacctgggaagcagaggttgcactgagccgagattgcaccattgcactccagcctgggcgacagagtgagactttgtctcaaaaaaaaaaaaaaaaaaaagatcagctaattagcaactttaattccatctgcagccttaattctaccctttgccatgtaatataacattcacagttacaaggaaatagagtgtaaacacctttggggggaccattattttgtctaccacagtaatccactaaagggctttaagcaagggaatgacagggtgagacccacattttagcatcttcctattattggttttgtaaaatggtcatttcatgatttaagacagattgggctttgtaataactaatacttccaaaggctgaacagtacatagatattaaatatgttaggtctaataacacatatgggcttttaacttgaaagaattctttcctacatgtaatttgtatctttccccttagcactcagtgggaacacaaaggactgttacaattgcccctctatgggtaaattaagggacattggctcacccgcctaggatcgcagagctgctaaggccagggccatggtaaggagctagtcttcaggctcgtttatcagtgttttctttctctttctttctttctttctttctttctttctttctttctttctttctttctttctttctttcttccttccttccttccttccttccttcctttctttctttttctttctttctttctctttctttctttctttcttccttccttcctttttctttctttctttctttctttctttctttctttctttctttctttctctctctctctttctttctttcttttgtctttttttttgacagggtctcactctgtcatccaagctgaagtacagtgatgtgatcacaggtcactgcagcctcaacctcaagcaatcctcccaccttggcctccaagtagctgggactacaggttcgtgccaccacacccggctaattttttgttttagtttgtttgtttgtagagacgaaatttcgccatgttgcccaggctggtctccaactcctgggctcaagcgatgttcccgcttcagcctcccaaagtgctgggattacaggcatgagccaccacgcccagcatcagcatttctttacagcatccatgggtcgggcatttggggaaacttaagtcagcacatctttggcacaatttcctacatatagctcagtgcccaataaacgtgttgaattggtgaacacccctgctttcatttctgtgacacagatagtgactttcaaggcaggaagcctgggggccatcctaaaattccttccttccccccacatccagtcaatctgcaagtcctttcagctgccctgtgaaaatattcatatatgctgagtccatccccttctttccagcttctcgggtcccactctatcccaggtcactgtcacctcttacctgagctgctgcagtggcccccataaaggaaagggtcagtgaggggtcgaagtatttgacttaaataaatcagatgacctggcctcccaggttaaattttcctgttggatttttatccgacagaagagaaggaaaactttaactcccaatcatggccatatgtgctcctgcatgctccggccctgaaccgtcctcttaacacctcctgtagctccctctactccagtcccactggctttttacagaggccaagctattcccatcatagggcttttgcccatgctgttccttctgctggaaatactctctccactctttttctttttcgtgtgtgttattttttatttttttgagacaaggtctcgctctgtcacccaggcttgagtgcagtggtgcgctcatggctcactgcagcctccaccgcctgggctcaagtgatcctcctccgcctgggctcaagtggtcctcccacttcagcttcctgagtagcttggactacaggtcccggctaattttttttttttttttgtaaaagcagggtctccctatgtttcccaggctggtctcaaactcctgggctcacacagtcctcctgccttggcctcccaaagttctgggattacagacctgagccatcatacccagccaaatttattttagagatggggttttagtatattgcttaagctggtctcaaactcctgggctcaattgatcctcccacctcagcatccccatgtgttgggattacaggcatgagccactgcgcctggctttccactctttaaacagctgggtccttcttatatatcacctctcagctcaaatgccacttattcagagaggttctccctgtctgctttgtttccttcatagaaaactgggaccatttgtaaataatttatttgtttgcctatcttgtttgccttccctcctagatctgagatgtctaatatgtagctactagctgcatatggctagtaagcatttggaatgtgacttgtctgaattgagatgtgctgtaaatgtaaaagacaccagattttgaatagttaatacaatttaaaaaggatataaaatatctcatttatagttttaaaatactgactatatgttgaaatgatattttggatatattgagttaaataaaaatattatcaacaattaacttgtttctactttttaaatgtggctgcacatgtggctggcattatatttcatttggacaatgctggtctataccattagctaatgaaggtaggaacaatctctacccactgctgtgtccctagtctctatcatatactagatgctcagtaagtatttactgaataatttggtatttatgagaactctgggcttttatgagagctgagacgggcagccccatgtatgctatgaacttgagggaggaagaaacagttttatttttctccaatcactgtatttcaaagggctctgtggattctctctgtcctgctctctatccacaatccccagtcacctactactatagattgaggggtgggggtgatggctgaaggaacaaagctggtgcagctgcttctatttcagtcctataggaagtgtcttgattattttacattctccagctttggtcctagaagccaggaagggctcacctcaacatcctcagaaacacagatagggttagctgggggtcacggggactttcccagggtcatctagcaggtcagaggtgaacagggcctcaaaccttggtctccagaccccttccaggaccctgacctctagctattaatacatcctgatgtagtctccttcagactggaaccctccctcaaacccctctcccaacattcacctgtaatttcttggggcacctaatggcagttgtgcctggtcccagcagagcttccctggatggcaccatccctcctaggggccgaaatggatggaaggaaggagtgagaggatggatgaatggatgggaagatggacgagtgaatgagtgaacaggagggtgggagaatggatgggaaaggaggaaggctggttggtagggtgtctctgcacgggtggagaggatgtatcggaaggaattacccacttatcccgttccaagcagactctgaagagcagagagccctcggcgatcaaagtccagccccgtcacgtttctgctagaagccgaggcgggagaagttgggtgctttcccccggggcccgcagggacgtccaggcagagccggaagggggacgggagtttgtgggccggccggggggctctaggcgacatccccccatccgcccgcgcctgccggtgccagggtggggtaaggcccccgcccccacctccggaggtggcggccccacgcggccccaacaaactgccgttgtcccgcgggccgtgggcccggcacactggggctttgtccggccccccgccgcgacccgaggcgggggccccacatgaccgaaggggtaggaggagcctgcggcggcggcggtggcagcggcggctccaccaccatttccctcccgggccgggggtcggcgggcggtggcggtggctgggcagggctgggcagggccgcggacgccaggccccccgttccccgccaggctgcaggcgtcgggcctgggccgtcagggcagctgtgaccggatcgcttcccgggcggcgagctgggggtgcacccggaccgccgcccccgggatcatgggcaatggcatgaccaaggtagggggcgggccccgcgcagcctccccggtccccgccccggccgccgcggcccggcgctgaccagctcggtccgcccgcctctgaccttctgttctcgccggtctccgtgcggcggcatctccgtgtccctgtgactcgagaccgcggctgtcgggtctccccctctctgaccctgcgtctctgtccccgctgtgtccgccctctctccgtgactctgtgtgtctctcgctgtcttgctgtggctgtcactcccaggctgtctcccagtgagtcctgctctccgtctgcatgtgtccctctcccttgtcgctgactcctcggctctctccggggctgtttctccatcctgtcccgcctctgcctgtcattgcctttctrcctccccagccccagaatttccatccctgcaccctgcaagtctacctctctcctctcctctcctcctaagacctgccttcctcctctcccctctcatacccaagctggcctcccttggttccctcggttggttaactggccccctagcctaccctccccagagccccagacccctctcacagaggactcagggcccacaaaagggaagagagtgctccctgagccctgaggtccatacccttcatgggacagagaggggctgtgggccccccagctgccctgggggtggaagggggtgcagcccctgccccactgacccttgcctgtccttcctctaggtacttcctggactctacctcggaaacttcattggtgagcactgcccactctgtcccgaggccatggcactctgcctgtctcaggcctgtgtccaccattcatgccctggcccatgcatctcaggaatggggttgggggcagggaagcggccccaggctgggagggggaaaaggctgatggaggacaaggggtgcacatgcaggcgagtgtccccaggcttgaagggacatggagggagcatgggggcctgacactgacatccctccccgccattcagccttccccagtgttctaccaccagaccaaagggccagagcaaagggctcggggcctgggctgtggacctgagcaagtctacacctgcgctaagcctcagcctcctcctcagcacaaaaggtccaccagctgctgagcactcttctggccctgaggttctgggttgaggtctgtttgcgggtgctgcttctagcggggaagctgggaactcttccccccataacttcctccttgtcagaggagaggtccctggagatgggctgggccttcttgtgagcagggtcatgagcaccaacactgtcgcaccccagagccctggagcagctgggcagcctagagctggaagttgggggggcggtgagccggcaagctttgcattccccactctctcatccattccttccacaatcttcagtcaggaggaggggacacccatgtatagataccttgttcttcaggggcttccaggctggtggcaggcaggcagagctgaacatagaccttgggtagaaaacatgctgggtagaaaccatgctaagggggctgggcgcagtggctcacgcctttaatcccagcactttgggaggcggaggcgggcagaccacctgaggtcaggagttcgagaccagcctggccaacatagtgaaaccccgtctctactaaaaatacaaaaatcagccaggcacgatggcaggcrcctgtaatcccagctacttgggaggctgaggcaggagaatcacttgaacccgggaggcgggggttgcagtcagccgagatcgtgccactgcactccagtctgggcaacagagcgagactctgtctcaaaaaaaaaaaaaaaaaaaagagaaagaaaaaagaaaagaaaacatgctaaggggcagactgatccagggcttgggtgactcaaagtgggaaaatcatttccatctgcagagtcagaaaaagctttagasagggaggggctcaggtgcttcacccttgtaaatcctggtcccttccttcctgggagctccctcagccgctcatgccaccttgatttctgtgagtatttggccaagtaaggtctgaaccctctgtaagtgtgcaggccccataagggcaggagccacgaagctggccccagacctccagtgcccagccaaagtatacacatggttagcactcggtaaatgctcatcgaatgaggaagtggagatagaggggacatgtgttattcattctgaatataaaagatctgcatatgctgggtatgcagcccctagagagggccactgttgggtacatccttgttcatatatctttgtagataaggacatagtatttaaaacaaaagtggaagcttattctgtatccttaaaaatacattgtgggcatcagccgggcacgatggctcacgcctgtaatcccagcactttgggaggccaaggcgggcggatcacgaggtcaggagatcgagaccatcctggctaacacggtgaaaccccgtctctactaaaaatgcaaaaaaattagccgggtgtggtggcgggagcctgtagtcccagctactccggaggctgaggcaggagaatggcgtgaacccgggaggcagagcttgtggtcagccgagatcrcgccactggactccagcctgggagagagagcaagactccgtctcaaaaaaaaaaaaaaaaaaaaaaaaaaaaaacattgtgggcatcattgcacatcagcatatagaactctttttaatggcggcacactgtgccaaagtatgcctacaccattaatcatccagtccctttttaatgaacaccaggttgttcccatgtttaaactatttgtgatataagcaggactgcagagaacatcatcctccacacacagctttctgtgtgagcaagcgcttctgtagacaagattcctagaagcagaattgctgggtcaaagaatatgcctgggaagggtgttttggatggaaagaacagaatgagcaaggatggggatatgctgtactgttacttgcatgtgccccagaagcaagaggatcagggagccggcagagcgtgggccaaggtggagtggtggggtgagagggagagctgggcaggcagtgagctccctccgcacttggccatcaggacatcccgccagccagattggctcaagcatcctgtttctttcagatgccaaagacctggatcagctgggccgaaataagatcacacacatcatctctatccatgagtcaccccagcctctgctgcaggtacttcttacccccatcccagggctatgcgggggtgggagggtgcagacctgtttatcaaatatctactatgtgctaggtgctatgcttccttcttgactcatgttaactcatttggtctccaccactggrccattttacattatcatccctatttggcagttgaggcccagagaggtcaattaactcacctgaggtcacacatccaggaagctgaggagttggggtatgaacacaggccatctagcaccagaagtctcacactgaaccttaaaatggcccccatatgggcttcccatgacccaactggatggatgaatccaaatggatgactgtgggctctgtatcttgctatgcaaccttgggctgtgacttcacctctctagggctttgatccctcagctctgtctgcccccagaaggctgctgtgaggatgcaaagggactgcaggatggtgaagatgctttgcacactgtaaagcatggtcccctctagggcggttggtgctggtattatcaagtcctgggaaaggggcatgagggtgttaggacccagcagaggaaagtaataaatccagactacacgtgcttatgtcaggaacatcttcactgtttatttgctctatgaccttggggacaggactttgccccctctgagcctcagttgcctgatctgtaaaacgggaactttataacagtacccacttcactgagtggttgggaaccacataaatagatgctcaacaaatcacaactgatactataacaaatttaatcatattcttatcccataaacagagcctcttcacccttatctattagagtctgtatcatccactggagagaaagaaccatgggtgggaaaaggtcctggagatctgaaatgaagacccggttctgccatagacttgctgtgtgatcttggccaaggtccttcccttctctaggcctcagttttcccatatgtcagatttgatattctctaacagcaacctctaataatctatgattttcaatgtcattcagagaagaaatttccaggccattgcagtcttattttgcctcatagggcagcctcgtttgggagtatttggagtaaacagtcactagagtgcatggggaaggttgtcaagtcatgagtgtatttactaatgaaatgacagcctacacaatgagtctctgctcctacggcccttcctgcttctcccaagcatctctccttcccccctccatcagcaaatttaccaggcagggtttgatagtaccacacaaacccaaggccaaatgtgttgcaaagtgaaattgcaaaccttgccaaagatgcaggatgtcatgaccttggggaatgtgagtgagagaagggctggaatctcacacaaagccatggacaaatgagaacctggctggtggtcccttagttactgccagtgacgggcctggcccctgaaaagakccatttgaatataaaaatgttaagacagtttctcgagaaaagcaaggaggtcctcaggaggcgggcaaaaataatcttcatgatattgtgtggctaatcaggaaacaaaggacatcacagcaagtttgctggaaaaaattcctgacaatttattccttgattattctcataatcagcacatcattttataaccatgattcctgaaatgtatacttgttttcatgatttttgtttcttttcaagataatcaaatctgctctaccttttttacgatgtaattttgtaattcccatttggagtggagtccctttaagtagccctttcctagctacttgataaaggttcctgggtccctgttgggagggataggtgacgtcatgcccacgcygctgatggggttaggagacaccatgtgcttagaaggttcaggaatcacaagtggtcacagctgggaggcctcagagatgacaactactttctttggacagagaggaccacagtgggccagagaagggcaggaactgggctggggttatgccctgcctgggcagctcggaccagcatcagggagggttgcaggcaaggtcccctgcctgagtgtattttgtacttgcaggatatcacctaccttcgcatcccrgtcgctgatacccctgaggtacccatgtaagttcccctggatggacccatagatggacagacagctgccttcygtggtgggggagggggagggggtttgaaggaggacaaagtactcaggccagagagctatcacaggtgttcaactcaaccagtcccaggtttgactctgtctcaaccatgcccttgtgataggcccttggccaagactctccacctcyccgagcctcagtctcatcagctatgaaatgggaaaaggacactctgtaccttgggaccagctacaccagctgatttgaaagggtcatattcagcctgttcctggccttggggttaagacatctgagttccggccaggctctgccatttacttgctgtgtgaccttgaacaaatcacttccccgctctgggcctcacctgtaaatcaggagtgcatgatcagagtcaaggaggctttcgaagatcagatgacacaggtcaaggatctaggatagggcctggagtataactgagctcagaaaacgggatttttgtttgtggcatcagcagtagtgcctccccgcttgggatggagccaagcagacagtgctgccccttgggaatcttgctcccagcctgctgctgcccatcattgtgcccaggtgctctgattgcagaccccagaggagtgggacccctgtgtttcctcccwcccatttctctgaaaggccacaataaacccaacatgaaaacagggtccacaggaggagtgctcctgcctagatggtgagatttgtcctgactggtctctctcactgcctgaaatgccaccattcttgcttcacacaaacacacctccagctcatactaagtactggcccatattcactgcatgtgctggctgacctggggaccccagggctctatgtcccttgctatcctgtaattggggtgggggcggaacaactcctgagaggtctgccctgcagtgctccctaccctattgctttctcctctagcaaaaagcacttcaaagaatgtatcaacttcatccactgctgccgccttaatggggggaactgccttgtgcactggtgagttaagcggagggggataaggtgggggaggaaggaagtggctgtgccctctgctgaacacacactccccctgtgggaaggttggacctgtgagggatcttctccagcctgtcacagtgcctgagggcccaccattcactggagagaggccaacccgggactctattccttatgagctgtgtggccatagccaagtagctgtttctctctgagactcaatgtcctcatctgtaaaatgcggaaaagaaagctgacctgatgggactgttgggagggataggtgaggtcatggaggtagctcatcaccctccagtagttctgggcctccctcctcccctccaggccttggaggtgatggtgcagggcagtggggaaccccgagctgggagacaggaattctgggtcttcccaggtgcccctcgctcagttgatgtcattcattccttaacttctcactgaaggcccatcctatccaggctcaagctggctctgctggaggcccagcaaggaggccggtttcccaagcctcatttcccaccctctccctccttcccctttccagctgtactaacctcctccccatcctccaaatctacgaggcttatgcctcatggtctttgtacacactgcccagaaggttcctgactaacccttattcatctttcaaatttcattgatatctattccttgggaaccccttccctaaccccaccccacctatagattaatacctcttcctatgtggatctcctagcccccagactcatcctcaaagctattatcaccacctggaattgattatctgatcaacgtctgtcccccscccagccatactgtaagctccaggacagcaaagaccatgcctgttttatacccgctacatccccagtgcctgaaaaagaacagatgctcaggacatatttattgactgaatgaatggtgtttcactcaggcttttgatgtgggagaacccaggggatgctctagacagagggaacagcatggcaaaggcctggaggtgggatggcaagtcctgacaggtcccttatggttggagctcaggaggcaagggtgggggagttgaagcagggtggggtgcctgggggcatggaggacattggatcttacttgaagcctgaggggttgttggggatcccagctttgcaggcatctctcgcagcaccacgattgtgacagcgtatgtgatgactgtgacggggctaggctggcgggacgtgcttgaagccatcaaggccaccaggcccatcgccaaccccaacccaggctttaggcagcagcttgaagagtttggctgggccagttcccagaaggtagggatggggtcaagggctgggttgggccaggggtgggagatccttcttcccactcgaactgatcactgattggaacatttttagcctgtgcctcagacccggatttttctagggtctcaaactcatggcctttgagctaatccacctcctaggtgtattttgttagacagccaggtgttttctttttcaatttagaatttgaatgcctttagatcagtgcgggcccttccatttgaccaggtcttccagccctccccactgcctgccctacctggctggaacctgaaggatttgagtgtttgaccccatcggggagaattgtccatgtcctactccatccctgtgtccttgatgagaccacagcagtttccctcttatacctctcgggcagatgctacgtagaaatgtcaggaactaagcctccctgggaacaaaggatgagagggggagggctctcagcaggttgagggcggtacccagaggctcatctgcagcacggcgttgggaaagagtcgggcaaggaagaaatctgtgggaatggggttgtgagcacagaggtgcaaagtgggaggagttacccagaagtgcaaascgggaggagtgatccccgctgggcgcctgggggtcactttagcaggtctggaagctggcgtgtcaaagggggaagaggggtcagggagagggaggggcctcctagaagggaagagggactcagtgaggggatggaaaccccggagaagggaggcaaagaagacgctcaggaagggaggggctcagcgaggtgtgggacgctcggagaagggcgaaggtcgggagggtgggggcggggccggctgccttgaccccgccccgcgccggccttgaccccgcccacctcacccgcccaccccagcttcgccggcagctggaggagcgcttcggcgagagccccttccgcgacgaggaggagttgcgcgcgctgctgccgctgtgcaagcgctgccggcagggctccgcgacctcggcctcctccgccgggccgcactcagcagcctccgagggaaccstgcagcgcctggtgccgcgcacgccccgggaagcccaccggccgctgccgctgctggcgcgcgtcaagcagactttctcttgcctcccccggtgtctgtcccgcaagggcggcaagtgaggatgcagtccagccgtggctcccyacttccgactggctcccttcgggggctgtctgcgccttccacgccccccaggacgggcccagaggctgggggagccccgcggcggcctgaaccctgcctcccgcgcccgccctgctcgtccgcgtctgcagtcagcgtccccaacctgtgcgtctctgtgtccgggccggcctgctgcagccacctggtgccttagtccttgggctgggggagggggcccacccttaaaggcggcgggaggggagggagggagagtggagggtttgacgggcctggagggtattaaagagacacagaagaagctgcctgtccgagtgcctcccagtcattcaacaaaggcggggcagcaggattctgccaggagccagcaggactgccaggggccagcagcctgcagaaaaggggatgcgagggagcctgcatcccctgggggcctgaggagcccaccaccctcccgcaactgcagtctgcggagttgcctcctgggaccccacctccttctctaacatctcccctcccccaaagccacggtgtcccgcctgacaaggcccaagtccctccttctctcggaacccccttccaccttttgaacccctctcctccaccatgaggggcycctcccctccccgactcccttcccttccctgtgcacaaatagtagctaggaaggtgaggtagcgcctccctcatcctgaccttttactgcatgagttcacttaatcctcagggaggaaacagaggctcagagagatcaggcagcttgccggagcacacacagccagagcagggaaagctggacgctagcttagtcagtctgagtcccatgacggtaggtagttaggaagcagctcctctggtttgggaggttcctgacaaggaggctccacccccagctagtgggaatgacccttcctgccaagactttaaaggccagggctgcccatcaaagcggtagctggctctgaggatgagtagaagtcactgcagctgatacttccaaaactaaagttaacccaaagttgagagggatcgaaaatagctataacccaataagccactcgtatggggttcttaatatgcacaaatcactgtgctcagggctgtcggggaggcaccgattccagcactggagttggaggatggacaaaataaccttcagctgccaccccaacttcctactcctcattcattcaacaaatgtccattgagtacctactgtgtgccagccattgtgctcggccctgggtatacagcaatgagcaaaacctctgccttcatgttgctgacattctggtcgggaagacagcaaataaaaaatatgtcaggtggtgagggagtggaccgtttggttatctgggggaagcattccaggcagacagaacattaaggccatgagttagtaacctccttgccagtaacctccaaaaacagaaggagctgcttcctaactacctaccatcatgagttagggtctttcccttcacagttcatgtgaagagcaaagtggctggactcaccagagtgcagggagcccgcagtcctccaggctggttaatggtgctgccagacgccccatttaaaacaccttctacctctgatggtgtcttcccctatttaaaagcctccatggaggcggaggctgtagtgagccaagattgcgctactgcactccagcctgggtgacagagcgagaccctgtttgaaaaaagaaaaataaaaaaagcctccatggcccccatcatctataggactgatctgatattccagatcaatccttcaagatgcttcaagagccaggtggctactggaatatgggagctagaggaaaggaggagcaggaagaaagccctcccagcaggtacacatcaggaacaatgcttccagtctctggtcaatgctggctgggtgcccagctttgtgccagtgctgtgcaaaggtgcagggagtggggggcattctctctcagagcctcagttccatgaatacagcaaggagtggagcaatctgagcaacttgatctttttcatatcccacatctcctttgacaatttaatgaaagatgcaaatcccccccccccaaaaaaatgcatagacatgaaatttacattcacttttagggggtcagagacccccaccaagaatccacaaagtacaggtgtagctgtcggcaggcagtgtggggcactgcttaggctcccgggctctagggagcagagagacacattttggctcctggctccaccacccactagctctgtgaccttgttagagggctttaacctctctgagctcagtcttaacattaaaacagggcttttaccaacctcataagctgttgtgagaaccaattgagacactgcaggaaagtgtttagccaggcccagcactgatgagcagtcggtaagtgggaactcctaatatttacagaaataagtgtgacccctggactacctgcatcagaacctcacgggggaactcattacaatgtgggtttcctgggcttcctgcccagaaagtctgattctgcagatctgggatggaggtcatgagtatgcatttgaaacgagttgctgcctctcagttctggcaggagttagtttgagaatccgtgtgcctttccaatctcaacagtccaggtcctgaaaagagactgacaaatttccaggtgggctgggaagagcaggtgacagttgcagactggggcaaagctgtgtctctggatgctcatgggggccggcctcctgagacccgcagagcccaggctaccccacttgcgtgggtcttgtgtctcacagcgcctcctgccaccccataaaagaggatcaatgccctccaggctaggctgctatggggaggtgcaaaaggaaagggcctcccaagagaggggacaaaacagaaagtgagacctgcctgcccagactttcactttcatagcctcccagcatcatccaggtggcccgtagtccccaggcccacgtgggttgagccactgcaagcccaagacctggcccctgcatccctgatggccagaaggaaggaaaggtccccgatggcaggtgacccatggcagagccagaggttccctgtgcctctgggacttggggggcacagattgagagtgggtgctacgtggggttatgctgggaggatgcgggcaagaccctctttcgcatcccctggaagcatgtagccaagcagggctaccaggtgcaacaggactcagcactcttcagggcaaggggacaggggactggagacgctcagcactgggcaggctctggacacaagttgccccagcactgagactgacggatagccttgtgaccctgggccactttctggcctctagggctgagggtaatgttctctacatatgagggactctcagacactttcttaaaacaatcagccaaggctgccacgacctgcaccaccggcccctctcagagggcctcttctcccactccaccaatgcactaatgggaattctgtcagcctcccacccctaaacccatcaacctctgcagctcaggaaactttttggtgctcccaacaccagcccttctcagggacctcctgcaggaatgtccctcctttccccagtcatcattaacttcttccaaactggctcctttcttgagaaagagatggttaagctgaggatggtgggagcatgccaggtaaaggtgaagaggcgaaggtattgcaggcaaagggaactgaatgtgcaaaggtctaatggagataaagacatgaagcatttagagatgaaaagaactaaagtgggggaggagagggagtggaggcagatgaggcccaggaggggcagttcatgcatggctttgaggccatcatgaagagttggaactctttcacaagggcaatggggagctatggtaggggagggtcaaaaccagatttgtggccaggagttgtgcctcaactgtaatcctaccactttgggaggtcaaggcaggaggatcacttgagcccaggagttcgagaccagtctgggcaacatagtgagagcccgtctctataaaaagaaaaaaaaaaaaagaccagatttgcatttagaaagatccccctggaggacctcctggcattgtggagggacagttgccgtcatttcaattctgggctctcttccctgagcaataagcaaccaaccgcacatccacacactaccaccccaaacaccaaagtcacctccagcccctccttctgtggcctccccctccttccacagtgggaagcacctggagagtctccttacaccaactccctccctctcagcctcccagccccccatgaccagtccggcttctgtccctcttgataatgcctctagttgccaaatctaagcatatgtcactgtcttcatcttctttggctcctggatggtgttgggttggtctgcatcttgtaggccctccctcctccttgaaacactcccatttggcttccagaatctctgctgcctgccctgcaacccctcccaggcctttgtttctcaacctccatcctgtcccctcctctactggggctcccagcactcacttctgaacctacttcctcatgtcccactgtccccttccgtggcctcagcatggtggctgtgggtcttcctctgaaccccaagcctgctcatcaagctgcctgctggctactgtctcctggatggcccccgagcacctcaaactcaacacaccccaaacatcacactcatcagctctgccccacaaacttctgccacctgggtatctgaaccctggccactccccaccttccagcttcattctactccattaccaaggcctgctggctctccctgcagaatgtctcttcggtccctctgctgaaacccatttctgtcagctctcacaggacaactgcagtgacctccctgggcttcctgcttcccccatccctcagcaatccccgcagtccttaagagggatctttctaaatgcaaatctagcctcgaccctcccctatcagaatcattccatagctccccattgccattgtgaaggagtctcaattcctcactcactataccctcaaagccatccatgaactgcccctccctggcctcatctgtctccactccctcccctccccaactgtagctcctttcatttctaaatgtttcatgtctttatcaccgttaaacctttgcacatgcgattccctttgcctgcaatgccttctgctcttcacttttacctggtcagctcccaccatcctcagcttaaccatctcttgctcaagagagccttccctgggaggtgaggaataaaagactacaaattgggttcagtgtatactgtttgggtgatgggtgcaccaaaacctcacaaatcaccactaaagaacttactcatgtaaccaaataccacctgttccccaaaacctatggaaataaaaatttttttttaaaaaagagagagcctcccccgatgcattcatttatttaatgcatttattaagctccaactcagtgcttcttccaagtcatcactgactccaaaggtgaaggctcattgaacaactttccctgtgaattttaagtgtctggtgtgagtttgtcttctccagcagaccatgagccgcttgagggtggtgtcatcaagcactgtgcctggcacatagtaggtgctcaataagtgttgaatgggtggttgcatggcctgtcccttaagacctatgcatatacgtgaacaacagcattgttgttcagaggcaagagattctgggggctggcctccccatccttttggctgctctgacccatccctcaatccaccactgtcacacacatgtgactccttggcttcaaacccttctggtgcccaaagctcatggaataaagcttggccttcaaggacattcatgatctagcttcagcttatctcttcctccttaatttctcttgctctttcccccaccacacacagtcgaccctcattattcatagatcctgtcgttgcaaattatcctatttgctatgatttatttgtaatccccaaagcaacacttgtatcagtttcatggccattcatggatgtgcgcagaatggcaaaaaaggtaagttgccccccaaccacccaggaacattcgaagctcaggtcaaacaaggcaattctctgccttcttatttcagctctcatatgtaaacacgtgtcctttttacagtctgtttagtgccacattttttatgtttttgtgcttttttgttggtgattgaaaatggcccccaagcataaagctgaagtgtggtctagtgttcctgagtgcaagaaagctgtcata

SEQ ID NO: 95810 - DNA, 15493 bp, Homo sapiens
ctgggagggtcttttttcctctgagaatgctaagtaaactgtgtgctgtcagcctttgttttgacttcaactcatcacatgaggtcatgtgtggaatttttctcttgtggcatcatgttaatactcaaaaaagttttggattctggaacatttacgattttgaattttcagattaaggatgttcaacctatataaccatttattttgcatgcagttttgtgagtatgaaatttgggaagggctctgctagacagtttgtctgcctggctttctgtcgggtaatgagatctggaacatgcacttcccaggtggtgtctttcctcacagtctctcaaatgctctggagcttttcttgttctatacctagcactggagcccctagggccccttcatgtggcttggacttctcatagcatgggggctctcagaatagttgcacttcgccgaagtgggaagtagatgttaccaggccaaacaagggctgcacctgaaaaagcgcaatgtcactattaccatattctattggtcaaagcagtcacagggcccaggttcaaaggagagtgacaagatcacattgcagaagagcactaggatcaggaggatattgtggctgcttttggaacatacaatctgccacaagctataatttatttatttttttgagacagggtctcgctctgttgcccaggctggagtgcagtggtgcgatctcagctcactgcaacctctgcctcccaggttcaagcaattctcctgccttagcttcccaagtagttgggactacaggcatgcgccaccacccccagctaatttttgtatttttagtagagacaaggttttgctatgttggccaggctggtctcgaactcctgacctcaggtgatccacccgcctcggcctcccaaagtgctgaaattacaggtgtgagccaccgtgcctggccacaacctataatcatatccttataaatgtattacgtagaaataatccaaggaatatataagaacagaaaagttcgtctcaactttagtagggaaaaaatttggaaaaaacctacatgtctcctgatagataaatagctaagtaaattatcacataccaactaacaggaatatgaagctgtagtaattaagatgattatgaaacaatttgaatgaaagttggtataaatggagaaaaagtaaaattaagaagcacatacactgtgatgataattatgtaaaagcctgtatgcatctggacaaagtctggaaggaaatcagtggaaatggagataattgcattgaggtggtaagattatgtaagccttagattttcttctttattgttatagcatcacaaaaaataaaaatgagaagaaaagaagagaattacaattttaatggtcagtgctcaatacttggtaggtacatgtactaagtgcagggaaggcaaaggggacactcattacactctaattcactcagattcagagaaacttccaggccagaggagccacagatatttataattaataacctgttttgaccccttatctttggaatgctgattaacatgaagcaataattactattaatatattagtctttcaatattgctgagactattcataagactgaaaaccctttaaaaagctcccacgacggccgggcgcggtggctcacgcctgtaatcccagcactttgggaggccgaggcgggcggatcacgaggtcaggagatcgagaccacggtgaaaccccgtctctactaaaaatacaaaaaattagccgggcgcagtggcgggcgcctgtagtcccagctactcgggaggctgaggcaggagaacggcgtgaacccggaaggcggagcttgcagtgagcggagatcgcgccacagcactcccgcctgggcgacagaacgagactccgtcccaaaaaaaaaaaaaaaaaaaaaaagctcccacgacacataaacataaggtgatattttaatctttatcataatgaatttatccaatccagggtttctaaaattgtcagtggtaatttggcctgggaatttatcctagaatactctgacgagaactagattaattctggtctcccacttcacagtgttctgtttgccttgggactcattgtaggtaaaaaggatgtggagtctggaatagtctatgcttatgaaaccgcaagcaaaattcctagagtggccctgaattcaacccatcttcctgggactatgacactcatggctatgggtgaaaccaacctttgaacagtcattgcattccagtactcccataacttgctagtcattgcatttttttcaaggcctcttttgaagagttattaaggaaggtaaaagtgcataaaggtcaaagtcttaagaaagtctgattaaataattgcaaaaacaattttttttttttgaggcaaagtcttgctttgttgcccaggctggagtgaagtggcatgatctcggctcactacaacctccgcctcccaggttcaagcgattctcctgcctcagactcctgagtagctgggattacaggcatctgccaccatgcctggctacagaaatgtttttttaaaaaaagaacatatcatgagttggcatagccactaattatgttaacatagttaataactggggaaaacctgaatgagggaagtgtttagattacatcttggtaaattattttgatttggttcaattgccttttgggaagttaaaaaaagggaaggggctatctactggttgccaaaaaaattactgatattcttagacttgtcaaaagacaaagttacaacaagtttagtttaaatatctcagttgggctgggtgcggtggctcatgcctgtaatcccagcactttgggaggctgaggcgggtaaatcacttgaggttaggagttcaataccagcctggccaacatggtgaaatcctgtctctactaaaaatacaaaaattagccgggcatggtggtgtgcacctgtagttctagctacttggcaggctgaggtggaagaatcccttgaacccaggagttggaggttgcagtgagctgagatctcaccactacactatagcctgggcaacagagtgtgactctgccaaaaaaaaaaaaaaaaaaaaatctcaattggctttatttgcaattctagaaacaggtaacactttgttccacaaaacagaatcatgagctgagcagaaggcattggcttcacagagcaagaaggaatgaagaaagaagcaggctgggtgcagtggctcacacctgtaatcccagcactttaggaggcccagaagggtggatcacttgaggtcaygagttcaagaycagcctgggcaacatgctgaaactccatctctactaaaaaatacaaaaattagccgggtgtggtggcccatgcctgtaatcccagctacccgggaagctgaggtgggaggatcatggtggaccagcccatgaggtggaggttgcagtgaactgagatggcaccactgtactcctgcctggaygacagagcgagactctgtctcaggaaaaaaaaaaaaaaaagaagaagcaaagattatgtccattgtttcaaagtgacttttcttgtaagatgagacaaggagatagaacaacagaaaaataactgattagttaacatcaggcttcttggggctactttttctgtgtgtgaaaggattaaagcagagggaaactcattatcgtgactcttgaagattaagtgacctgtttgggaatttggctatctctctctcctgctttctcttgagacaggaataatacagggtggttgcaagagaacagaaaattccaggcagcagtttcacatgcctagcaaaatgaaactgttgaaatagctccataaactggggactgataagaccatgaaaaacaggatgtgggccaagctggctaaaaccaactggacccaacagagagcaggatttgacctaggtttctcctaggacctcattattcacccattaataaacaaatcgcacacccacctacactgtgacaagaacactgtatttggtgttaaaatgggcagcatcacagttctgagaaatcttcacctttttccaggaatcttcatgaatagtccaccccttgggtaaagaaacccatataagaaaccccaagcccctttgtgcagctctctcatgagtatgcccatgctcccctttcttgagtgtgtatttttactttgcaataaatctccgtactttcacgattttctgactcatccttgaattccttctcatcatggtatcaagaacctgcacactggcctgggtcagggtttcatcagtgtttgggaacttcccccagcccactggtctcactctgaagatcagataacaacttattgaagtttggtgacagaactttagcatgggtgactccattttgatttttggttttgtctgttggagcatagtacagaaacttaatccaaaaaaacaacctcctatactttttattcaacagaatcaacatttcaggtttcttttttaacctgaaattggtgtttcatttaataaatgcttacctagtagttactcggtggcattatcctgtactttacagacattaactaatttagttatcaataacccattgagtagaaaaaacagtttttcctctgctctcacaccagtctcacagaagacttctgtgaccaaatgtgtgggagtttctctccaccagcaagaaataaaaaaaattagggggaagggcaagggggtgcacctatggtcccagctagggatgctgaggtgggattacctcttgagcctgagaggttgataggctgcagtaagccttgatcatgccactgcactccagcctgggtgacagagcaagaccctgtctaagaaaaattctgcaatggacactagctgggtggtggtggtggcagcagggggtggggggggcaggtcctctaattcaatccgattctcatactatctacttgggtagtgtcagatgccataggttgaggactcagtcccacttccaatgcaattgcaagccccaggttgttttgtctgtgcttctgacctaccaactataaatcacggttccatgacccccttcttgggggatttatttgctagagctgctcacagagctcagggaaatacatatctacatttatcagttcattataaagaatattattggcaggtgcctgtgatcccagttactcaggaggctgagacaggagaaacgcttgaacagggaggcagaggttgcagtgagccaagattgtgccattgcactccagcctggatgacagagtgaggctctgtataaaataaaataaagtaaagtaaaaaggctgggcacggtggctcacgtctgtaaacccagaactttgagaggccaaggtgggcggatcatgaggtcaagagatcaagaccatcctggccaacatggtgaaaccccatctctacaaaaaatacaaaaattagctgggcatggtggcacgtgcctgtagtcccagttactcaggaggctgaggcaggagaaccgtttgaaccagggagctggaggttgcagtgagccaagatcgcgccactgcgctccagcttggtgatagagcaagactccgtctcaaaaatatatatatattgtaaaggatacttgaaaggatgcatagggcaaggtatgggaaggggcatagagcttccatgccctatgtggggtgagaggcaccctccaggaacctccatgtgttcagctatccagaagctcccccagccagacctttggggtttttatggaggcttcattatgtaggcatgattgattaaatcactggccgtcaggattaacttaaccttcagccccttccccttcccagaagttggatagggctgaaaatcataactctctgattttgtcttggtctttcacgtgcccaacctccatcctgaagccacctaggggctgccagccatcagtcaactcattaggttacaaaaagacacttatcacttgggagattccaaagattttatgccaggagatggtaggaagaccaaataaatatttcacaatatcacatccctaatgtaggtcctattatcaccattctcattttgcaggtgaggagactgaagcatgagattaagaaatcaagaccgccttccccctgtagggscggccggcgagtcccagtgagagcggagggtgccagaggtagggggccgagaaacaaagttccyggggctccctccggggccgcggtcggggctgcgcgtttgaccgcccccctcctcgcgaaggcaatggcttccaaactcctgcgcgcggtcatcctcgggccgcccggctcgggcaagggcaccgtgtgccagaggatcgcccagaactttggtctccagcatctctccagcggccacttcttgcgggagaacatcaaggccagcaccgaagttggtgagrtggcaaagcagtatatagagaaaagtcttttggttccagaccatgtgatcacacgcctaatgatgtcygagttggagaataggcgtggmcagcactggctccttgatggttttcctaggacattaggacaagccgargccctggacaaaatctgtgaagtggatctagtgatcagtttgaatattccatttgaaacacttaaagatcgtctcagccgccgttggattcaccctcctagcggaagggtatataacctggacttcaatccacctcatgtacatggtattgatgaygtcactggtgaaccrttagtccagcaggaggatgataaacccgaagcagttgctgccaggctaagacagtacaaagacgcggcaaagccagtcattgaattatacaagagccraggagtgctccaccaattttccggaacrgagacgaacaaaatctggccctacgtttacacacttttctcaaacaagatcacacctattcagtccaaagaagcatattgaccctgcccaawggaagaaccaggaagatgtggtcattcattcaatagtgtgtgtagtattggtgctgtgtccaaattagaagctagctgaggtagcttgcagcatcttttctagttgaaatggtgaactgataggaaaacaaatgagtagaaagagttcatgaagaggccctcctctgcctttcaaaagggtggtcacctacacatgtttaaggtgtctctgcacatgtctcaagcccatcacaagaaagcaagtacagtgtggatttcaaatggtgtgtaacttcagctccagctggtttttgacagctgttgctgtggtaatattttttacatgtgatggtgatagtctctggttctccccatccccacaaaggctgttgaaccacagcaccaggaagcctgagaatgaatcctgagggctctagcccaggctttgtcccaggctttctggtgtgtgccctcctggtaacagtgaaattgaagctacttactcatagtggttgtttctctggtcttgagtgactgtgtccacagttcatttttttccggtaggaataactccttttctacatccacactccatagagtctctccttttcagayatcctgggatgaaagaatttggcttttttttttttttttttttgacatctgttttcactcttaggcttttaaacaatagttattgctcttatccctctcagattctaataactgagagtgatggggctatattgaatctctgtatgcactgagaactgagctatgaagaggatcttattaaactgctggtctgactttatggattgacactgttcmtttcttttattgtgaaaaaaaaaaaaaaccctgaaagtcttgggaaccccctaaagtcttttgggaatcctcaaaaagcatgggaagttaagtatttagctacataaatgttgtaagatcatatcttatgtatagaagtaataagaccatttggaattactggactaattgaatagttaaggtttctattcgggacaataaaatgtattttgaaagtgctgctaactattgatgctgacagtgtttcactcctatgagtgacccaaacatattataaatatgtggtaaagggaatggagcctgtggggttgagcagaatgttgtactagctgtgcctggactgagtataacagctttatgattatgagaaaacaaattctttatttttttttctgttccaaagattcatcctatggggtggccataaagtctagaattagatactaatattttgtcattcattataacatatcaataaaccatttgttaaaagatttgcctggtttccagacttggtggccaccttgaataattcttgctgtcttctgggaaggatgatgaaatttattcctgctgccttaaaaatatgtatcccttcttcacccatcatgactgtccccagtgagtgtcctttactattcttgggagtgactcctgtctaacttttcatactggcgagaagaaaagargcctattttaacactttagtggtgttgaaacacattacttactttctgaagatgtcccagtgaatcctctgtcaattcactgccatatgtaatctatatgataaggaatgcatcttccaagtactgcccaaacycttgccagctcctctcccattgtcccttcatgtgaatatttcttggctaccttagtggaaatatagatcagtcttctccccatccatcctctcaaacataatgagattgtttactttttagatttatgcagtgaaaatgcccagtcaggtctgaatcgtcartgcattatattgacyctgagcactttagaatttagagttgcaattgaatgccagctgtggagatggggtgcatatcagatatataaataaagctcaggtttgctagggaaccaggtatagagaaaaataagtctgatatgaggaaaattgcacaatttagagtagttatgccrtagagaaaatttccacaaactaggaaatgtagagagttattctatagaatactcaaaagaggaaagtatgtgatttttggaaacaggaaaatcttcaaacttctttcttcacttccctttgtgtttagctgaccctccaatgtgatcattgcctttggagtttgggagaggtaygggaagtggcctgatgcctgcttccatacttcactcctccatccatccttccctccctyttcccctccagctaaatggacaattctagccaacattgagtcactcaataagtctcaacagtgggtgtgtttgctgagattgtccagcagttgagcagtttggtctcacctccctcgctagttgagaccaaaaagagacaaataactttttcatggtctttgaaacataatgcttatttcgtggtcaatggctttaaaaaaatctgtttcttgttttcttcaacaaactcactagttttcccttaaatgatattgtaaaaattaaagtaatcttgaaaatgttttgacaaaagtaaaattaaagggacaaaaaaaaaaaagaaatcaagaccactagtgagtaagcagcccaggtaggactcaaacccagacaggcagcctccagagtcctgtacttaactgctatactatgctgtctggttaagagaatagatctttctttctttctttctctttctttcttttcttttctttctttctttctctttctttcttctttccctctttctctccttccttccgtctttccttcttttcttttcttttctttctctctttctttcctttctttctttttctttctttccctctttcttttctttcctttctctctctctctcttttctttctttcttttgacagtgtctaacgctgtcaccctagctggagtgcatggtgttcatagttcactgtagctttgaattcctgggctccagcaatcttactgcctcagcctccaaagtagctgggagtacaggcatacgctaccacacccgactaatttgaaaaaatttttttgtagagaagtagtctcttttttttcttttttgtagagatggggtcttttttttttcttttcttttctttatttttttgagacggagtgtcgctctgtcacccaggctggagtgcagtggtgcaatctcggctcactgcaagctctgcctcctgggttcacaccattctcctgcctcagcctcctgagtatctgggactataggtgcctaccaccatgcccggctaattttttgtatttttagtagagatggggtttcaccgtgttagccaggatggcctcgatctcctcatctcgtgatctgcccacctcagcctcccaaagtgctgggatcacaggcgtgagccaccacgcccggccagagatggggtcttgccatgttgcccaggttggtcttaaacttctggactcaagcaatctggccaccttggcctcccaaagtgctgggattacaggtgtgagccaccttacccagcttggaaatttcattataacacatatatctacaaagagtttgtataacaaaatatttccatatctaggtgtatgctttttgatcaagttgctgcaaagactcctatactcaaaatagttcataagccctctctactctagtttgtacaactctgcattaggaaagatgctatagtttgcaatacagctgagccatttagagtatttcttttttctcagctgccagatagtcatacaataggtaaaatatactgaaccttggcatggtgtgcttgccagtttcattgattacctccacctcccttgaccccatgaaacactcctggtatgcaggccccagtatagttccttgaatctaggctggccttgtgactctattaaccaataaaatatggcagaagtgatgctgtgctaagtccaggcttaagtattggaaagactggtatcttccacattttgctcttgggaaccctgacctgcacttaagaagtccaactaccttgctgtacagaccacatgcagatgccatgtgaagagggatgtggagcggggagcccaggcctgctcttcccaggggcagagaagtcagggtttgaggaatgggggaagagaatctggtaggttcgggttgggagtacagggtagtagctggttaccaaccttttcagaagaattttaatattttaacattgagtgcaacaatagcagtacaaaccagttgaaaagtagccatggctttagcaagtaggctatcaagatattactccttttctgaattcagagaggttattttcaaaagcagagaagttggatttcagttttgctgtttcttgtcctgtaatcaacttgctatattcctagaccttggataaaattaaccaacctatctgttaaacatgggaatgtggtttatatgttcagtttagggtaattttaatacaacaaacaattcaagtattacatggaaataatctcaaaaatttagattcctatatagttcaatttgaaaacattttatattactactaaatattatctaagctatgtgactataagtaagacctatttttttatttttattaaaaaaattttttttgtagggatagggtcacccaagctggtcttgaactcctgggctcaagtgaacctcccacctaggcctcctaaagtgctgggattacatgcatgacccaccgtgcctgaccagtaagacttttaatattaccgactgtatgttatgtgatattaaggggttcattttttgtagatgtgacactggaattctgattgtgccttgaaaagacaaaaagagttttatctcctagatatacgtattacagtattttctcatggaatgacctgatgtgatatctgacagttgatttttttttttttttttttgagacagagtcttgctctgttccccaggctggagttcagtggcaccatcctggctcactgcaacctctacctcccaggttcaagtgattctcctgcctcagccttccgagtagctgggattacagttgcctgccaccatgcccagctaatttttgtatttttagtagaaacagggtttcaccatattggccaggctggtcttgaactcctgacctcaagtgatctgcccaccttgggctcccaaagcgctgggagtacaagcatgagccatcatgcctggcctgacagttgattttttaatttatttttctaatttaatttttaaaattttaatttattatttatttatttatttttgagacggagtcttgctctgtcgcccaggctggagggcagtggcacaatctcagctcactgcaagctccgcctcctgggttcacaccattctcctgcctcagcctcctgagtagctgggaccacaggttccagccaccacgcccggctaattttttgcatttttagtagagatggggtttcactgtgttagccaggatggtctcgatctcctgacctcatgatctgcccgccttggcctcccaaagtgctgggattacaggcatgagccactgtgcccagcctatttttaatttttttattattttttatttttttgaaacggagtctcgttctatagtccaggttggaatgtagtggcacaatcttggcccactgcaacctctgcctcttgggttcaagcaattctcctgcctcagcctcctgagaagctgggattagaggtgcacaccaccatgcctggtgaatttttgtattttagtagagacagggtttcaccatgttggccaggctggtctccaactcttgaccttaagtgatccccctgccttgacctcccaaagtcctgggattacaggcatgagccaccatgccctgaccaacagttgattttaaataatctagtgtgcagggggtgagagcagaggggttgtaaatgaaatagattggccatatgttgataaatgttgccatatgttgataaatgttgaatctgggtaatagatacatgggtgctcattattctattctttctattttgtgtgtgtttggaaatttctataacaaaaagtttaagaaaaaagctcaatagttattcgagatttgttcaaaacagacatgagattgcaattgttttctacctttcacttgctttagggttgcttttcttgaaaggattttgtgaaattgtatgttttaatacgaatataaaaagtagtgtgtatttaaccataacctcttttatagtagcttctgggtgcctcctatacacttccaatcttagcaacaagaataaataattccctctaatttggcctcaacactcaactgctgtcacattaattgctacgtttgtgtagctaatgcctgcctgtagccagtgataacattttaaaatacattacaagatggacaatattttagtgcctaaattcagatattaaccttataagctttccattttttggtaactttttaaaagttaaacattttaaattctgttattgtcttatttctttattataatctggccgtatgttatcttagaggcatctccagaactcactttttacccaacaatgttgacaaggtggctccaccatattttaaaatttctagctataccttatatagtatatatccctaagtaagatattcttcactcactcttttcactggtatttataatggattcagtttatagataactataatagatttgtagaaagggaatttataaaaaggcttaagtgggtattgtaagcttgaattttatgttctttttttaattttatgttcttaataacttaaaatttcaaaactgatgtctgagggttacctattattttctctattcatttctatttttcatttttatgtattttcatttttttttttttgagacaaagtctaactgtgacacccaggctggagtgcagtggaacaatcatggctcactgcagctttgatcttccaggctcaagcaaccctcctgttagaagtaaaatgttgtgtttttttttatttttttattttattattattatactttaagttttagggtacatgtgcacaatgtgcaggttagttacatatgtatacatgtgccatgctggtgtgctgcacccattaactcgtcatttagcattaggtatatctcctaatgctatccctccccccgccaaaaatgtttatttagaaatagaatgcttgttccttggtaccacaaggaaaaatcagcatttagacaaaaagttttctcagcaaggcaattttaccttctgcagaaagggtgctcctcacagatggaacaatggtgagaccacacccgaacaaaggagggaagcaattttattccttacacagcttgtccctgctaatgtgtcctgtctccattggctggagctggacctcacaatctaaattaaacctgactggctaataacttaaaactttcctaaataggtaaaagcaaaggagaacaaagaaaaagaggaagttgcttatgaaaggaaacaaatatcttggttaaagtacaaagacatagaatgtactcattcccttatatctagcagctacataggatagggcttaaccaagagttattagcataaagcaaggaggcttgagggaagttactctttaaaagaaactattacttctaacacttatgatttattctttaacaagaagggaaattttgaagagaaaactttttactttctacacatcccatctcagcctcccaagcagctgggactacaggcacatggcaccaaatctggctggattttgtattttttgttgagacaggttctcactatgttgcccaggctggtctcaaactcctagcctcaagtgatcctctcacatcagcctcccaaagtgctgggattataggcatgagcccctgcacccaatctctactaatttttaaaggctaaaatatgctattatttttgtgattttttagtagtcatttaaaaatttttcttattgaattaattaaataatttttagaaatggagtttgctatgttgccaggctgctctgaaactcctggccccaagtgatgctctggcctcagcctcctgagttgctgggattacatgcatgagccaccatgcccaactcagaagtctatttcatatcacacgtatgataataatttaatcacaaaggaccgtacatttaataatgtttataagagctaaggagatcaagcaaagatgtgtgaaatgagtcaaaccttcaatcctctcagtctggtatttactagtgtaagaaaaaaattaaaatgtataacttgaattacagttgactcttgaacataggcgttaggggcaccgacacttcctcaagtagaaaatttgcatttaacttttgactcccccagaatttaactactaataacctactgtacagcacaagccttatggataatataaacagttgattaacacatattttgtatgttatatgtgttatgtattgtattcttaaagtaagctaagtaaaagaaaatgtgaagaaaatcataaggaagagaaagtatgtttactgttt

SEQ ID NO: 95811 - DNA, 19378 bp, Homo sapiens
agtaatctgcctcacgcacaactggatcagtggcttaattgatgtcatcaagattttatcccttgttcagttctgcttttatcttttcttggctttaccatgcagtgttatggccaccagcagttcctagaatccagtcttacatattttcagctgctatagagcttctcttgcccactggctccaataaaagtcccaggattgagtatcattgttaagccatgaaccactgtggtcaggggtatggaatgtactgctcaatgcttcctcctgaagtcccagaaatagactgagaccattgccactgaaactgaagagggcaagagaaagaggagtggtaccctaaagaaaaataacgatcctggccgggcgtggtggctyacgcctgtaatctcagtagctcatgcctgtaatcccagcactttgggaggccaaggtgggcggatcacaaggtcaggagatcgagaccatcctggccaacatggtgagacccccatctctactcaaaatacgaaaacattagctgggtgtagtggcatgtgcctgtaatcccagctacttgggaggctgaggcaggagaatcgcttgaacccagaaagtggaggttgtagtgagtggagatcacgccactgcactccagcctggcaacagaatgagactccgtctcaaaaaaaaaaaaaaaagaaaaataatggtcctctgaccataagcagtggcattggatgctgagcatgaaaaacagcagatgtcactctttcatatttgatatcagatttcttttaaggataaagcatatagtcacactgtaatttgtgtgattacatgaaagaaaaacatacttatgtaagtaagcaattctaagtgcattttatatatgtctatatatgagactagctgttggaaatattagtgaaaaatgaagataaaagttgttttaaatgaagtttttatataaattgtcacatctttaggaggcatatatcttgtttagttttacgagtatattcagaagctgaattaatataacagtaaaggattacatgtttaaatttgctttatattaatgatatatgtatacagaagaaatctacagtcaaatgaaatctatactctaagtactaatcataaaatatatatgtactggacaatttccttctacagctattcttttaaaaaatatattaattttatagaaaaggagagggagtttttaaatctgacaacatttctactatctccatcctaaaagatgtgctttctaaagaagctacaaaaaggaaaattaacctcaacatatcatacggtaaacaaacaaaattaataattctttctgatgtttattttgtgttgttgttacattattaatgtttctgatcaaagtgatttatctaactgcatctggtcaactccttctagagataaatgaagtatcagtcaaacacactttaaagctaatccacccaaagctggagtaccagttgcttttggctaagaaagtgcagttaattgatgctttaaaagtaagtacatgtgtcatcgtggactggtgattattatttgaagtcataggatttctaaaattatcaatactttaacattacattggattgaattttgaatattaaggtgcttctgtttttmattttaaataggaattacagattcatgagggaaatacgaactttctgataccagaatatcactgtattctagaagaggcagatcacctacaggaagaatacaaaaagcaacctgcacatcttgaaagactctatggttagtggaccattctagaataccttgccatatttcttttcaactggctatttcccaaggatcatgtaagagaagctgggcagaaagataaaaagattacatcagtcatgattcatgaaccagtcatgaatcagttgacaacaaatttattgcacagaatatttctgtattttgtcaagctacttttaatatttaattcttttacttgataaaatgcaagtatattaagaaataagtatactgtgatgaattaatctatatatatgaacaaacctggtataaaatgaatgtaatctatgaacctttagagcttagactgtatttcacacaaataattgtcatgttttgttgctattgtgaattataaaaatgcagcatttaaaatttttaaggcaaaatttaataaaggatatacagtatttgtgttgtgtcaatttatagttcaaaactttggtggtgagaagctgaatgtttcacaaattgtattgaaacagagtaagggaggtgaggagagggaaagaaggagtgaggaaggaagaaacagcttaagaaaaacaattttgttagcaatctttacataagacctgttgtatatagcacactatttacactgtcttcataatcaggtgagatatttaatccttacaatagctctgcaaggtaggtggtattatcttcatttttcatatgctttaactgaaatctgagtctaaggaatttgttgtcacctagcaagttagtgatcatgcctgcattagaatcttctcaccccaaaatgcatgccttttacactatgccaagccttccatagtcactgtagagccaattggtatcactagtacacatggatccttaagcctgcctactgaattttttattacatatccagagactttctcacaaactgtagctatatttaatgtcttaacctttattacatgacaagcacatgatctcttttatccttataataacttatgagattggctgtacataatatcactgattgcaaaatccagacagctttgtaaaccaaagtttttttcataaataatttgacagcaaaatcttgacttaatctgaattaatttaataacaaaatctgacttaaactgacatgaggttttatatatattttttgtttgtttgtttgtttgttttttgagacagagtctcgcttggtctcccaggctggagtcagtggcgcgatctcggcttactgcagcctctgccccctgggttcaagcaattctcctgcctcagcctcctgagtagctgcgattacaggtgtgcgccaccatgcccagctaatttttttgtacttttagtagagacagggtttcaccatattggccaggctggtctccaacccctgacttcgtgatctgcccacctcagcctcccaaagtgctgggattacaggcatgagccaccgtgcccagcccaaggttatatcttttttattccacttagtgcaaatattcatccgtatattttgtgccagaaatagtactatgttttgctattggatgctgctactcagtccccttggggttaataccatagtatattcctttcattatcttcctaaaataggaaaaattctgaaatacatcttgcatcaagctttttggataaaggattgacagcttgaattattcctgttttacatatgagaaaactcaaggtgaaatgatttgcccagatctttgaacctaggactatttgccttcaagtcaaatcccaagaatggtcaacatataggtggaatattttaattcagataagctgttaaaaatagaatctgcctagactatgtcaaaatggtcagcttggtggaaaaaatataccacttgttgtgatgttatatatactgatagcagttcaaaaatggccagtagttgattgtctgaattaatagcttgtaatcaattgttaagagggttattaggcagatgatttatatcttgaaacttgttttaaaatccccccaaaatgactatttttaaaaacatggcttttaggtttgtgtatgttaaatcatggaattacaggtgcttaaaaatagattatcaagcaattactttagtgaaatactgtgtcattaaatataactaatcactgacaggaaatttatgttttttctttaaaggcatgatcactgatcttttcatagataaatttaagtttaaaggcaccaatgtaaaaactaaagtaccccttctattggaaattctggacagttatgaccaaaatgcattgatttcattcttcgatgcagcatgacatacaaataaggtaaagtcccaaagaagtggtctgtttaaatgaaaaatgttaaaagagaattagaagttaactgtgtatgtactttaatttcaaatgcttttttatatctaaaaatatttgagatataatggctttttaaagtaatgcttctatttcttttgacaaattgaactttctaaaactaaaagagtctttttatttttaaaacacaagtagaatgatttaaataggattttaatgaatttttggcaagtggctgttttaatttttaaattgagaagtaatatgtggaaaattaaaatatattcaaatgtattacaaggtacataaacacataaacatgtagaccgctttataggcttcaaaatgtatttttatatattaccttatttgatcttcacaactgttgtaaaatttgtcaaatcatataagaaaactgattctcagtgaaattttgtgattaagaggacatgctaatattttgtaaagctgggaccagaacccaagtactggtacttgctttgtgtcctggttactatgtatgttgccagctagtggaaataacctaccaattgttttttctaggagataggattgatttgcaactgatattccttttgcttggtagtgttttatgactctgctgcagtttgtggaaatgctggacttggctcagtgctataaattgtagccaggaaataagaagagcttacacagagtcgggggatcttaattagacatgctgtaaccagtggagctattcagcgtgcttcaagtgaagagtgcagaaatagtgatgccatcttagattttcctacactagtatcttctagatctctttttatcatatatgacattaaggctacagaagttttgtgcattaatcttaattcatatttattaatttcaagggaatattgaaaggttttaaaatggcatacagataatggaaaataagctttatgtttcaagaagggcagactcacgaattttttagaaaacagtgcttcttaatgatatgctattatacttattagttatgtgcaagctttgtatattcttatatttatatataaatataaaaatttgttaaaggcacgtatagttaagagagttttattttaataaggtcatattgtttttactatgtttaaaaaactttacttctgaaaggaacataattatatctaggtcactagaacgtcattgtgttttttgttggttgccacagcttggggaaaaatagaaaaaaattaatgactgtatttgaatattttgtaatgcactgctatttattatatatatcaacagtagttcaaggtgccatcttaaattaattgcatcttcattaggaaaaataaaaagcataaaacacaatttctggttactatgaataaacgcctaaatgttaagatgacattacagtcttgacacttgagtactgtattactatgtgagctccgtgttaaataatttatgcacattatttaatcctaacaaccatatgactgtagttattagtccctattaacacataagaaaacggagaatcggagatactgaaaaacgtgccccagattttagacctttggaaaaagtcacttaagctaactagacgtcccagagctaaaggctgggcaacccaaatgatagtcgccaaagtttaattccgtttaattccctaaaaggcttagagtcagccttcggacagcctcgctcactaggtggctcagcttaaaataatcggaagcgtcgggccctaaatcctacctctccccgccccgcgcaggcgttttctcccgccccagccagtttgttkctccctcctgccccgcccctgctcagtttcctttggtttacccttcactcgcctgcgaccctgtcgccttgaatgacgtcaaggccgcgagcgctttcattggtccatttcaatagtcgcgggatacttgaactgcaagaacagccgccgctccrgcgggctgctcgctgcatctctgggcgtctttggctcgccacgctgggcagtgcctgcytgcgcctttcgcaacctcctcggccctgcgtggtctygagctgggtgagcgagcgggcgggctggtaggcyggcctgggctgcgaccggcggctacgactattctttggccgggtcggtgcgagtggtcggctgggcagagtgcacgctgcttggcgccgcaggctgatcccgccgtccactcccgggagcagtgatgttgggcaactctgcgccggggcctgcgacccgcgaggcgggctcggcgctgctagcattgcagcagacggcgctccaagaggaccaggagaatatcaacccggaaaaggcagcgcccgtccaacaaccgcggacccgggccgcgctggcggtactgaagtccgggaacccgcggggtctagcgcagcagcagaggccgaagacgagacgggtaaagggatgcgggatatctgcaggagggtgggtcgagcagggtttggcattggcttagcaggcagagaagagtggcgagaaggcatgtcctgggcttttggaagggggccagggtctggagtgcagttggtgctggtgtgtggtttgccacagtaggagttctcccatattagcatcaggaccccgccaacactgtgtgtatgctgccggtctgctctctatagggggcatctgcctgtacataatggggtcaaaccaagctctaaaacgtgtagtcttcgctcagctccgcgcctttctctccacttttaaaccccaggcactgctgtaggactctgacccctatcctcctcacgcttaagagatgacctctactttagaaaagcgtgtacaaaatactttgcttttggcaaattccgccattttagccggatttgctctgttgctccaccctcgggcgacagtggtgaaccaacaatttttttgctgtctttcctaaacktgtcacgtattggcctgtcacccgacccttcttgtggccctgataagttttgcataattccacctagtgttatctattgatagcctttgtgggaatgcctgtgacaaatgggaacatcccttctcttttgaatactgaaactcttctttgtcccagaaagtttaattcctgatagagtatttgggagaaaaagcaaaggccaacacccataagagaaagaatgcaagactagtaggctcaaagccagttattaatttttttttaggttgcaccccttaaggatcttcctgtaaatgatgagcatgtcaccgttcctccttggaaagcaaacagtaaacagcctgcgttcaccattcatgtggatgaagcagaaaaagaagctcagragaagccagctgaatctcaaaaaatagagcgtgaagatgccctggcttttaattcagccattagtttacctggacccagaaaaccattggtccctcttgattatccaatggatggtagttttggtaagttttaaggaaaatctgtgtggaattacggtaattataattattagatgatattaatgatttgcattttaagatgtcttatgtagtcattttgactatagtgagttaggtttaatgtaacaaggcttagaaaggatgtgacttatctcagatctcacagctaacacttgacttggtgacatacaaaaagatccttatccagtgctctttcaggttcactgccagtcacatcaatctaattataattagatcttaaatgcttattttaatctgatcccataaatgtgttcttggttgggagaatagatttcagttttatttaactcacttatatatcacttagtgctatttgaagatgcagtcttaaatattgtgattacataacgtctcttccagttttataattttgtttctataaaaccagtctggattagcatctgataccagaaagtgacacttttcctcctacaagtaaatagttgtaccatggctgtttactcttacccatgtattaaagtagcttctgtaaacagctctttgcagtttgtactatttctttgccctagggatattgagtcactggacagctcactaaatccaatctcattttagttttagttgtattgattgtgaggaaggaggggtgagcaggaaaagtcctttggaaataataatttgtgtgtttttatcaaaattttgcagaaaatgtttaatctcaaggtgatctttgaagtgaaaggaataatggatgatactctttgcttcaaaataatttatactacaaaaaataaattatttatagtgttaatccatttgcccataacaaacctaatttcttaataacacttgttaatagaggccatttaactgatgctagctattgcctacttgtgctttatatatgtcagactctgggatctgcagtttctcttgggacaaatcttagatattatctcaaaacttggattttaaaagtgttctgtcctaacagaaccaccatgccatttgctcctttctgttgtggaagatggatactttaagataatacctgattctcattttcctgttaggggcctaccaatatgtttttttttttttccctcattaactaaaatcattccaaagttctatgtacagagatactgagactagggtaaaatattctacatattttgtcatgagaagctctttttagtttgaagaaataagtgctttgttaatatgagattccttccatggcagtcatttttagctattraactaaataggcaaacaattaatttaatcatatcttttgaattgtcccagagtcaccacatactatggacatgtcaattrtattagaagatgaaaagccagtgagtgttaatgaagtaccagactaccatgaggatattcacacataccttagggaaatggaggtaaaggttctctgaatccagtttgtataatgtatttgttaaatgtggctaaatgaaattgagaggataatgtttaaatttttaaactaatgaattattctaatgctacagttaagtttatagcatgtagcctctcgtaattaatggtaaaataatctaattgcagtttttacactagaataattttaacactataaataattttctcaataggttaaatgtaaacctaaagtgggttacatgaagaaacagccagacatcactaacagtatgagagctatcctcgtggactggttagttgaagtaggagaagaatataaactacaraatgagaccctgcatttggctgtgaactacattgataggttcctgtcttccatgtcagtgctgagaggaaaacttcagcttgtgggcactgctgctatgctgttagcctcgtaagtctaccttggtttgtttaaaagtgatcacraccttttgtctagggaagaaattgattttttwaatggtgaccttttaacatacaccaggcagagtcagtgactacttwagggatggcaatgtgctggggcttagggcagtggaggaggatgaaactgttctaatctagaacactaattttcccccaactggattccttgaacatgatatagtacactaggttacaaattttaaaacattttccttccaatattactttctggcatataagcagtgtctcttttattaagaagtaaaggctgggtgcggtggctcgcgcctgtaatcccagcactttgggaggccgaggygggcggatcacttgaggtcaggagtttgagaccagcctggccatcatggcgaaaccctgtctctactaaaaatacaaaaattagctgggcatggtgatgcatgcctgtaatctcagctactagggaggctgaggcaagagaatcgcttgaacccaggaggtggaagttgcagcgagctaagattgcaccactgcactctggcctgggcgacagagcaagactcttgtctcaaaaaaaaaaaaaaaaaagaaagaaaaactaaatttaaaaatgaaaacatgaaacatgttttcctaagacttgtatttcctaaattttcagctacttggtgaactctggcattgttcccatctcgagaagtctcatgcctttcatttacttcctttgactgaactggggaaaatatctcaaaagtcctttattgatttgggccttttaattagcaattagctatccagtctctactagaaatgatgatcaagtgtctggaaatgcagttggtgtggattttggattcattccatattctgctaatgggatttcagaactgggataaggaagcttgcttctcttttaggactgattacttaaaacttttttcattgtagaaagtttgaagaaatataccccccagaagtagcagagtttgtgtacattacagatgatacctacaccaagaaacaagttctgagaatggagcatctagttttgaaagtccttacttttgacttagctgctccaacagtaaatcagtttcttacccaatactttctgcatcagcagcctgcaaactgcaaagttgaaagtttagcaatggtgagttaactttcattttgttgaatggtgattctttggtaataattaggggtaagccctaattcctttgtammggaacctagttcctttgtacagcagtggtgaagagatttagtattcagagggagattaatgctgcagtatggaagaaagcctactgctggcaaaagataatctatatcaggaaagcactagaagcagaggtctaaggatgacatcttggggatgggtagtcagaagagttgttttttaaaagttaataaaggagggaaaatacaggatgaggatggaacaaaacactaaaatgattgatatgtttaaagatgaggctgtgagatattttttctagagttgctacagagccrttrtcaaaggcaggaaaaaattaggttagaaggcagaggtttgacatttgaattctaaacgctcttgtgatcataaagtattttttattccagtttttgggagaattaagtttgatagatgctgacccatacctcaagtatttgccatcagttattgctggagctgcctttcatttagcactctacacagtcacgggacaaagctgggtatgtattacggtcttcacacacctatcttgtgactgaaatgcctgtgccagattaaataataattgtcctacaaaactgagggttgcctagatgttcttacttggaaaaacttcaaatatatatagttgacctttgaaaaacacaggtttgaactgtgtgagtccacttacacatggatttttttccaatcaaatgtggactgaaactacagtattcaggggattcacaacccatatatatggaagggtgactgcaggacttgaatatgtacagatttgggtatatttgggaagggtcctggaaccaatccctcatgtacactgagggatgattatayacygtttaaggcatgttacctgttgaacagtgtttgttaggtagtaagcttagttgtaacttggattgaaaggtgagcttttttaaaagcatctgacctgttgctggcagggaaagtagtagaaaatggatygayggatggaataatggcctgagaaaactagtagttggaaaagttaaagattagtactggaatttaacataagcttaatgccaactatttactgtgtttggtgtgttactaaaagcaaaactcaggggttctctattcccttctctgtagcctgaatcattaatacgaaagactggatataccctggaaagtcttaagccttgtctcatggaccttcaccagacctacctcaaagcaccacagcatgcacaacagtcaataagagaaaagtacaaaaattcaaagtaagaattaacttgsasattgaagcttacttttctagattatggttcagagatctttgacattttaaccttattcaygaytctgccatagcctccttgagaagctgtyctctaaattggttatgtgtttgaagaaggttgtagttcatgctttctgccctgggtctgggggagaagagagaaggaagggggcatgcatgtgtgttrcagggaccagacagtgttyctaaaaccatcaagtcggtcagacagaaatagcattttttagttcccaatacatgagtacaaacattattccatgatctcctttacccagtgagtgtttactaaaaatgctttttttttccstacttacaggtatcatggtgtttctctcctcaacccaccagagacactaaatctgtaacaatgaaagactgcctttgttttctragatgtaaatcactcaaagtatatggtgtacagtttttaacttaggttttaattttacaatcatttctgaatacagaagttgtggccaagtacaaattatggtatctattactttttaaatggttttaatttgtatatcttttgtatytgtatctgtcttagatatttggctaattttaagtggttttgttaaagtattaatgatgccagctgtcaggataataaattgatttggaaaactttgcaagtcaaatttaacttcttcaggattttgcttagtaaagaagtttacttggtttactatataatgggaagtgaaaagccttcctctaaaattaaagtaggtttaggaaaacagaccctcaaattctgacattcattttcctaagcaactggatcaatttgctgacttgggcataatctaatctaagcatatctgaatacagtattcagagatagatacagtagagattccccagactttttcgctctttgtaaaacctgtttgtttaggttttgcgaggtaaactcaacagaggttgggagtggaagagggtgggaagcttatatgcaaattaacagacgagaaatgctccagaaggtttattattttaaagcacattaaaaacaaaaaactatttttaaaatcctgctagattttataatggatttgtgaataaaaaatacccagggttctcagaatggaataaatatcccttttaatagttatatatacagatatacaactgttagctttaattggcagctctcttcttttttcttcttttcactggctttttasttggtgctttttcttgttttgcactggtggtctgtgttctgtgaataaagcaaagtaagaatttactaagagtatgttaagttttggattaytgaaataagaggcatttcttagttttccagtaggatctaaaatgtgtcagctatgagtaagactggcatccaagaagtttatattatagatttaggtcctaatttttataaatcacaaggtaaaaaaatcacagaacagatggatctctaatgaaaaagggatgtctttttgtttatagtcatgtggcaagatgagagtaaaaccagagagcaaacctctataagtgttgagtatatgtatacatttgaaataaaccagaaatttgttaccttattttctttggattcttgtctggttccaaaatgatcatttcttcttcttcactatctgagagtattatgggagcatctttgtttttttattaatttaaaaaaaaaaaaaaaagttaagcaatctcttgcaaaatttatttctacatgaatttatttctatcagacgttctaaactcttatttctggggctgggcgtggtggctcacacttttaatacccacattttggtaggctgaggcaggtggattacctgaggtcaggaactcgagtccagtctggccaacatggtgaaaccccagctctattaaaaataatagaaaaattagccaggcgtggtggcatgtgcttgtaggcccagctactcgaggctgaggcatgagaatcgcttgaacccatggaggtggaggttgcagtgccactgcactccagtctgggtgacagagcaagactccatcccaaaaaataaaaataaaactctaggtggaggcttaatcttttctttaaatcagcttcttagagcactctagaactcatctgtaacatttgtttctttaaactcttatttcctacaggtgcttgaatggtgtgacaatttggtacatgtcataatagaaaagctagggggaaatgtatatagcatcttttgtagagacaactgaattgtttgtgctactctattcctccagaaatagttccagtttacattccaagaaataaaagaacccatttcccatatacctttggcattgctggtgtttttaatactgcccaaaatacagtaacaaaaaatgccatgtcatttttctttggattttatttgtattactgtcagggctgaccatgaaaaatattactggccattgtatactttgagaactgctccatgtattttgcccatttttctcctgcttattagttaatgatatacataaaatgtgaattaacccatatcaattatttgtatttttagttttcaattagtttctccctttgttcacatgctttaggaaggctgtacctgctccatttttccaatgcttaggtccaccttcattatattcagttgaaaatattattcactgttagaagaatacactaaacaaacatataagaggtatatgcaagtgcaaggatattaacagtgagaaaatggaaacaacttacatcttcaacaataagagaattgttaaaccaactagttatattcaatgctatacaagtatatgcagcattagcttacatcactgcacagagagtaaataaatacctggaacaagttctggaagaataataccaaatagaagtaaccactgggaaatttgagtaagggtcccaatcaatgggaaattttttccttacctatttacttaagtaaaaaaacaaaaagcccaggctccagtaatgttcataagcaataatttctctctttgaaaacagaagtatttgcattacattcctattaaacacatcaccttcaattttccctgccagcctagctcccagttccttgtaggatttctgttcttaccacgtaagaaaataagtcattctattatatagaccagcaagaatttgctttttttaaaaagtagaaataaccatacataacaacttcagttctatggctttcagaatgcaagaaacgtctaggactaccagtattctagttacttatagaatttttttatgttctaatactgcgatgtctagcatggtagccactagccacatgtggctgcttaattttgtattaagtaaaatttaaaattcagttctcagtaacacaagccacatttcaagtgttcactagccatgtggggctagtggctgctataccagtgtagatacttaatgtttctatcatcatagaaagttttatttaggcagtattatatgttatgatatgggatgggctttttgtttcagtctagaaactacaaaaaaaaagacagcagggaggaataagatcttcaagaaactcattcccttaaaacccacccacatacatacacacacacaaaatttttttaattaaaaatatcactatcatttatgccagtgttccactactctacaaagatatgcatattcttttagaaagtagcattagtattgcagctagccacaataatttagttgaaatttaaatcacaatatttagcccctctaaaaatgcaatacttacatccctatatataactacatatctatattctctctatatagtatcctgtatgttatttatccactatacatctctatatagctaatatgctatatattactatatacagtgataatataaatatacacacattttatgcattatatatataactatacggtaatactatatgtatgtaatatatagtaataagtgtgccataaagtgtcacctaccttggcttccaatatcagagacttctactccagtgtccatttttataccatcaagaatgatagcttgatcaccaccgccttcatcatcttccttctcagagtcttcaagatcaccccaggagttttctactccctctccaatttgggcagttccaggagtccatagcacaggtgtagaaacacttaacaagttaagaaaactgagtaacaaaaatattgctatttgatgaactgttgaagatgagaatgaaagttttcttcttgtaagattgattcaagtgtgccccaagttcctaggggaaaaaaaacttaatatagctacactatggatggctgaacaatgaagaagaaaaaaaactcaggcaagattttatggatgcaattaataagaaatgtgaagagacagattctctcaacattttagttatagtactaaattaaattggtccttaaaatctgttttttccaggataactgaatagaagctgaatgttataccatcaacagaatatgactcacatctctatcttgtattttaagtgttttctctaacaaagtacagtgtttacaaaaactaatttcagtatacacatccttcatatagcctaatattataatgccaagtgttatgaatcttgttactgcaaaaaccaccaaataaagatacacttctgaaggaggttctgcttcagcaatgatttcttctgctttttcttctacatccgaggtatcaataggggccttttccattttaaatgctgtgatcctttgatttgctatagactctgcaaaaccaaactttccaccttctttcctgtatgtgggggtttttttggtgggaaggaagggggaggaaggtaacagattggatagaagacaggaagggaaaaaaactattattttatcctttggtggatgaaaaatattggaagagagttagtttatctaacttaacctcaccaatttattatgcctaacaagagtaaatagttagcataatcatttattaaaccacgtgccagaccatgtgctaggtgcttaaaatatactattctctaaccctcaaatcagccctaccaggtagtgttaatatcccatattatagaagaggacactgaaatgctgggttatgtatcttgcttaagatagcacagtaagaggtagagatggaaatcaacctgtttccttccattaatttgagttactagattatttttatcctaagaaaatgttaactgctaaagaaaaatcttatgtctccaggcacggtggctcacacctgtaatcctaatattttgggaggcccaggcgggtggatcacctgaggtcaggagtttgagaccggcctggccaaaacggcgaaaccccatccctactaaaaatataaaaattagccgggcatggtggtatgcatctgtaatctcagctatttgggaggctgaggcaggagaatcacttgaagccatgaggcggaggctgcagtgagctgagattgcacaaatgcactatagcctaggtgacagagtgagaagtgagacttcatctcaaaaaacaaacaaaaatcttatatgatttttcaatataggttacatttaaattgcagaaaatataacaagtccaattttctaaaaacacattaaatagtatactcaattcagattaacaaataaggaaagatcaagtgtgaaatttatatggttgccctcgttcaaggaagatccttaagaaaaaaaatatattaaaagaccatttagggccatttcctgttccctgtgttgtatcttggagtctggattaatgaagacctcttgctcttaggagggtctttcctctttattgttttagaattctggacttgacccagacttaaattcccatctgtgatgcattttgcaataagtgggtttgatgccagcactttgaaagatatccctcataaaacaaaaggacaagaatcaccagctcccacacaaagtaaaaaacgtgaacctaattttagcagtgttaataaggagcaactatccacaagtcactgcatcaataatgcttgtgttataacatcctctcctccctaaggcacaggagcaagtgacacatacttgtctgggaaccagtttcattaatacttttattgtatccgtccaaagatgagtagcaatatctgttaccagtttcactacctttcggagttttgggtaacataactataccatggtatttacactttttaatgagtcaattttaattgaaattgccattctaactttgtatgtgaaatcaagttcatgcataataaagcttgcctatactaaaaaaaataataaaaatttaaaaaatgaaaataaaagaccacttagttctggaaaagttacttaccttactttttggtcattctccaaagctttcaatattagctctgtaatttctgctactttcacaccagcgattttactgcatctcagaacctatttataaaagtgaattctgttgtttaaagacaataaaccaaatagttttctctaatgaaactaaaaccatgaaatttttctacctttataatttaagcctgacttttccaaacatgaatacaatgtaaacacagattaaggcaagatgtgaaagttgttttaagatatgtgaaggactgtcacatcaagggaacagacataaaaactttcttatacaacagtataaaagataccacagaagaggccacagacacatatatgctccaggatgcactaacttcctttttctgtgggtaatctgggtagtacttgtgatgctggtaaagatgatgatgatgataccagaaactaacatttattgcacacttaataaatgtgtgctagacactgtgcaatatatttatatccttataacaacaaggtgttggcaataacatcattccctattttacagataaagaaagtgagacccaaagatataaaatcatttgcccaagatcagctagtatgggggcagacctagaattcaaactaaagaagcttttaatcatctacactgtatgctatatggagatctattttctaaaagctcccatgtgaatatgatatatagctgggtttcagaactactgccaattgtagttctaaaagtgcaagtaaaactatctttttacataatgtctactattggatgtttaaaaatttttatttgcttttgagacagggtctcattccgtagcccaggctggaatgcagtgacacgatctcagctcactcaacctccacctcctaggctcaagcaatcctcccacctcagcctcccaagtggccaggaccacacgcatgcaccaccaagctcggctaatatttatttatttattttattttttattttttcagatggaattttgctgttgttgcccagactggagaacaatggcacgatctcagctcactgcaacctctgcctcccggattcaagcaattctcctgcctcagcctcccaagtagctgggattacaggcgtgcgcca

SEQ ID NO: 95812 - DNA, 27692 bp, Homo sapiens
ctaccaaaaatacaataaattagctgggcttggtgacacatgcctgtagtcccagctacctgggaggctgaggcaggagaattgcttgagccaggaggtggaggttgcagtgagccgagatcacaccactgcactccagcctgggtgacagagtgagactcccatcttaaaacaaaaaacaaaaaacaaaaaacaaaacattactatttgagactgtcactacaacagttactactgttactacttgagactgtcattacaagacttactactgtcactacttgagactgtcattacgagactgaacgaaaacggacgcatgcagaaatgaaaacttaaaacaaaagaaactgttttaaaggaagggaccaggggaaaaagaagagggctccttgcttctagtgagcaaaggcagcagcccctgagcttctgcagcccttcgtatttatcgggtagaaagagcagggagaaggaggtaacaattggtcagctgcttgattgatcacaggttcacgttattgctaacaggcttcacatgtgcctaaccacaagaaacacctgtgcctgggttgtgactcccctcagcattccttctgggcggcagatgcagtttgtcagtttgccaacatcctgctttcatgagaaacagtttgctgtttactcatatagccttcagttgtatgctgagttgatcatgaccctcattcttttggccttcaacatatgccctgccaaaaggattcaaatattgttaaaactctttgagagaaaaacaaaacacagcttgctagcctgtttagttcctctctcataacctctatcaccctcaatccatccaaataaactctcattctaagtaaacgcagtgtgattaccaagcaaatgcagccttctgagttcttcagtccctttcggccagattactgatcctaaactcttcctatttataaattccaaaaggtctactgaacagaaatcatctttatccaaactcttgccacttttaaatgtgatccactgcccagcagcatcagcatcaccagagagccagttaaaaatgcaaatttccaggtctctctctcctgcctccttcttgggctcacccagctaatccaggataacctccccatttgaaaacccataacttaatcactgctgcaaaataacttttgccatataaggcaacatattcacagtttccagagattggaatgtggaaatctttaaaagaggccattgttttgcttactatacaacactataagttatttacatgacaattagtttaattcacaatagcaaattccacttattttatttgtagaaaactaagtgacaacttttctagatcatatttattgcttagacattaaacaatataatttcctacagatttctatcgatgagcatgaatcttcttttaatagatgagaacaaatccaagggcatcagtgatgtgtccaagatagagccatatgcataatctaagtgaaatgaaaatgtcccttccctgaattatcttctaatttgttgtatttttgataagctgaaaatggataattttttattcctctaaatacattgtaaagccttaataataataatatagcttcctggacataacaaatgatataatcagagtcaaaggaaaagctcttttcaatatccaaggaagctagagatggactggataatctaatggacttaaaaatctataattcccataaaacatatgcgagggaaatttgcactacattttttttttttgagacgaagtctcactctgtagccgaggctggagtgcagtggcgcgatctcggctcactgcaagctccgcctcccgggttcacgccattctcctgcctcagcatcctgagtagctgggactacaggcacctgccactacgcccggctaatttttttcgtatttttagtagagatggggtttcaccatgttagccaggatggtctcaatctcctgaccttgtgatccactcgcctcagcctcccaaagtgctaggattacaggcgtgagccaccgcgccaggcctgcactatatttgacatattcagttgtcaatacataaaatcttttcaacatattaactgataagtggtttcccgtttgaatcttgaaaaaaaacaaaacaaatgtctttgttaaaatgtagttgaaagtcaaaattcccttaaataaaaaaattagctaagtatggccaaacaataaaaagaaaacataacacctttttactttttactttttctgataataaaagctattcacatgccttacagaagatttggaaagttcataaagaaaaaatagcaaaatgaaataaaaaccttttcccaaaatcctatcactcagagataaccatttttaatatttcatattatacccttccaggataacttttggtacaccaaattctatacagacaaattgtacagcagatatatggtaaataaaatggtaagctttcatttgttcactcatccacccatttttttcttttttttgagatggagtctcactctgtcatccaggctggagtgcagtggcacaatctcagctcactgcaacctctgcctcccaggttcaagtgattctccagcctcagcctcccgagtagctgggattacaggtgtgggccaccatgcctggctaatttttgtatttttagtagagacagggtttcaccatgttggtcaggctggtctcgaactcctgaactcaagtgatctgcccaccttgacctcccaaagtactgagattacaggcatgagccactgtgcccagcctttttttatttttgagatggattcttgctctattgttcaggctggagtgcagtggtacaatctcagttcactgcaacctccatcttttgggttcaagcgattctccagcctcagcctcctgagtagctgcgattacaggtgtgtgccaccatgcccagctaatttttgtatttttagtggagacgggggtttcaccatgttggccaggctggtctcaaactcctgacctcaagtgatctggctgctttggcctcctaaagtgctgggattacaggcgtgagccaccgcacctggcctccacccattaattctttcaccagatgtgctaagtaggccattcatcctttgattcacaaggtacactaccagtctcagtgggtgctacaaaggtgaagaagacatagactttatactctagtagaaatgtactagaattccttcggacacacttttacaaagaccaactcaaatgtattggctcactagaatcgcatggggtcaggaaagggcatttctccaagaaatagaaggctgctggtcagacaaagcaactgatgttcaataaagagaatgcacactcaaatagtttgttgagaactaggttatttttagacagatcatccagattaatatgctgattccaactgattcttcttttaagaacagaaggtgaggccaggtgcggtggctcactcctgtaatcccagcactttgggaggccaaggtgggcgaatcacctgaaatcaggagtttgaaaccagccggaccaacatggtgaaaccccatctctactaaaaatacaaaaattagccaggcgttgtggtgcatgcctgtagtcccagctacttgggaggctgaggcaggagaattactttaacctgggaggtggaggttgcagtgagccaagatcatgccactgcactccagcctgggtgacagagtgagactctctcaaaaaagaaaaaaaaaataatagaatgtatcacattacctgacacattatctgaacctcttcttaaccttccaaacttatttttccctgaaatcatgaaacaaattttcctttggcattcaaaaatttcttataaacacaaggttgtaaagtacatatattttaggatggtatgtagatgtaagtggagatgggtcatacacctttggattaactcgaaaataaaaagacaaaagcaagagtgtttaaattagaatataaaagtgaaagtagaaaagaacagtggaaattcaacaaaagtggaaggaaagcaaagtaatcaagcagcagtttcagaaaagcaatctgtcatgctgagtttgggcagtttcatgggaagcctttgccaacccaacaagaaaggaggaaactaacatttgaatagctatcatgtccaaaatgtttcatcagatgctttcattcagaccacttaacacagaataattgttatttccaatctgaagatacagaacccccaaatcagaaagaatatttagctcactccaagttcatttgagctgaactttatctgaagccaaagtccattctctttccattaccaagctgccttgcagtaaataacaggctatttcaacaaaggtctatttcatcgctgaagggaaaaattaccaaatggccactgaaagaactcaaggatttaaatgaagaacttatcaaccaggagttctggtatgaaactgtactataaaaatgaattcatgttgctaaagaacttragtggttagtaccctgtaatccccttgccgattttgaaaattaatcatttctgtccactttcctccttcttcacaatttctctctccagaccatgtggagctcatctcatctcagtttttgcatatgttactctttctgcttgaaacacttttcctctccagatggcatcaagggtgctcctgctcaacaccaaagatttactttactttaatgtcaccgctacaaagtcacctgttcctgcaactacccctattaagatagcattcctattctcagagagcacttaacactgtatgaaattgttctatttgtttagggttttttgccttttccaaaaagaatataaattccttgaaaggatcttgtctaccctgtttctccagcacttaaattattcttggacagagtaggccctcttcaagtatttattgagtacatggattgcaagtggtacaaagtgagactaaaatgtatcactggtagaaaaaacttgtgagaagctaccaaagaagccagagaaagactgcgtaggagttacagtgcctaccacctctaaagcaaaaggaaacaaaataataatatgcaaacacttaaatagtgcttattccatgccaggcactgttctaaacattttatgtatatattaactcatttttattcctcagaataaataggtttctcacttcccctgctttgtttttgtttttgttttttttttgccggtgagtaatgtgaagcacacaggttaacttgcccagggttatagtagttaatgatagccttaaaatttgaaccctggcagtgaacactttttaaaactactatttgatactgcctctccaaaaaagctgagtggttggcagcatggccccgctaaggcttctctgtgaccgtaaaaaaaagtctatcgacttaaaataactggagaggggataagaaataaacggtgcatttactttcagtccacagtagtagtaacatcgttagttactacgtgcgaacattctccattctcatcaacttctcagatcccacaagatttcacctttggccacaaaaacatcccatttcaccaatttatctttctcccccaacccttatgccgcctcattccagtgtttgttcatttaatctgctccaaatcctgcatctgcggctttccagggaccaatgtcaactcatctgtgaaattgsagaagtacatgtctagtctccaccccgtgagaggactgagcaaagggtgaagtgtgcgagcggtctactgataataatttctatcactctcatggttattttaagtatccttttctcctctgcactttatgagaaaagaaacggaacttcacgttcagaaacggcctcccaaagccgcaatggcttctcgcagctcgctggccttccccaatcacgctttgagtctgcgcagtagctgcagcccaagccatttcccatttttccgccgccgcgccttgatgacgtaattttcctgcgcctcggggcgagcagcggcgcgcaaggaaagatcgggttccrtttttcccgcggattctggtgcctgtggggccggtgacccaacaccatgaaggaaacgccactctcaaactgcgaacgccgcttcctactccgtgccatcgaagagaagaaggtatggtttggtgcccgcagaattgcgckctgcgtgggcgctcgggtstcmaggtgtggactgatacctggcccgcctgggcccggggagctactaggggaacgaccggcacgttcaccccatccctcaggctttatttattttttttcgacaggttcttttcaaggctccagtcaccgcagcagttgtccatgctgtagtttccactttcctgtatgggcgggctggttaggattccactttcccccaagtgcttagcccagggccagacaaaaagtagttgcttaagaaatacttgttgaaggaataaattaatgaatgaatttgtgcttacagcggctggatggcagacaaacctatgattataggaacatcaggatctcatttggaacagattacggatgctgcattgtggaacttggaaaaacaaggtaacaggatttaaatgagatacacattcggaagggagaagtttgaaaaaagaccttattgacttggttgtttataaagcagctaagaagtctggacagtattctttgtttagctgacaaaaataagtatttttttatgcgagattttttgcttttgtggtcacacttgaactttttaatcataaacgtattttctgtcacgtatcacatagttcttttctgacttctataaatcgtatagacaactagtagtgatcatatggaatttgtttctcacactaatatagagatcttgagcatcttgtcattaagtgtacatcctgctttctttttcctgagtgacatgaaaattaggttttcagatattcatttgaaagttgtgaggctatttggtcacataatggtggtgaactatgccatgtgaaaacctttaagaaatctcaggttttcatgccatcttgtatcaataaatacttgctttagaggtaaaggtcactgatttttaaaacaatctgtggaatagtaaacattgtaataagaagagaggtgttttttctgtcgtgtttttagttgtaccaatttatgttttatttctgtgtatattatactttacatataatttttatctcctatgatttatttggctgagtatgatattactcacattaagattgaaacttgttatctgtttcagttttttgttttggaaggagagtctatttggttaatactttgtaactttatctttgcagagttcttggacaggtttcctgtgaacttgtgtctccaaaactcaatcgggcaacagaaggtattcttttttttaaccttgaactctctcagatggccgctccagctttcgaacctggcaggtatttaaatctttttcttaagttgctttagtcataggagaacctaacagcagtgagcttttgttttaatacctggtgttatatttcatgacattagcccattcytattttctccttataggcagtcagatctcttggtgaagttgaatcgactcatggaaagatgtctaagaaattcgaagtgtatagacactgagtctctctgtgttgttgctggtgaaaaggtggggaatatgcccataattcttaatcttaggatgaatactgttgatcatggatcccggtatctatccttttattctcagaactttagttaactcagtattgtactggtttgcttcacttcagatgttcttgagtgatacccttagaactttgtgctacctctctctctctgaagggacaaaaagggtgtcccttcagaggacaccctttttcttaaaggtttctaaaaggttttcaccctttatcttaaaagggtgaaaatagcaacttagatttttgtgtaaaaatattttattcaaagaacttgtggctttttcatataatctctcattttctacatgagttcatagaagcaggtagttttcctttttcatgcagaactcaagaacagatgaaatccttcatttggataggtttatcgatttacacaaggccacaccatgtcagtggcagggataactttgaaaatcttagtcccaataaattgtgctgcattaggatattagaattttattttattttattttgttttatttttttgagatagagtctcactctgttgcccaggctggagtgcrgtggtgcaatctcagctcactgcaacctctgcctcccctgttcaagcgattctcccactcagctttccgagcagctggaactaccggcgcctgccaccacgcccggctaatttttgtatttttagtagagatggggtttcaccagcaggctagtcttgaactccagacctcaagtgattcacctgccttggcctcccaaagtgctgggattacaggcgtgagctactgtgcctggccagaatttgattcttgattagggtattttgacaagcattttcatcccagagaagtcatttagcttcccatattccatacctaagcataatacttcctatttgcattacttgtaaggttattaaaaatatcacaaaacctaaaagtttaattttttttaatttttgaaaactttcattattttctctgagggacagggtgacactctcgtccaggccggagtacagtggtgtcattatagctcactgtaatcttaaactcctgggctcaagagatcctctctccttagcctcccgaatagctaggactataggcgcrtgccactccacccagctaactaaaaaacttttttttttttttttttgtagagatagggtcttgctgtgttgctcaggctggtctcgaactcctaggctaaagcagttctgccaccttgacctcccaaagtgctgggattacaggtgtaagccactgtgcctggcctagagtttgtggtttttaacagacatgataaaaatgtaattagatttgaggttaggaaaatcgtagtattaaatgttagagtggttctgtttatttaaagtatgtgttctgttgttaaacgacccacatagtatttcagatgtttggcttaaattttctaaaatatattttttgttgacaaagtacaaggagtaactgcgtgttttaacagcaagaaaaaataatttgtacacaatgttacttttcctgataaatagccactggttgtaatcagttaggatttatttttattttraattcactatcaggtttggcaaatacgtgtagacctacatttattaaatcatgatggaaatattattgatgctgccagcattgctgcaatcgtggccttatgtcatttccgaagacctgatgtctctgtccaaggagatgaagtaacactggtaagctcctatgtgaaccaggatccttgatatgaatgaatgaggagggtcttaaatgtgcaggcaacttgtttttagtgaagttatgttgtagatggcaattgggtcgtttctraaaatttgtttgtaagactgaaactgcatatggtcaaaattgccctggaaatctcttaaccgttcctctgttgaaacatttgtcagtaagaacataccctagcctggttttccagaatagaattagatgactattttggattgaacattagatgaagtggttgacttatgtttaggggccatatgtgtgaaaaatacatgaatctcagcacagtgagatgcttaccctgcaagaggcatgcaatagctgaaaagcactgaggaatcagcaggttcatatttgtctccaggacttttgttcattaggcaaagagatgacgaaagtccatcagaaatacctggagggcttgttaaaacgtatagccagactactcccaaagtaaaacagggctaggacttaagattttgtacttctaactttgagttcttaggtaatactgatgttgctggtccagggagcacattttgaaaaccattgacctacgttgtctttatcttttgttctgagtatgtcagttttgatttatataaattacatgctagaatagtgaaagtgcactgtagttgtagtttgaatcctgaagttgcaaaaggacacatcagatgcccagattttctaagcaatgattcataattttgattttgggcagtagactgaagcagaaccattaaaaagtgagaaatagggacaaaggtttattaacagtagaggtaatattcttttagaggagggagtttatataaggaagtgaaaaaaagtagaaagcgattactacacttgaaaaatcaattaaagaatactgtggtgttattgctagtgggaatgtaaaatggtacagccatgttggaaaagtttggtagcttaagttttaagtgtagacagcattctatattcagaaaaataacagtagaagaaaatattcttttttttttttttgagacagggtctcactccgttgtccaggctggggtgcagtggcgtgatctcggctcactgtaacctctgcctcctggacttaagcaatcctcccacctcagtctcctgagtagtggggactacaggtatgtgccacccacttgactaatttttgtattttttgtagagatatggtttcaccaaattgcccaggctggtctcgaactcctgggctcaagtgatcctcccaccttggcctcccaaactgttgggattacaggcgtgagccaccatgcccagctgaaaacactctcttatatgtacatctttcagcaggtttgaccttgtaatttttttttttcttttgagacaaagtttcactgttgttgcctaggctagagtacaatggcgtgatctcggctcactgcagcctccgcctcccggattcaagcgattctcctgcctcagcctcccaagtagctgggattgcaggcatgtgcaaccacgcctggctaattttgtatttttagtagagacagggtttctccatgttggtcaggctggtcttgaactcccaacctcgtccacatcggccttccaaagtgctgggattacagacgtgagccactgcccccagccgaccttataatgttaaaacaaactgcaatggcttaaaattagaaaaaaaaaaaaaaattctagcaattccatgcctaagaatctacgggaggaataagagcttactacgttcagagacttcaatgcaagtgttcatagcatcatttgttagccagaaactggaaacaatccaaatgtccagctggtgaatagataaaatgtcatatatacaaataatggaatgctgttcagtaatgaaaagaactgaactactgataaatgctgcaaggtgcatgaaacatgctaagttgaaagaagccaggcacaaaacattacaactttttttttttccatttatatagaatgctcagaaagtcagatttatagagacagaaataagatagatcagtgattccttggggctagggtgggagtacaccagactcctacggactacagacagattcaaaggaattttggggagtaatggaaatgttaaaaaactagattgtggtgatgggtccgtaaatgtatccataactatacatttactaaaaattgaatcatatacttaaaatgagtggattttggctgggcgtggtggctcacacctgtaattccagcactttgggaggccaaggcaggtggatcacctcaggttgggagttcgagaccagcctgaccaacatggagaaaccccgtctactaaaaatacaaaattagccgggcgtggtggcacatgcctgtaatcccacctacttgggaggctgacataggagaatcgcatgagcccaggaggcggaggttgccgggagctgacatcttgccattgcactccagcctgggcaacaagagtgaaacttcatctccaaaaaaaaaagtggattttatgggatgtaaattatgtgtcagtaaatttttgaaaaagctttttgaaaaagttgtacagtttgaggaacgtgagtggcaaaatcaaactggtaattaattaaaagaagttatttaggtactcaaaagaataaaggaacttcattttttagtatttgatgtgcaagatgatttttttggatgttcataacttagtgactataattattaaacattttcttttgaaacagtatacacctgaagagcgtgatcctgtaccattaagtatccaccacatgcccatttgtgtcagttttgcctttttccagcaagggtaagcctcgccttattatgggccaaaattacaaatgcagctaggaattttattgctctactcaagtatgtcatgttaatattaaacaaacacttcccttaatagtaaagcaccttgtatttcctttctttctttgtaagggcattagttggcaaagaactttctcagtagaagtaacaaaactcttwtactttgatgaagatacttcccaacatttttcttttcatgggatacttataaacttaggaatttactatggcatggtagtgttttatgtttcctaaggctgtacagtggttaagagaattatatgctaggctctaatttgggacagtggggtgagaattactgtgggttattggaagataggggactttggaacatattagatggagtagttctaggagtcggttacaaggggggatggttcacagactggaggaaaaaaatctaatgttcttaagttttccagcrttttcattacttaactgctaaatcctcctgtggcagaaaacttggagttyttcaggtccatttaatggtgctttcaaatgaaaacttgagccttaaattcctttagaaacaagggaagataaaaatatttcacacagtgttgtgcacaaggactagagaaamcacaagttttagtgattgtaagtgtagagttttatcagaggaaaatgggccagcattgtccagtagaaataaaatgtgaaccatatatrtaattttcttattttcttcttttttttgagatgaggtctggctttgttgcccaatttggatttcagcagcgtgatttttgctcattacaacctctgctttctgggctcaatgaattcttcagcctcagccttccgagtagttgagactacaggcatgcaccaccatgcctagctaatttttgtattttttttgtaaaaaagaggttttgccatattgcccaggctggtctggaactcctgagttcaaaagtgatctagctacctcagcctcccaaaatgctggattacggggatgagccaccatgcctggctgtttctttttcttttcttttcttttttttttttaagacaaggtctccctctgtcacccaggcttgagtgcagtggcgtgatcatgttttattgcagcctcaacctctcaggctcaagtgattctcctgcctcagcctcctgagtagctgggaccacaggtgcacaccatgcccagctaatttctttattttttgtagagatgggatttcactacgttgcccaggatggtctgaagctcctgggctcaagtgatccgcctatctccacctcccaaagtgctaggattataggcttgagccaccatgcgcagcatttgttactttttaaattttttttttatttttttgtgacagggtctcactctcacccaggctggagtgcagtggtgtgatcatagctcactgcagcctacttctgagctcaagtgatcctcccacctcagccttccaagtagctgggactataggtgtgtggcatacccagctaatttaaaaaaattttttttgtagagacagggtctcactttgttgcccaggctggtcccaaactcatgagctcaagtgatcytgcagtcctgacctcccaaagtgctgggattacaagcatgagccaccatgcctggcctcatatgtgtaatttaatattttccagtagtcacattaaaaaggtaaaattaatttttatatatttttaattaatatattttcacgttaatgaaataaaatgattaatgaaataatcagtattttaataattactcatgagatagtctacattcttttgtttccactaagtctctgaaatccaatattttacatactctgattacatttcaagggctcagtaaccacaggtgactattggcaaatgtaccggacagtgcagaaatagacagtatttttttcatgagccattagcagaacgcagtagaactttggagtacaggacattagggcaactttagggttaaccaatttaacattatctaagtttttattaatgagccagaagtcatttaatcaaagagatagcattaggtttagattatatatcatttaagtaaatccaatctgaacttaatgtgatttcattgtaataactagagatacccacttagcattcatttgtgttcataaacacaataattttcttgtctctttccccatttcagtgacccaaatcygtaggctcagacctttattctctgttgactttattgatgccatcttttaaaaattcattacccaagaaatggtaagcattcggtctcagatttgttcaggtccatttaacattcatttcagaacatatttattggtggatcccaatgaacgagaagaacgtgtgatggatggcttgctggtgattgccatgaacaaacatcgagagatttgtactatccagtccagtggtgggataatgctactaaaagatcaagttagtgctttgattaatgtcccattaataataggttgcttctctttagatgctttttcttgtcttttaacaaaaatccaatggggatacttccagtgatttattctaggatgtgttagaatctggtttcagtactgtcactattaaatacattctgttgactggtggctatgaggtatcctcctccttcctaccttggtgctcccgtgtctggcctgctggagtctgacccttccacctagaagcagggtctagtgaagaaaaagatttatatccctattaaaaaaaaaaaaagtggccgggcatgttggcttacgcctgtaatcccagcactttgggaggccgtggctggtggatcacttgaggtcaggagttcaagaccagcctggccaacatggtgaaacccatctctactaaaaatacaaaattagctgggtgtggtggctggcgcacgcctgtaatcccagctacttgggaggctgaggcaggagaattgcttgaatccgggaggcagaggttgcagtgagctgagatcgtgccattgttctccagtctgggcaacaacagcaaaattccatctgaaaaaataaaaaataaaataaataaataaatattagccgagcttggtggtgcatgcgtgtggtcctggccacttgggaggctgaggtgggaggattgcttgagcctaggaggtggaggttgagtgagctgagatcgtgtcactgcattccagcctgggctacggaatgagaccctgtctcaaaagcaaataaaaatttttaaacatccaatagtagacattatgtaaaaagatagttttacttgcacttttagaactacaattggcagtagttctgaaacccagctatatatcatattcacatgggagcttttagaaaatagatctccatatagcatacagtgtagatgattaaaagcttctttagtttgaattctagktctgcccccatactagctgatcttgggcaaatgattttatatctttgggtctcactttctttatctgtaaaatagggaatgatgttattgccaacaccttgttgttataaggatataaatatattgcacagtgtctagcacacatttattaagtgtgcaataaatgttagtttctggtatcatcatcatcatctttaccagcatcacaagtactacccagattacccacagaaaaaggaagttagtgcatcctggagcatatatgtgtctgtggcctcttctgtggtatcttttatactgttgtataagaaagtttttatgtctgttcccttgatgtgacagtccttcacatatcttaaaacaactttcacatcttgccttaatctgtgtttacattgtattcatgtttggaaaagtcaggcttaaattataaaggtagaaaaatttcatggttttagtttcattagagaaaactatttggtttattgtctttaaacaacagaattcacttttataaataggttctgagatgcagtaaaatcgctggtgtgaaagtagcagaaattacagagctaatattgaaagctttggagaatgaccaaaaagtaaggtaagtaacttttccaraactaagtggtcttttattttcattttttaaatttttattattttttttagtatargcaagctttattatgcatgaacttgatttcacatacaaagttagaatggcaatttcaattaaaattgactcattaaaaagtgtaaataccatggtatagttatgttacccaaaactccgaaaggtagtgaaactggtaacagatattgctactcatctttggacggatacaataaaagtattaatgaaactggttcccagacaagtatgtgtcacttgctcctgtgccttagggaggagaggatgttataacacaagcattattgatgcagtgacttgtggatagttgctccttattaacactgctaaaattaggttcacgttttttactttgtgtgggagctggtgattcttgtccttttgttttatgagggatatctttcaaagtgctggcatcaaacccacttattgcaaaatgcatcacagatgggaatttaagtctgggtcaagtccagaattctaaaacaataragaggaaagaccctcctaagagcaagaggtcttcattaatccagactccaagatacaacacagggaacaggaaatggccctaaatggtcttttaatatattttttttcttaaggatcttccttgaacgagggcaaccatataaatttcacacttgatctttccttatttgttaatctgaattgagtatactatttaatgtgtttttagaaaattggacttgttatattttctgcaatttaaatgtaacctatattgaaaaatcatataagatttttgtttgttttttgagatgaagtctcacttctcactctgtcacctaggctatagtgcatttgtgcaatctcagctcactgcagcctccgcctcatggcttcaagtgattctcctgcctcagcctcccaaatagctgagattacagatgcataccaccatgcccggctaatttttatatttttagtagggatggggtttcgccgttttggccaggccggtctcaaactcctgacctcaggtgatccacccgcctgggcctcccaaaatattaggattacaggtgtgagccaccgtgcctggagacataagatttttctttagcagttaacattttcttaggataaaaataatctagtaactcaaattaatggaaggaaacaggttgatttccatctctacctcttactgtgctatcttaagcaagatacataacccagcatttcagtgtcctcttctataatatgggatattaacactacctggtagggctgatttgagggttagagaatagtatattttaagcacctagcacatggtctggcacgtggtttaataaatgattatgctaactatttactcttgttaggcataataaattggtgaggttaagttagataaactaactctcttccaatatttttcatccaccaaaggataaaataatagtttttttcccttcctgtcttctatccaatctgttaccttcctcccccttccttcccaccaaaaaaacccccacatacaggaaagaaggtggaaagtttggttttgcagagtctrtagcaaatcaaaggatcacagcatttaaaatggaaaaggcccctattgatacctcggatgtagaagaaaaagcagaagaaatcattgctgaagcagaacctccttcagaagtgtatctttatttggtggtttttgcagtaacaagrttcataacacttggcattataatattaggctatatgaaggatgtgtatactgaaattagtttttgtaaacactgtactttgttagagaaaacacttaaaatacaagatagagatgtgagtcatattctgttgatggtataacattcagcttctattcagttatcctggaaaaaacagattttaaggaccaatttaatttagtactataactaaaatgttgagagaatctgtctcttcacatttcttattaattgcatccataaaatcttgcctgagttttttttcttcttcattgttcagccatccatagtgtagctatattaagttttttttcccctaggaacttggggcacacttgaatcaatcttacaagaagaaaactttcattctcatcttcarcagttcatcaaatagcaatatttttgttactcagttttcttaacttgttaagtgtttctacacctgtgctatggactcctggaactgcccaaattggagagggagtagaaaactcctggggtgatcttgaagactctgagaaggaagatgatgaaggcggtggtgatcaagctrtcattcttgatggtataaaaatggacactggagtagaagtctctgatattggaagccaaggtaggtgacactttatggcacacttattactatatattacatacatatagtattaccgtatagttatatatataatgcataaaatgtgtgtatatttatattatcactgtatatagtaatatatagcatattagctatatagagatgtatagtggataaataacatacaggatactatatagagagaatatagatatgtagttatatatagggatgtaagtattgcatttttagaggggctaaatattgtgatttaaatttcaactaaattattgtggctagctgcaatactaatgctactttctaaaagaatatgcatatctttgtagagtagtggaacactggcataaatgatagtgatatttttaattaaaaaaattttgtgtgtgtgtatgtatgtgggtgggttttaagggaatgagtttcttgaagatctkattcctccctgctgtctttttttttgtagtttctagactgaaacaaaaagcccatcccatatcataacatataatactgcctaaataaaactttctatgatgatagaaacattaagtatctacactggtatagcagccactagccccacatggctagtgaacacttgaaatgtggcttgtgttactgagaactgaattttaaattttacttaatacaaaattaagcagccacatgtggctagtggctaccatgctagacatcgcagtattagaacataaaaaaattctataagtaactagaatactggtagtcctagacgtttcttgcattctgaaagccatagaactgaagttgttatgtatggttatttctactttttaaaaaaagcaaattcttgctggtctatataatagaatgacttattttcttacgtggtaagaacagaaatcctacaaggaactgggagctaggctggcagggaaaattgaaggtgatgtgtttaataggaatgtaatgcaaatacttctgttttcaaagagagaaattattgcttatgaacattactggagcctgggctttttgtttttttacttaagtaaataggtaaggaaaaaatttcccattgattgggacccttactcaaatttcccagtggttacttctatttggtattattcttccagaacttgttccaggtatttatttactctctgtgcagtgatgtaagctaatgctgcatatacttgtatagcattgaatataactagttggtttaacaattctcttattgttgaagatgtaagttgtttccattttctcactgttaatatccttgcacttgcatatacctcttatatgtttgtttagtgtattcttctaacagtgaataatattttcaactgaatataatgaaggtggacctaagcattggaaaaatggagcaggtacagccttcctaaagcatgtgaacaaagggagaaactaattgaaaactaaaaatacaaataattgatatgggttaattcacattttatgtatatcattaactaataagcaggagaaaaatgggcaaaatacatggagcagttctcaaagtatacaatggccagtaatatttttcatggtcagccctgacagtaatacaaataaaatccaaagaaaaatgacatggcattttttgttactgtattttgggcagtattaaaaacaccagcaatgccaaaggtatatgggaaatgggttcttttatttcttggaatgtaaactggaactatttctggaggaatagagtagcacaaacaattcagttgtctctacaaaagatgctatatacatttccccctagcttttctattatgacatgtaccaaattgtcacaccattcaagcacctgtaggaaataagagtttaaagaaacaaatgttacagatgagttctagagtgctctaagaagctgatttaaagaaaagattaagcctccacctagagttttatttttattttttgggatggagtcttgctctgtcacccagactggagtgcagtggcactgcaacctccacctccatgggttcaagcgattctcatgcctcagcctcgagtagctgggcctacaagcacatgccaccacgcctggctaatttttctattatttttaatagagctggggtttcaccatgttggccagactggactcgagttcctgacctcaggtaatccacctgcctcagcctaccaaaatgtgggtattaaaagtgtgagccaccacgcccagccccagaaataagagtttagaacgtctgatagaaataaattcatgtagaaataaattttgyaagagattgcttaacttttttttttttttttaaattaataaaaaaacaaagatgctcccataatactctcagatagtgaagaagaagaaatgatcattttggaaccagacaagaatccaaagaaaataaggtaacaaatttctggtttatttcaaatgtatacatatactcaacacttatagaggtttgctctctggttttactctcatcttgccacatgactrtaaacaaaaagacatccctttttcattagagatccatctgttctgtgatttttttaccttgtgatttataaaaattaggacctaaatctataatataaacttcttggatgccagtcttactcatagctgacacattttagatcctactggaaaactaagaaatgcctcttatttcartaatccaaaacttaacatactcttagtaaattcttactttgctttattcacagaacacagaccaccagtgcaaaacaagaaaaagcaccaastaaaaagccagtgaaaagaagaaaaaagaagagagctgccaattaaagctaacagttgtatatctgtatatataactattaaaagggatatttattccattctgagaaccctgggtattttttattcacaaatccattataaaatctagcaggattttaaaaatagttttttgtttttaatgtgctttaaaataataaaccttctggagcatttctcgtctgttaatttgcatataagcttcccaccctcttccactcccaacctctgttgagtttacctcgcaaaacctaaacaaacaggttttacaaagagcgaaaaagtctggggaatctctactgtatctatctctgaatactgtattcagatatgcttagattagattatgcccaagtcagcaaattgatccagttgcttaggaaaatgaatgtcagaatttgagggtctgttttcctaaacctactttaattttagaggaaggcttttcacttcccattatatagtaaaccaagtaaacttctttactaagcaaaatcctgaagaagttaaatttgacttgcaaagttttccaaatcaatttattatcctgacagctggcatcattaatactttaacaaaaccacttaaaattagccaaatatctaagacagatacaratacaaaagatatacaaattaaaaccatttaaaaagtaatagataccataatttgtacttggccacaacttctgtattcagaaatgattgtaaaattaaaacctaagttaaaaactgtacaccatatactttgagtgatttacatctyagaaaacaaaggcagtctttcattgttacagatttagtgtctctggtgggttgaggagagaaacaccatgatacctgtaagtasggaaaaaaaaagcatttttagtaaacactcactgggtaaaggagatcatggaataatgtttgtactcatgtattgggaactaaaaaatgctatttctgtctgaccgacttgatggttttagaaacactgtctggtccctgaaacacacatgcatgcccccttccttctctcttctcccccagacccagggcagaaagcatgaactacaaccttcttcaaacacataaccaatttagagaacagcttctcaaggaggctatggcagattcatgaataaggttaaaatgtcaaagatctctgaaccataatctagaaaagtaagcttcaatatccaagttaattcttactttgaatttttgtacttttctcttattgactgttgtgcatgctgtggtgctttgaggtaggtctggtgaaggtccatgagacaaggcttaagactttccagggtatatccagtctttcgtattaatgattcaggctacagagaagggaatagagaacccctgagttttgcttttagtaacacaccaaacacagtaaatagttggcattaagcttatgttaaattccagtactaatctttaacttttccaactactagttttctcaggccattattccatccctcgatccattttctactactttccctgccagcaacaggtcagatgcttttaaaaaagctcacctttcaatccaagttacaactaagcttactacctaacaaacactgttcaacaggtaacatgccttaaacagtatataatcatccctcagtgtacatgagggattggttccaggacccttcccaaatatacccaaatctgtacatattcaagtcctgcagtcacccttccatatatatgggttgtgaatcccctgaatactgtagtttcagtccacatttgattggaaaaaaatccatgtgtaagtggactcacacagttcaaacctgtgtttttcaaaggtcaactatatatatttgaagtttttccaagtaagaacatctaggcaaccctcagttttgtaggacaattattatttaatctggcacaggcatttcagtcacaagataggtgtgtgaagaccgtaatacatacccagctttgtcccgtgactgtgtagagtgctaaatgaaaggcagctccagcaataactgatggcaaatacttgaggtatgggtcagcatctatcaaacttaattctcccaaaaactggaataaaaaatactttatgatcacaagagcgtttagaattcaaatgtcaaacctctgccttctaacctaattttttcctgcctttgataacggctctgtagcaactctagaaaaaatatctcacagcctcatctttaaacatatcaatcattttagtgttttgttccatcctcatcctgtattttccctcctttattaacttttaaaaaacaactcttctgactacccatccccaagatgtcatccttagacctctgcttctagtgctttcctgatatagattatcttttgccagcagtaggctttcttccatactgcagcattaatctccctctgaatactaaatctcttcaccactgctgtacaaaggaactaggttcctttacaaaggaattagggcttacccctaattattaccaaagaatcaccattcaacaaaatgaaagttaactcaccattgctaaactttcaactttgcagtttgcaggctgctgatgcagaaagtattgggtaagaaactgatttactgttggagcagctaagtcaaaagtaaggactttcaaaactagatgctccattctcagaacttgtttcttggtgtaggtatcatctgtaatgtacacaaactctgctacttctggggggtatatttcttcaaactttctacaatgaaaaaagttttaagtaatcagtcctaaaagagaagcaagcttccttatcccagttctgaaatcccattagcagaatatggaatgaatccaaaatccacaccaactgcatttccagacacttgatcatcatttctagtagagactggatagctaattgctaattaaaaggcccaaatcaataaaggacttttgagatattttccccagttcagtcaaaggaagtaaatgaaaggcatgagacttctcgagatgggaacaatgccagagttcaccaagtagctgaaaatttaggaaatacaagtcttaggaaaacatgtttcatgttttcatttttaaatttagtttttctttcttttttttttttttttttgagacaagagtcttgctctgtcgcccaggccagagtgcagtggtgcaatcttagctcgctgcaacttccacctcctgggttcaagcgattctcttgcctcagcctccctagtagctgagattacaggcatgcatcaccatgcccagctaatttttgtatttttagtagagacagggtttcgccatgatggccaggctggtctcaaactcctgacctcaagtgatccgcccacctcggcctcccaaagtgctgggattacaggcgcgagccaccgcacccagcctttacttcttaataaaagagacactgcttatatgccagaaagtaatattggaaggaaaatgttttaaaatttgtaacctagtgtactatatcatgttcaaggaatccagttgggggaaaattagtgttctagattagaacagtttcatcctcctccactgccctaagccccagcacattgccatccctaaagtagtcactgactctgcctggtgtatgttaaaaggtcaccattaaaaaaatcaatttcttccctagacaaaaggtcgtgatcacttttaaacaaaccaaggtagacttacgaggctaacagcatagcagcagtgcccacaagctgaagttttcctctcagcactgacatggaagacaggaacctatcaatgtagttcacagccaaatgcagggtctcattytgtagtttatattcttctcctacttcaactaaccagtccacgaggatagctctcatactgttagtgatgtctggctgtttcttcatgtaacccactttaggtttacatttaacctattgagaaaattatttatagtgttaaaattattctagtgtaaaaactgcaattagattattttaccattaattacgagaggctacatgctataaacttaactgtagcattagaataattcattagtttaaaaatttaaacattatcctctcaatttcatttagccacatttaacaaatacattatacaaactggattcagagaacctttacctccatttccctaaggtatgtgtgaatatcctcatggtagtctggtacttcattaacactcactggcttttcatcttctaatayaattgacatgtccatagtatgtggtgactctgggacaattcaaaagatatgattaaattaattgtttgcctatttagtttaatagctaaaaatgactgccatggaaggaatctcatattaacaaagcacttatttcttcaaactaaaaagagcttctcatgacaaaatatgtagaatattttaccctagtctcagtatctctgtacatagaactttggaatgattttagttaatgagggaaaaaaaaaaaaacatattggtaggcccctaacaggaaaatgagaatcaggtattatcttaaagtatccatcttccacaacagaaaggagcaaatggcatggtggttctgttaggacagaacacttttaaaatccaagttttgagataatatctaagatttgtcccaagagaaactgcagatcccagagtctgacatatataaagcacaagtaggcaatagctagcatcagttaaatggcctctattaacaagtgttattaagaaattaggtttgttatgggcaaatggattaacactataaataatttattttttgtagtataaattattttgaagcaaagagtatcatccattattcctttcacttcaaagatcaccttgagattaaacattttctgcaaaattttgataaaaacacacaaattattatttccaaaggacttttcctgctcacccctccttcctcacaatcaatacaactaaaactaaaatgagattggatttagtgagctgtccagtgactcaatatccctagggcaaagaaatagtacaaactgcaaagagctgtttacagaagctactttaatacatgggtaagagtaaacagccatggtacaactatttacttgtaggaggaaaagtgtcactttctggtatcagatgctaatccagactggttttatagaaacaaaattataaaactggaagagacgttatgtaatcacaatatttaagactgcatcttcaaatagcactaagtgatatataagtgagttaaataaaactgaaatctattctcccaaccaagaacacatttatgggatcagattaaaataagcatttaagatctaattataattagattgatgtgactggcagtgaacctgaaagagcactggataaggatctttttgtatgtcaccaagtcaagtgttagctgtgagatctgagataagtcacatcctttctaagccttgttacattaaacctaactcactatagtcaaaatgactacataagacatcttaaaatgcaaatcattaatatcatctaataattataattaccgtaattccacacagattttccttaaaacttaccaaaactaccatccattggataatcaagagggaccaatggttttctgggtccaggtaaactaatggctgaattaaaagccagggcatcttcacgctctattttttgagattcagctggcttctyctgagcttctttttctgcttcatccacatgaatggtgaacgcaggctgtttactgtttgctttccaaggaggaacggtgacatgctcatcatttacaggaagatccttaaggggtgcaacctaaaaaaaaattaataactggctttgagcctactagtcttgcattctttctcttatgggtgttggcctttgctttttctcccaaatactctatcaggaattaaactttctgggacaaagaagagtttcagtattcaaaagagaagggatgttcccatttgtcacaggcattcccacaaaggctatcaatagataacactaggtggaattatgcaaaacttatcagggccacaagaagggtcgggtgacaggccaatacgtgacaagtttaggaaagacagcaaaaaaattgttggttcaccactgtcgcccgagggtggagcaacagagcaaatccggctaaaatggcggaatttgccaaaagcaaagtattttg

SEQ ID NO: 95813 - DNA, 126342 bp, Homo sapiens
  misc_feature (1)...(126342): n = A,T,C or G
ccagaagacctccactgccctccaggacttcgtgcctgtctgtgttttcaatggggaaaggtacacactatactgacactatatatttttacaaatttttaagaaaggtttttcctgttttcctatgtctttttaatcttctttttgatacttgagtagaaggatttttttttcagttcatatatataatgggagaggtagaatttagaggccgattttaaatgagtatctaaaagggttaattacatatagatgctggctcctggtgagataaagtcaagctcaattaaggtcactgcttgaaatctgattgtctttctaagagcttttcatctgtaacttgcatattctggaacaagtgttcaattgtaattagcaacatttttcacttaattttatttaattttagaagtctaccaactaacaggtttatctgtttcaataaatgagcagctactatgtgcagtactatgccaagtgctacaggcattcctgtacacatcaccctggattttacctgcaagaaagaaggggatggggctgagtggcggtaaaaagaatgcaaagataaatatttgaaaayataaatgatgcttttatgaagcagaataggaaaggagccataagatgcaattaaagtgctacaggagttcaaaggagagcaattacactagtcccttcttatccaagagggcatccattccaagccccccagtgaatacctgaaaccatggatagtactgcactgtacatattttatatatatatatatatatatatatatgtactatggtttgtagacatacatacctatgataaagtttttaatttatacattaggcacgttaagagattaacaataactaataataaaatagaacaattataacaatataccttcataaaagttacgtgaacatagtgtctctctttctcaaaatatcttatcatactgtactgaggaaaactgaaaccttggaaagtgaaaccatgaataaggggggactgggggactactgtacctctgtttgaggtgaggcagaaagggtttcatggaaaaggagggtgtgagatgagcacacatgcttggattttggccagcagagatggcagaaggcaaaaacaggggtagaaacataaagatacaagatatgactaactagaatatccaaacagggaagctttgactgtcattgtgaatgaccttgtaaatggggtcccgtaggcagtaaggagacagggataaaatgactggcacctggcagtcagggcaaggaggccctgaggcagggagatgagttaggagactctgtaggactaaagcaaataaacaagagaatccattcctataattttgagaaagtgggctgcaagggatttgagtatgtgtttgttcaggagatggtaaaaggaggtaaaggaaaggaaggtgccagaaaaaccagcaggagcaaccccgtgaatagcttatctagatggaaattttcaacagcgagttgaaaatatgcctcaagggagaatagatacagatgtggaagcattggtgctagagtcctaaggatccctgggattctcaagataaacagtactatctgctctttttaagtttctcctcaaaaatttatttcattcttagtggaacatttttctttaggaagtaggaggagataacacagcaaagtaagggtcagagatggaacagtcagagaggtcgaaagagctcccaggtggtatggtatcagagaagttaaaggaaaagagaggtttagagagtgagagtacgagagattaacctcctcaaacactgcagagaagttcaatggcatgaacactaagcaaagaccttccccactaattctgtcatatactattaagacacctggcatagcacttattatgtaatattttgcttattattcttcgccattaggtagggactacttgatattgttaatttttttattttcattatgcttcactagtaaatgagtgactgaatggatgaacacatgaatgaaaatgttaattgtgatggaaatagtagtttcagcagagaagtgggtgtggaagcccaattccaatgcctaaaataaacaaataatggtaagaaaagtcaaggagatatgctgagatatatagttttcttttttaaggaaaaaccaaacaaccccaaaactcaagttcttataatgtttggctttaattgtgatgattaaaaaaaaaaaaagaactgccatcgtatcaggaaatgttttttcagacagctagtttagaggagaaagttctgctaagacatttctgtttgagacagttgacccagtgggacttttggaaagatttagattataagaaaagcctctgacaaatatctatgaaagcaagattaaaacaataatgtacacaatcaactgaggtccagcggtttgtaaaccagtgccagtcgggatgctcagagctgggaacggtgatcttcaggcagccaggtgagactaatctggagaagctttaggaaggagataaatttaagctgttttgaaaggggactattctagtcaattggcaaagagtcttaaagcacaggattaggaattttaatttgattactcgaggtaatttggagctaccccactgttgtgaagatttggtataaatgttgtttggaagatgattcatttccatagttcttaactctggctgcgtattagagttatctggagagctctgaaaaaatcctggcacccaggctgtgctccagagcaattaagtctgggatggcatcaaagcatcagtgctttgttttgtttcttaaagttctctgggtgatttcaataaagagccaaaaattaagaagcactgctctgagtataggataaattgcaaggaagcaagagagaggctagaattagaaaggttagcaaggaggctggaaattggaatctgacctagctttgtgagcagagataaaaggagtgaagctaaataaagtattctgaaggaaaacttggttggactttgtgatgcatgccagttgcatttttaaataaagctatcctccaggagtgtcactgcttttactatgatggattagttgaaaaacaagtacacaggatttgcttttgctaaaattcggggctattagcaaaattctcaatttctgtaggagcaaagcaggtcagaagagaaaagaaaatgtaatcacattaaaagtgtatgttgtttacatttgaaggaggaaacaaaattgagtgatggatgctcctgaattaagaatcaaaattcaaattttaaattgaattaccgttgggagatactgggctgtggtaaaattatgatccctttagagtaaccttgaaggaaatgaaaagtcagactattaaggacactgaagagaaagatccaccatcattctcaatcatatcattcccctttcttggaatgaagaatttgtaaccggtatgggaaatggatggtggtgtctcagtatgatgacctctcagaaagctgagttgggaaccaatgatgggagttccaatgtttaactgagaacactttaaatttatcctggcatgtcccacctttaaagtttagaggaagggcagaatgttataaaatgggaatatcatttataaaaggaaatagtgtttccttttataactgtatatgagtatttgatacaatactcatctgacactgagagaggaacttcaccggcaagagctttctgaaggggagcaatcaaagacagttattggagcaaaatcatttttctgactctaagaatgaagctgagtcttacggcagtgataagcctccatctgatagctgctgtcattacttagagcacagacttggaactgcaaatgaaagataattgttcctgtattcctgctcccaaatgctgggtctctggtagatgcagagataaagcagttggccaggagtggtgccagctttaagtcaggtaggtctgcatgtaatttgaggggcagagcctaccccaaaccctccctccctaaaacttcctcagttaacatcattctacttgcagggagcaggggtagagtaggttaggacattgtttccagaagacccttgaggaaataaaagtgcactattaaggatcactaacatatctggaaatgacattcataccctacctcccaccccaaccccagagaagctcagggcaagtaactaagtggctgggtccaaggggatgtgttaaggttaagagtcagaagggaaaagagttcacaagcctgggtagggtacagcagggaggacccatgggtgtcctgtgagaagcaagtgggcctggggcagcaagaaggacctgaaaggtcttgctgacaccccgagaagacaaaccccatccttccgctttgtctctgccttgggctccgagcccactccacttcatttcatccagccatcctgactacagggggcccaaagctactctgtgccctgggcacgtttgagtctccttaaatgcttccaattacctttgcctgggtttgtggttccaggaaagaaggttctaaattaacactgtacaaggcccccctgcatgttggtttgcaaaattaatgatcctaatggaaaagtaaattaatctttgatgcttggttgaggataaacacaaaaatcactgttttggacactggaccttcttaatacatctcatcaatagtattttctctctcccttccatgcctgccacattcacaaagagaggagacaatacaacttataacttcatctctgaatccaaagggccatgatgcacgcatttattctgcaaacacttattaatggtctggtttgtgcaaggtgcccaagagaagccaggaaaggctgcacagaggaggccacctcataacactcctcacacgtaaagtttgacttgcactttctacgttcatggtttgaaaagattgcagtaagcattttgtaaaatgtaaattacattcttcaattttaggaagaacacaatagtttttccaaaagccgcctgtcacaggtctgagggttcacagagctcttttaaggggatcggaagttctctggctgccttgctatgtttttctagccagaagtctctgctgcagtgcattgctcagttcctttcaactgaaaaattaaatctgcacttctgtcaaaatgtgtcatctacacatccggacactcatcacagttcaccaagctctacgcagagtccaggctgaaaggatggcatgccctccccaaccccacccttttgaggtctgggaagcccaggtgctggggaggagctgaacaactgtgtccagggagtgtctggcaaagccgacccagggagttccacgggagcctcggtgctatgaaaagagccagtgtccatgcatttcctcgggtgtgaatcacactgcccggtcgggcctttgggaaaaaattaatgaaggacacagtcagcgccgtagaacctgccaaatacacatcagatccagtggagtctgtgaagggggagggggagatttttccagaggcttttcttctcgttccatttctcttttgtgccccacgactgggttcttgaatgtaaaactctcagaaaggtcagggcggagcctgttttatgccccgaggagtatcttgcccacccgtaaatgctgacagacagctgcgacttcggcccaggagacccggcggggactgggtccgaccagccctctctcgcgggcgcaggtccgggacccctgaagcgagccggccgggcgcagagcgcagtcagtctgggcgctcagaagctgggagggggctccacctgggcgcccagccgcggcgggaggggcggggcccggctttccggaggcggtggcacctcctcgcgcccgagcgcgcgctccccgacgtccggcgcacgcgcgaggccggctgggagcgcgcccaagcggcggcggcggcggcggctggaggaggaggaggaggaggaggaggaggaggagggcggctgaggcgcggctggctgcgcgcgcggaggcagcggcgggggcgaccggagctggggcagagtggggagcgagggagggggaggagagagagggaggcggagggcagtgagagacgcatttccagttctcaactacgagccacgagtttgcagatggggctgctcggcggcgcctgtggctgagggagagcagcggcggcggggagcgaccgggagcggcggcagcggcggcgcggaggcggctgaggtgcgagccggtgagttaactggacccccacgccgctcgggtaacggtcgcgccgcgcgccgggccggccgggggcgccctgttgctcggcgcggcgcgccacgcggggaccctggcccgccccgcccccctcggcacctgggcttcggcgggcgcggggaagagggaccggcaggcggcggcggcggcgccgcggtcggggaggctgctggccgcccccagcccggcccgcgcggaaggggcgctcggccgggctcctgcctctctggctgcgggcggctgggcgggccggagctcggcaacgtgtctggcccatgctgcttgccgccgctccccacgcgctccccggcgcggccccgactggggctagggccgcagacgcgcggggccccttcgggcgcggggcttgggtgcctacacctctgcggcgggagtcgcggtggagcctgaatggagagccggcctgggggcggcgttgctgtgactgacacctccggggtctgtcccgagagggggtgattccgccggctcccggttctctcccgagctcggagttggtaggggaggaggctttctccaactaccgccgctacttccgaggtacgagactccagttgtttggccaaagtggctgtgggccgagcacaggctgccgcgggggcgttcgctgctgagatcgtgctcgcggattctcggtacgtttgtctgaaaccaaataggtgctggggcttttttattttggctgggtggagggtcagcaggggagtcgattgaggtatccgaccgtgtggtgacaggatgtggattggttggtagatgtttttttgcagaaggactttttaacactttactgggagtttattctcaatcctaccagtttctgggattgcagctcgagattacatttgttaaacttccatcagttgggtgtgcatctgtgtagggggtgggggtgaagcgagggagagaattgaagactgccggggaagctcagaaaattctccgcattacttataaacagccgggtaaggtcaggctagccacgttttattctttcctacgcctttggagagtgttggaattttactttgtgcttcaagtatattacaagtggtcttgtagtgtagctgagaacgtttggggtgcgttaaaatgcgtttcaattggagtatgatttagcagccatttcttcccgtgaaattttgcaaatcatttgtaaacttatgttggtcgaatataccaggcgaagtaacatttttagtaatgcggtatatagtttccgtatataggtatagcaacggacctcaagtaatattgcttattgtaggcatctactgtgcaatgatagggtagtgggtagtaggcctgattatagttatgtcttctgaggccttgttaacagtaaacaaagaacttttgtgggttgtgtcattttgaggtcatttgtaccttaaatctatcatatatttaaataggtgtttaaatgcgtgtttgcacgatgtgttactctttaaggtccatgtttccttcattctggactacggttacataatacacaaatggtaacacttttaattgctcaattttgtcctatggagactgcacaccatctttatgaaagaggtgtgtatgtgtccttactgatgccaccgaattcttgacatctggaatgtcaaaatgaattattttgcattctaggttaaatcaacactggaaaaattaaggtgtttaagcaagtctagtagctctatataagasagaatctttttttttctttaggccaactgttggatttttaaaaatgaatcatatttttaaacatttgagggagcagtttgcttctgagtctcattttaggctgaaattgttccagagcactacatagcctgcttctctctttctctccccactccccctctttttagcttgagataaccaagaagacataactgtgactctatgtgttatctttttaaaaagttgttttaaaattgaagttgcttgtttgaatatttactatccctttacatgctttactacttaataatggattagcagaataaaacagatattttaattaaatgtctttcatatttttgacatctgagctttgtaaaaatggagtagcatcatattattgctgagagagttacaaataatacaggattagtgctagtcaaaggctaattgtaaaaaaacagccagaaaataaaattaaaagaggtaagaggacgcatttatacttttgacatcactctaatataaattacctattgctaggtgacttttgaaaaagagtatcttgtaaaattcacattaggtatataatagttaataatttttccttccagagtgattcacttgatgagtgactagattttttttttttaaatcagaactctacttcaggtaagtatagttaaccatgtaagtgatgtgctgatgtttatttcaggaagaatgaacacttacccatttgataaatactgaactgtttgggaatatgtcagttattccttaaaacttaggcggagaaaaattatgctagttttgttttaactgtaggttctttagaaaagtagtcttcacatttataaatataagagcagataagcacaagagatctctttcctgatatggtgctagtattgaattaaagattttatttttttgttgtagggaccagttttgtttagtcttcctgttcagtctcacagaagctgcaatgattttcctccttttctgttacttgtatctgaccactggggggagactttacaattgggcttgaccatattccttctttacatacattggctgctaatcctgggcactttgtcaaactgctgggtagtgtgctgaggaggatgcactctgaagcaagtctcaatcaaggtgtttaatgacttttctttctttaactcacagcatgcttacaaagtatcattctttatagactgtgttattaacagtctactgttaagtggtctaagtatgcctctaacataatgaaagataagattcctgaatacattatagctttcaaagatccgactttacttgcattaatcttagaagcagtgtaggtttaattgcttgcttagagtacacagatattagttgtctggaaggatctggaaagatcatcactcttctgtgaagtgtatctatatccaaaccctttaaacaaattggtctcctcttataaaaagcttttggaggagaagatattgaagcatcccatgtagctaattttagtgttcatttcaccrcagaggggaagttcttcctttatcatagtcatatagataagattaargcccacaactttgttaaccattaagctgtgaccattattaccaggtgtaataaagtcaaaagcctggtttctactttttcttttctgacagtatttaaccttgttaatgtccaattcaataataatgaactcagtaaacagaggctgctacgtttatagtagtttagaaagaacttaagttttatgaccttccttaattatgatagactaattcaaagacctttctataatctttatcatagtaagtatattcacagagtaatgaacagaacaaaattagtttctatttttccttcatcctaggttattttccttctttcctttaagatgactttgctttcatccgaaaattcttttttccttttttcctttttttttttttttaatatagtgtactagaagagatactttctgcttaggaatatattcatctctggctaactttaggattgtgttaagtacttgggaatggaagtttctaaaagcctatctgtcagagttatcactgatacaaggcaaaatgagaattaaagacaatataatgaatatttcataaagctcaagttattttcagatcctttctactgcttgctagttttgtacatgatttaatccctccttcaccaatttacatcttttcctcttaaatctatcatttctttaccctcttcctccactttttgctatatttcatctacattgcccttcattttgttcctcatcaatgccatggcttgctcctaacttagggcttttgcactatgttcaytctgttgggaactcttcctaaatcattacatgagtgactacttttcatcatttcatgttgtagttcaaatatcatcttttcagacaagcattgctacctaaccatccttccagaatgacactagcctcatccccctcaatcccattaccttttttacttaaaaatttcttcaaaccatttatcagtatctgaaattatgtttttatattattttataatctccatactcactagaatataagccccgtgatatcaatgatcttgtctctttttgtttttgtttttgagatagaatctcactcggtcaccccaggctggagtgcagtggtgtgtgtgatcacggctcactgcagcctggaactcctaggctcaagtgatcctcccacctcagcctcctggtagctaggactataggcaacaactaccatgccgagctaattaaaaaaaaaaaattctgtagaaatggagtcttgctgtgtgtgttgcccaggctgctctcaaactcctgatctcaagggattctctcgcctcagtgcctcaaagcactgggatcataagcatgaaccaccacaccctgctgatcttgtctcttttgattaacactatatttcaaggacttagacctgttcctggcacatagctgtcattaaataaatcatccttttaaaaaatctgaggtcatgttctttctgaggtttcggtgttcaaatgctcctttataaaatgatagtagtatggtaaacaggcctcttttggccataagtaatagaaatccattctagttgttataaagggaatttatcgttcaaatgcagccaatgtccagtggaatgcaaggactgggactccagtgcctgcagggcacatcatatcgtttctctcttcttctctgtgcgtttgcttcattccttctcttgctgcagaggaccacttctagtcctcttagtggaaaatatggccaccagtagcttctgagttttcatgataccagcctgggaaactggagaaaggttcatctagttcttccctgttcaataaactatatctcattattagaacttggttgtacttgctgtaaccacatgtaatgggattaaacagacaatccaagtaggtgcccctgtgataattaatgttcatacttattcatctgctgcaaaacactcgtctctcctctttttaaatttgatcttgaaatctgaagtatctgaaaagcactcttcctggagatatagaaaagaaatgtgatatctttcatgggcatgatttgcagtttgattgaggaagataaaatatatacaaaaaggaagtaaaataaaaatagcatgataatggaggaactggtagaaatatttgcaatttgtatgataaataagagtctaacttcctttatataaagtacctactaaccaattaggaaaagaccaaccatcaagtgggcaaagatcatgaacagagtaattctcagaaaaggaaatgcaagtgttttgtaagcatctgtaaaggtattcaacctcacacataatacaaatattataaataaaaactatgagatactgtttcacctactgacagatggaaaatgtttgataatacttttgaagaggctattagttaacaggggctttcacattgttggtggaaacacaaatcaaaatctgatgtggttgaaatttctgaagagcattaaggtaaatagaaaaggctggaaatatgccttaattgatacagatgtttgtgaaagggtaaaaagttaatgcacaacttatttgaacactaacttgcattgctttgtttttggctaaagtcataaacaaactgaaacagcagkcttcctcccccaaaaagagataccttttgagtggtatttagttacccctttccatcttctccattcccctttcttctaccccagtactggtaaagttgtttataaatcaccgagattttccgatactttgtatccttcacacagcccagcactttgttacctacttagtagcactaagtaaagatttaattgaaggagcttagcttatcacctttttatagacccagttcataattcttatgtttttggaagaaatcttttataaaaagtgattttcaatttcatttgataaatctacttagaatatttattagaataggcaatagagcaattttttataaatcttggtttattgtatagcatattaatggaactttttcatagttgctttgttctgtaggatattattagatattagttgggtaggattaatatttttaaaagatagaatagggcagctggagatatgtgggacttttaaagaaaaatgtatgagaaagtgtggggaaaatgattctctgagcagactgggggccatatgcttaggaaaggaaaagtgaaaggtgagggattcgtttagagaaattctgtggtggaactcagaggggtacatgttgggagaagttttaacttaggaaaatactaagctgatttacttaaatgcatatttcaaggataaatactttatattttgttctgtaggtcatttttaccatgaagtgactctggcagggattctttacctaagtgggcatcagaatcctttggagctatcctacgctaaaggattctaatttagtaggtctggtatggggcaggagcatgtttatattgttaaaatccccaggagccaccatttgagtgtaaaataatacatcctgtggaatattccattttaataatgaaatcattcaacaaagcttttgaggttgtatataatttaggtaactctaatgctggaacttggtctctcaccaggtcaatacttctgcacatacctcattgatccccattgctttactctcttgcatactcttccctcctctgccttcttgtttcttttctactaatgaatattcaggcatggttctccaaggaagccatcattaggtggcctcatccataatttatcttttcagtacagaacaaattataacacagtgcttatacaactggcaagtacactcatcacatgagtagatgatttatgtgttttcgttcacatgagccttgaacaaatatacccagttttactagttgagcttccttgttttttcttcttgctatcaagaggttggcgtttagtcatagttaatgctgatgtaaacatttgataatattatagataccaccatgtttcaaggtctatgttaaatgctctccacacattatctcatctgcttgttgcagattttaaaattatgttttttaagtcactaaaatctttttatgattgtattagttttctgtgactgctgtgacaaattgccacagacttagtggcttataaataaatgtattctcttacgattctgaaggccagacatttgaaatcagtatwattgggccaaaatcaaggtgtcaacagggacatttttcctccaaagaatctaagggagaacttacttgttgccttttccagtttctggtggcttctggcattccttggcttgcggctacacactgcagtcttcaaggctggcatttgaaatctttcagctctgtgtctttcatttccccacgtgtgtgtgtgtgtgtgtgtgtgtgtgtgtgtgtgtgtgtgtgtgtcagagagaaagggaaatctccctctgtgaaggacacttgtgaaggcatttagtgctctctggaataacctccccatcacaagatctttaatcacacctgtgaaactttccaaatgcggtgacattcataggtgtcaggaattaagacatagatatcttgtggagggggagactattattcagcctaccataatggtaatttaaatagttcagaaaagggaggaggagttgataagtctttttgtcccatcttcatcactttctaagtcagtatttctcaatcagggatgattttgctgaacaatctccaggaatatttggctgtcacaactgggaaggtgttgctactactatgtataaggtataggtcagggatgctgcaaacagtgcacagggcagcccccctcaacaaggagtcatccagcccaaaatgtcagtagtgatgaagccgagaaacgttattctaaaggcaactattgccaatagcttttttggggtatccagaaaaaattttgatgcctctattacgagtaaaagcctttaatctgatttgatcagaacgggtggtagttttggctgactgaaagtgatttaagtgaagagtcataaacgattgacacatatcttaaataatatattacttaaaaatctacattcatgtgtcagtcttttctttaagtatgtgtcttttgccaggaactctgggtcatcattcttatataagccaatgcattatcactgattaccagctttggagtgagaacttaaaagtttgtgaagcagtctgcatataagatctagatttctaatgttttatgactcctcaattgtttatacttgttttacccttaattttacagcagtttatcattttgttttgttgttttgtcacttgcttttttggggtcttcccaaagcatcaactgattttcatataaagaatataactcccatcatcttgtatcaaatacagcatatgatgcatataaagaaaatgaaatcctattttgtaataatggcttgctaaggaattgggaatactaattctagtcgcagctcatttgaacagcatccaatctggtgatatggtgagggctaatgtcagttgtttacaaattcttgaatgtttcagaacattttgttttagttctgtaatggcagagtttataaataatctrtagaatattactataaatactttattggtattaccagcttagtgcttgcgttacttttctaaaagaaacattgatttttttttcattaactgtaataaatattatttgaagtttgaatgtggctatctttgagtggatttgtcttctttttatttactagaatatgtatgtctatatgcacataataaaatgttatatggaaaacctaactttagttacataaataaaaaattatttgctttttttattcctcttttaatatccttctatcttctatccttgtataaggagctagaaggtataagaaactccaataattgggtttcttataaagagctttgatataagaaactcagataattgagtaaagaagtttaatttattaaagttgcttatttttgaaatgatagtcatgcttttttttttttttttttttttttttgagacagagtcttgctctgtcacccaggctgctagagtgcagtggcgtgatctcggctcactgcaacctctgcctcccggattcaagtgattctcctgcctcagcttcctgagtggctgggattacagatgtgtgccaccacgcccagctaatttttgtatttttagtagagagggtttcaccatgttggccaggatggtcctgaactcctgacctcgtgatctgcctgccttggcctcccaaagtgctgggattacaagcgtgagccaccgtgcctggaaatcattcatatttttatacaaatcaatttaaatgttttttattttttagctagtaatcttttggaatggaggtcagtaaaaaaaaatgtaarccctatttttaaaaggttggamtatcttgtgagacaaagtagtctcagtttgccatcaccaaccaatccttagcattaagctcttgaaaacaactaggtagagaaattttccgtgaaggaatttaatgatctttataaagttttactattcacccaattaaaatgttagattatcattttatgctattcaatttggaaataccagatactatacaattagtttccattcaccattactttcttgaaagaaacttttcacgactttcaataaggtcccctgcccccaaataaagtggttataaatcctaggaggcatttttgaggatatcttattcagatcctttctttttttttttttcccatgctaaatatttatttaatttttttttttattatactttaagttttagggtacatgtgcacattgtgcaggttagttacatatgtatacatgtgccatgctggtgtgctgcacccactaacttgtcatctagcattaggtatatctcccaatgctatccctcccctctcccccgaccccaccacagtccccagagtgtgatattccccttcctgtgtccatgtgatctcattgttcagttcccacctatgagtgagaatatgcggtgtttggttttttgttctcacgatagtttactgagaatgatgatttccaatttcatccatgtccctacaaaggacatgaactcatcattttttatggctgcatagtattccatggtgtatatgtgccacattttcttaatccagtctatcattgttggacatttgggttggttccaagtctttgctattatgaataatgccgcaataaacatacgtgtgcatgtgtctttatagcagcatgatttatagtcctttgggtatatacccagtaatgggatggctgggtcaaatggtatttctagttctagatccctgaggaatcgccacactgacttccacaatggttgaactagtttacagtcccaccaacagtgtaaaagtgttcctatttctccacatcctctccagcacctgttgtttcctgactttttaatgattgccattctaactggtgtgagatggtatctcattgtggttttgatttgcctttctctgatggccagtgatgatgagcattttttcatgtgttttttggctgcataaatgtcttcttttgagaagtgtctgttcatgtccttcgcccactttttgatggggttgtttgtttttttcttgtaaatttgtttgagttcattgtagattctggatattagccctttgtcagatgagtaggttgggaaaattttctcccattttgtaggttgcctgttcactctgatggtagtttattttgctgtgcagaagctctttagtttaattagatcccatttgtcaattttgtcttttgttgccattgcttttggtgttttagacatgaagtgcttgcccatgcctatgtcctgaatggtaatgcctaggttttcttctggggtttttatrgttttaggtctaacgtttaagtctttaatccatcttgaattratttttgtataaggtgtaaggaagggatccagtttcagctttctacgtatggctagccagtggtcccagcaccatttattaaatagggaatcctttccccattgcttgtttttctcaggtttgtcaaagatcagatagttgtagatatgtggcrttatttctgagggctctgttctgttccattgatctatatctctgttttggtaccagtcccatgctgttttggttactgtagccttgtagtatagtttgaagtcaggtagtgtgatgcctccagctttgttcttttggcttaggattaccttggcaatgtgggctcttttttggttccatatgaactttaaagtagttttttccaattctgtgaagaaagtcattggtagcttgatggggatggcattgaatctgtaaattaccttgggcagtatggccattttgacgatattgattcttcctacctatgagcgtggaatgttcttgcatttgtttgtatcctcttttatttcgttgagcagtggtttgtagttctccttgaagaggtccttcacatcccttgtaagttggattcctaggtatattcagatcctttcttatgttcacttaaaagttattgattccaacttctgtcctagagatagcataacttggatgtttgagattaaaaaaaaatgcttttagtaacctttatttaactcgctcagcttgctatatagccaagtcggtatttatagtttgtttccacccttgataatttcatgccagtactcatcagaatggaacactgacttggctctgtctgtccttattctcatctccatcccctcctttccaacacactgcaattctagattgaagactgcacatttatttatttatttatttttttgagacggagtctcacactgtttcccaggctggactgcagtgccgagatctcggctcactacaagctccgcctcctgggttcatgccattctcctgcctcagcctcccaagtagctgggactccaggcgcccgccacctgcctctgttatctcttctaagagtgtgcaccactaatatcttctactcctactctgccatctatctagttcccttctcttttatcatccaaacttggagttccctcttttgcaaattatctccaaaaagagcaacttagaatttgttactctccagggaaattttcactgaaagcaagtctgtttatatatgtatatactggtattacacaaataaaaagattatatagtttatttgagggaagaagcagtttctttgtattcccccagtcaggcatcatccatgaacataggctttgctatttttttttttaattgaagatgttaggggaaaacaaagtttagccatatttaattttatttagccatatattttatttagccataaaataaaatactgctttattttatcatgtgtggcagactgtaagttctgagagaattcagaagaagaaatgttcacctgtggggagagacttgctacttatttgctacttgattgagttaattttgagatgagttcagggactcattttagctctaaaattttgattctgcgtaagcaagaaataggtcataagctgggtaagtatggaataaccaaggaaaaaaagtagtccttagatgggatgagtaacaagagtgaaggcatttaggtgagaattagatatgtggttgtgcatataggaagtaaaatgatcaatgtggttagaacagagagtttatattaaggaataagagtgcattaggttgaatagatggaaagctagatattaagaagagaaatttaaacatacccagatgatagaaaatcatgtttttctaatgcaatctggtcattaaaatgattttttaacatgattggtgtgatagtcttacgcctagtagattacagtgaagaagagaatggtagaagaggcttgtggtaataatttaaaagtgaattaaggagagcctgaaagacagtggtggcagagggaagggagagtaaaagataaatataaggacattgcaaattcaccatgacaaaccaaatgacatagggcgtcttgaggttttcaaggaattccgaggcaaaggcagtctctggattttcagagtttggaaattcccygcccgccctgccccccaaattctagtattttccccaaaataaaccctggtcttgtttaaaggattttttttttgttttttgttttttggttatttttatttttaaataagttgttatggcccctagatttgagcaagttgttctcatatttgactaagttaatactaaaggatggaaaagttctttagagactacctacttcgctattaatttgtcatttatccctgcattatatactgttaaaaacattggaaggacgaaggacgttaactggaatgacgatggatgagtgtgggtactgtcatataggggaggggaaagagcagaggaacttttaaattattaaattattattattaaattagaggaactgagaaaataaagatactaatagtaaggaatatgttatttttaatttaaaaaatttttttagacagcatatccctctgtcacccagtcgagtacagtggcctgattgtagctcactgcaaccttaaatttctgggctctagtgatcctcccaagtaggtgagactacaggtccacaccactatgcccagctaattttttttttttttttttaatgtttttagagtccaggtctcactgtgttgcccagcctggtctcagaactcctggtctcaagccatcctcccttcttggcctcccatagtgctgggattacaggcatgagccaccatgctaagttttgtggggaagtgtggaaagtacgtggcttgattcttatcagaaagtttcactttacttttgtctgagtcttcctctctgacatcttcttttcaatttcataaaagaacactatagcaaatacatcttacaaccatgaccatactgtctctagaaagccagaatattatgaaacatttagtaggtgagcaagaaaagtggagtgattctgatgccagaaatagcaccgagctaatacagtttgatctatttgttatttagaatacaccagtgattctctaagggtgcagttttgccccctaagggacatttggtaatatttgaagccatctttggttgtcacacctggggtggggtgctactgacatctagtgggtagaggccagggttgttactaagcaattcattgggacagaccccacaacaaagaattatctggcgccaactgacagcagtgcgaagattgaaaaaccctggaatgtagagtaggcaggttcttccctggacatgtttggagacataggtcaattttttttacttccttttcttctaggcttgaccagatatcatcctaccaacagcttacaataccatatagattcttactctttgtttcattgtgttcttatcttaagggtatatcttagacatttcaattagacaaatatttctaaatatttctacccatcttcatttagggttgcttttttctgctaagtttatttttctgttttaccagtttatctcttgaggcatcactctatttttaaataattgagggcctctgatgatgtatttaggtattctcttttacagcattttcatgtgcttcaagtcccaggtctgggttgagctagttcttgagtccagatttttttcatatactgtttgaacctcttctgattttttagtatataaaaagtttgaacaacaagacccttaagggaaaaactatcttggagttcttttagaatgattttattcttgcttacagataaagattgccatacgtataacagctacatacaaaaagactttataatggtttatagcactaaatggaaaacactgaaattctagaatgaaacaaggtttgcaagaacttctatttggctttattgttttggttaagcagagcaaaataattcatcataatatgaagataaaagttgaatgaatgtatcataattgagaaaggggtgtgtttttagaaaaacagtttattttgtccttatcccacctccatttgatgttgatgtaaacatattggccatttaatataaaatataattccagtctgcctatgtataacaactacactgtacaataaaaagagatggaaagcaaaagtatttctttactgtagtggtcaggatatgatttgtagatccaaattttgtgtgtgtgtgtgtgtttggaaaatttgggaggcaaagttctcaagtaagtgcagatcttcttttagtagatacttcctgtctgctttgtatacacatcaattatatcttcatcttccattttcacctgtacaggtgtttcattaattggcctcccatcacatccaaaaccaagttgcctcattgatagatcagttgttaacaataggctctcattagtttgctaagtgatatactctggagctgtaccactgaaccattccaccccaccactgcaactctatatggttatttttttgggtcttgactcctttcttgggctttttgtcagccatggaaagcattactgttgcagctgctgcttctcgaaagaagtttcaggtacctcatgtatgtgcacacaaccagcattagtaagtaagcctgttttaattctggagatattttacctaagaaatatttaagtgtgtgaagagactacttttctgagtgtagaaatttcagggcagtcaaatgcatttctgtattgttaatgctctgaacaagctagtgtacctggagggaggaatttatgttggttaatgagtaacatagttctctcatcccattacttatttatgatcaatttatttttaattaagcttttaaaattattaatgctacatgacatgcaaagttaaaatcagcatggaagaatgaatgtaccatgaaagttaaaggtttctatccctactcttacttcatagagttaatcatggttagtagtttcagatttagttatattagtaaagtggttctcaattcatgactggcatttttggcagtactatactttgcaatgcaggattgtcctgacctgaacactactcagtgtttagtgtcccttaatatttggttttctaccacagttactgagacaatcaaaaatggcctagtacatttccaaatgctcactggggagaggtggtatgctaattttaaaaaacatacatcttagaaagcatatgtttatgttttcaatttcacacagtaagtattgactctagtataaaagaatatttaagtgcgcacagacttcttgagggaggcccagagaaagtccacttgggaggaactgtgcttacttctaaagtcttagatgataagatttttcaatcttacctgctttctttcctgatagtcttactttcttgtgttttcagctacctgtctttttgttactgtttgatgatttttgaattgtgtgctcttgcttcgctgggttttattggaggaaattctgtgcagcccagttagaggacacattctttccaaggtttgccaaggcttttctttggcacctgtggaagccactgacccaagaccacttcgtagtttctctgcttggggtgttctgaactaggcaggtaggtatatttggaaccctgaatccttgagagtaggctgtgattactaattctcaggtgatatttttttctgctaatatggagtccaatctgagacaggccaacttccttattgtcttccttggccaacaggcatgtttttattagactactcttacaaagtaggggttagtcctataaggtctcagcttcatgtgggawggtctaagttgcatttttcatcttgaacaggccagggcctaaatggcagcttctgaactcctggttactgaaatcctaaacaccccagggcagtcataacttcagtacctacttactagtttgttttttccccttcatattggctcacagggatattcttggggactttttttttttttttgaggggatgttttcagtattttattttgcatttttagatgttttgtgagagaattattttcagattttcaagggtaccttctttgccaaaccagcaagcctttcttatctgttttctaacttctaagcagttcctaaacttctggtttgctaatctctttctcttttatttttgtctcacctcccctccagtattagtgctgttttattcttttttaaaattacatacctgttttgtcatttcagtgggacctcaggagggagggaacataggcatgtgtgttcagtcttccactttaactggaagtgtgtctaatagttttgaggtatactatgtctattaggaccaactgaccttaggaaaaatcaatgtaaatacctttccatttaactgtcattttaagtttgaatttaaaaagcatagtctttggctgtaaaagagggacagggtcaggaatggaggatgacattcagaccattatgcagttgagcaaggcctcactgagatagggggcagtgtgtagcttgacatacgtgggctcttaccataaagtctagctatataaagcaaatcacattacaatgatgagaagccagaattttaaaatttcatccaatgagtatttattaaatgtgatgtgtctggagtaatactaagaattagagtacaaaaataaataaaatgccatatcctcagtgaacccactaattttgtgttagagatagacatgtaaattaaaatagttctcattattcaagatagttayggtgtataaagtctctgcaaatgcagaattatcaaatgctgagccgtgttgcttctaggggaaatgcagggttaggttcctgcaagcctttagtcacagtatgttcatcaactggtcaatatatagccttttttatctgtatttctctttaaagatactttattatatattattgattcattaacattgtactcatagccaagcttaccatatcttatgcctgaacaaagcttgtctaatatgtacatttttctgtaaagcacaccagagccttttcatgataaagaaacactagatagcacttcagtgctatgattggggaccattttgtgaaatcacaaacaacagaaaaatgcaaaaaaaaaagtggcacaaaataaactatgaaaaggatacttgtttttagtatgagagccgaaacaagaaagcagagtgttgctttcttccacctcagctgggactgtgcaatgttgggtgactcaaatttttcaccactctgcatatccactaatgaccacaaaagctctgtaagtatcgattattggattaaaagtaaattttagcaagtaggcaaattcgcaaacacagaataatgagaatcaactgtactgtataatgtggtaagtgctgtatattgtaaatctgctaggttgggtcagggaaggcttcatttgagacaattaagatgaatttacagcagtatgaagcaatgaatctatggaatggcaaatggtccagagtggttggaataaaagggcccctgtaaggagaggcaagtggggacgtttggactggccagctaacagaggaggatgtgaaggcccttatgctgtattaaggaattttgattctgtaggtgatgggaractattggatgattttagccaggggagaaacatggtcatatttgtattttggaaagctcacactgctttggtattgggtatagatgaagtaaggaaaataaatacaggcatacctcagagatatcacgggttcagttctggaccgctacaataaaacacatatcacaatgaagcaaatcacacaaatttttttatttcccagtgcatgtaaaagtatgattacactacactgtagattattaagtatacaatagcattatgactaaaaaatgtacataccttgatttaaaaatactttaaagcttaaaaatgctagtaatcatcagagccttcagagagttgaagtcttttgctggtggagggtcttaccttgatgctgatggctgctgactgatcagggtggtggttgttgaaggttggagtggctgtggtaatttcttaaaataagacagatataaagtttgccacattggtagactcttttttcatgaaagatttattggtaatatgtgctgctgtttgagaacattttatctatagtagaacttcattcaaaattggagttaatcctttcaaaccctgctactttaccagctaaacttatgtaatattctaaattctttgttgtcatttcagcaatatttacagcatcttcaccaggagtagattccatctcaagaaaccactttttttgcccacttgtaaaaaccaactcctcttctgttaaagttttatcatgagattgtagcctacatcttcaggcttcacttctaattctcattcccttactttttccaccacatctgcagtgacttacccactgaagtcttgaatccctcaaagtcattgatgagagttggactcagcttcttccagactcctgtgaatcaacattttgaaggatattttgaccttctcccatgaatcacaagtgttcttaatgacataaatggtgaatcctttccaaaaggttttcaatttgcccacatccatcagaggaatcactatctatggcagctatcgtcttatgagatgtatttcttaaataagatttgaaagtcagaattactccttaatccatgggctgcaaaacagatgttgtattagcaggcatgaaaataacattcatctgctgtgcatgtctatcagagctcttgggtgacaaggtgagttgtcaatgagcagtaatattttgaaaggaatctttttttctgagcagtakgtctcaacagtggacttaataaattcagtaaaccttgttgtaaaccgaagtgctgtcatcaaggttttgttccatttatagtgcacagttagagtagatttagcataatttttatgggacaggatttttcagaatggtaaatgaggattggcttcagcttaaaagtcaccacctgtgtttgcctctaactaaagagtcagactgtcctttcaaggtttgaggccaagcattgacttttcactagctatgaaatcctatgtggctaataaaaggctattttgtctgcactgaaaatctatctgttgtgtagcatagtcaccaccttcatcaatgatcttagctagatcttttgggtaacttcttgcagcttctacattggcacttgctgcttcaccttacacttttatgttatgagatgacgtctttccatagacctcatgaacaacctgtgcaagtttcagacttttttccagtagctcttcacctctctcagccttcatagaattgaagggagttagggccttactctggattaggctttggtttaagagaatgctgtgactggtttgatctccagaccactcaaactttccccatatcatcaataatgctgttttgctttcttattcctgtattcactggaatggcacttttaatttccctcaagaacttttcctttgcattcacaacttggctgtttagctcaagaggcctttcagcctctttgctttcaacttcccttccttattaaatgtaatcatttctagcttttgatttaaagtgagagacttgctcctcttcctttcacttgaactcttagagattattgtagaattattaattagcctcatttcaatatcgttatgtctcagggattaaggaggtctgaggagagggagacgaggaatggccagttggtagacgagtcagaacacatacatttatcagctgtcttatatgggggtgattcatggtgccccaaaacagtaaacagtagtaacatcaaagagcacagatgtgatggatatggtaattaccttgaccctatcaccatacattatatgtatcgaaatactaccccatgaatgtgtgtatttattgtgaagtttaaaaagattactgatcatagatcatcataactggcataatagtaatgaaaaagtttgaaatattgtgaaaattacaaaaatgtgacacaaagacatgaagtgagcatatgctgttggaaaaatggcttcaatagacttgatcaatgtggggttgccacaaacattcaatttttttaaaaacagtatctgtgaagcacaataaaatgaagtgcagtaaaatgaggtatgcctgtagaaggttttagatattcaggtgagagatgatgagagagtgaactaaggcagtgacagtggagatagagaaaatgggatagtatttgagaaatatgccaagatttaaatcaaaagttcttcgtgacagattagatagaataaaggagatcaaacagctattcattgttgctattaagataggcaatacgggaggaagaccagatttaggaagtaacatgataatttctggatatgctcatttttatggtgcccatgggagattttctgtggagatgtaggcaaggaaatacaaatctgaagcttgggtgatatagctttgagagacatcaactatttatatatatataaaaaatatatataaatatataaaaaatatataaaatacataatatataatatatataaatatatataaatatgtaaatatatattatatatttttaatatatataatatataatatatataatatataatatataatatataaatatatattaactatatataaatatatataaatatatataaatatatatatatttgaatgtctactgtgtgtcaagcactgtcctagtgccagaggagacagaacaatgagtgaatttttagtgaggggaaacataagcaaaaaataatttcagatgagtactgtgatgaaaatgaaactaaaaggatggagagtgacaagactgtatgtaagggtggtagcgtagtttagattgaatgcttgggtttactttctggggaggtaatagttacactgtgacaaaatgaagagaatattggtatgtgtgtggatctctgggaagagcatttcaaggagagagaacagaagatggtaaagatgggaaatgagagatgggagatgaactggtctagtttgaaaacagaaaggagcccagtgtgactggagacaagcagacaaagggaaagagttggagaagttgaacgcagagaggtacagtgggtgacaaatcatgaaggcgctaagcggccatggtcaagagtgtggctagttttctaagtacagtgggaagcctttgggtagttttagcaggagagtaacaaaatctgttttgtgttttaaaatgatggctctagccactctggggagaatattgttgagaacgagagtgaaggtaagggaactggtcaagtgactactgcagcagacaggcaagaattgatggtggcttagcgtagggggatagcagtgaatgggcaagggagtcagatggcttttcttcagtcacctccattgtgaccgaattgaagaaccagtttatcattggatctgttatgaattctaggtatttttgtaagtatatatataaagtatkattttgaaaacagaccctatcaatgaaatttattctaaaattacatagttttgggattcaaattagaacatttgataaaatatctcagtgattctataatatttcacatttatgaatgtttattaggtgtgtaaaacattttcaaacaattttgattcattatactacatattttcttgtaaaataatgaagttttgacttgctttgttaattagtggttgggtgaataaaaatttactcaaagcaggactactacattgtgagagtaaattggcaacagtgctatttatttgagctctgtttaaaaaggaaaaaaaggactctccgtatatctagctttctcctgtgtgagcactacactttaacaaggatatttctggacatagtaggaagcatggactgtggtggggagagattggggattagtataccagttaagaggcttttaaagtagtctaggcaagagaatattagaaactctaaaccagacagtgaaatttttagagtggaattgtggtgaagattactttgagacttttatgaagtagaatgaaaagatttgaagaagaattagatgtctggaggttagggagaagaaaaaaattggatgattctgagattataagcatcagagaatgggtagttggtgatgtcgtaatataaatgagaggtagaatctgtagtcgcagtaggcttggttagagtcagtgagtagttttcaaaatggtaaattaaaggcaccatctttgggactccctggggaaaaacgtaaagaaggcagttgaagaaaggtgagtgctgtaactaatacttggaaattatcatcatatagaaactagatgaagcctcagaaataaatgagatcactcaagaaaagaatgaaaacctgagagatagcatcagcagtgatagtctgtccttaaatagaatgaagacagtatgtgactggtttgtcagttgtcattcctgatcttttccaagaagtttgaggagagctgtggctgagatggcacgggtggagaactggaaagataacrcataatacagactactctttgaaaagtgtggtggggaaaaggagagagataaggctgtgacttaaaagagaaatgaggttccatatagggatttttaaaagttactatttaaggatggagaagatgttagcacatttatagatgcagaaatagcaaatgaaaaaatattgaagttttagaggaataacccatggatcatggtcccacagtgggtgggaagtagttgattcattgacaggtagtagccttgtagaggaggaagggcatactttctcctgagatacaaggaataaagaatgatggtaatgtatttgattctgcaagtgaaagggaatttcagtaaatcataggtgataagctctttttttcctttttcttctgacaaagtagtcttttgacaatttagtgtggtaaatgtttgaaatagagaatatgagagaacttgagaaggggcaagtaataggattgtgcagcagtatttgggagcttgtttctttttgtaggaccagggcaatttgagaatattgcaatacttggggataagaataggaaggaaggccctggaatggagaaaagagctgtggaaaataagaggtgaggggagatgattacttcatgatttgcctagggctgcctatattgaaatgtgtgcaggcaagctattgctaggccactggggagatcttttcactgagtccaaatgtgaactacatcattaatgctgttttatcaaaccaaagtatataaaggaagttctgttaaagcagaaaattatcattatagaaaaggacttgtgaaaagttctacaacatttgaaacaggtattttcatgtaacttaaatttatgaaggacaagttattgtctttttagttcatatttttagttcattttattaccagtattttcaaaacgtacccagctcagtctttagttgttagaagtgaagggctaacaaggatatccagttgtctatagtgttgatgcttgctatagggaaatttgcagtgaggaaaacatattaaaatagtactgttgttcagttgtaatttcatctatttaaagtgttctttcactacattgaacaaattatcagattgcctaagtttcttataaccagaagtctttcatataagaaatgtgaggttaaaacttaaaataacctgttcattatagattggataatctgctgtttcactgagttaggacctctttggaattcgcaaatttctgaaactgtgctaaataaataaggctattatgagcaaggttttatgtgtacacacacaatcaaagttttctaatatttggactatgttttaatattccatgcaaggattctgtgtatggtgtgtctgtgtttctctgtcttgttaatgtgagcattcatgcccagaagggatgactgggagacattatgcctttgaagaagataatttgtttccaacttatttttactgtcaaaaatgttttttgtgcttatttttaatgcagtgctttgtatatacttttgtgaaatatttcgcccagtactttaaaggatgatacataatcaaaagtaaaaaacacaccgagtgttgaatgaggcaggaataaaatacagtcgtgcatcacttaacaaaggggatacattctgagaaatgcatcattgggcgatttcatgatcgtgcaaacatagagagtactaacacaaacatagattgtactaacacacacatagatggtatagtctgttatacatgtgggctatttggcctattgttcctaggctacaaacctgtataacattttacacttgtggcttaccatgaatggagcttgcagaactggcagttgctctgggtgagtgagtggtgagtgaatgtgaaggcctaggacattattgtacactactgtagactataagaaatttattttttaaattttttcttcagtattaaattaaccttatcttactataacttttttactttctaaactccagctcttttgtaataacacttagcttaaaatacaaatgcattgtacagctgtacaaaaatattttcttttttaatatcttctataagcttttttttttttttttttttatggagtcttgccctgtcacccaggctggagtggagtggtgtgatctgggctcactacaacttctgcctcctgggttccagtgattytcccgtcccagcctcccaagtagctgggattacaggtgtgcaccaccgcacctggctgttttttgtatttttagtagagtcgaggtttcatcatgttggccaggctggtcttgaactcctgacctcaagtggtccacctgcctcagcctcccaaagtgccgggattacaggtgtgagccactgcacccagccctataagcttttttctattaattttttttaaccttttaatcttttttattaaaaactaagatgcaaacacattagccttggcctacacagggtcaggatcatcaatatcagtgtcttctaccttcacatcatgtcccactggaaagtcttcagggggcagtaacacccatggagctatcatttcctatgataacagtgccttcttctggaatctcctgaagaacctgcctgaggatcttcttgcgggggtgtcactcttttcagaaatctgttcatggtggtttccttgggtttgtttctgtttttcatcatagatttgcttgtaagcagatctatgaacattcctctctagtaatgaaaacctttcattgttggggttcatgttttcaaacttgttaagcagcttgttgaagtctgcaaaaacttctgctaaacccttcactgtacattttcttgagagaattattcagctgcattataatcttttggaaccactgttgtatatgtagtctttggtcgactgaaataatgttatgtggtacatgactgtatccaaattgatgaggtaattctagtagcttataaaatatcttacataacaagatccatgtcatttccccctgaatcaaggacaaagaagaaaaaaggtttgttattttaagtataacatataatattcaaatgtgaattatgtttgattgtaggtcaataatttttgagccccagtttcttatgagaatggaattggtagtgtgccagttaaggaaaatttatggtgacactagataaacatggcagtaagtagaagcagttcattttgtataagttaaatcgttacatttataaatataaagaatagccatttaactattttttataggtttttaaattatagtttttacatcttacgttttagttgaatgttttactgaaatatatttcatgtcatagtatagataaaaaagaatttaagaaaccatgtcatctaaggatgactttgtcttctccaggtttctgtcctcaagcgaaaaaatcttgcctgtttttaactctagaaaagtggttataattatttgatttttcagcatgcaaactagtaactatttacacatgatagatatactttttttttaggtttttattttttattaaaactattaatgcacatatggatgaaagactagaggtgctccccaactctatttctgtttcttcctcccaggaggctactacatcgaacatttttagctgactgttttggtatcatgtcagtaaatggtgtgcttatgttgctaattcttatttttttggttttaaccattatggaggatgaggatttagctctttacattttccttcaccacgtatgcatatcatatactcttccaatccctcagttctttcaccctaattatattagtaattttgattagattagtatttgttagcagatccactagtaaattgtagttgctattctctattcctgtattttcattttctcagacttcatttatttgcttcatttttttgtatatgccacttggctataattcaaccccgaaatctgtgcttgttttcaaaatcaactttcagtgcattcattctgatttgtcaacttcattttcttgaagatgtcactcctggagccttctaagctgaatacggactcattttctgaagctggtgtacacgtgtcaccgatmttcttagaaattatctttgcctttttcctgagttgggccttctagatcctgtattctctgtctccctctttatgttttgcttgtttcatgctttgagagcagcatgtctttttttttgtttttgtttttaatctttctgaggaaaagtgtttgtggtaggttaattttgtgaaaccttatgagcaagtctgaaaattatttttaactatcctcacacttgattgatggtttggcagggtaaagaattcctgggggaaatgtttttaaaggcatcattgcatcatcttctacctttagatgtcatcattgagccattcagaatcattcctgattcttgacacgtgatttttttcttttttctcagtattctgatatttcacaacaaaatatcttaatatgagtccattttcatctgttttgctgggtgctcagtgtactccagcaacttacatctttcatttctggaaaatgttaaatatttcattattgtttttctcccctccattttgtctctcctttctttccaaaacccatctggtttagatgccctctaatcaggttctctaattttcttctgtttttctactcctgtgcttttctactttttgtggtatttcctcacatttaccttccatgatttccattgaattttttctttctgcttttgtatttttattttctaagagctcttttgtttcctctgtaactatcttattctagtttcatgagtatgatattcttctttttctttgataatttttataactgtttcttttttcaacctgagtagtttttacctatttgtttattttaatctctttcatttactaggcttttctcagctatccagtatcccaagattcttagctcattaagagtgggggactaaaaacctgatgctctgatttcatgttgaatgtcactgtagctagtttgtagctgggttatttgggggtaatacctgatcttcatgtctgtgtctttcttgttgactggtcatattctgtagactatgaagaagacttcacatctgcctggaaagtaaagaccaagctgaaggcttcagatagtcaggagggagaatcaggtggaggggtttgtatcagcatttaataatcctgtcttctatattatttcattgtctttggtcgagaggtacctcttatcttactctctccagaaaataagcccctagttttcagttctgtgtagtggaggaaggtgggtgatatggtttggctttctgtccccacccaaatctcatcttgaattgtaatcccataattcccacatgtcatgggagggacctggtgggaggtaattgaatcatgagggtggtttcctgttctcttgatagtaaatgagttctcacaagatctgatggttatataagcatctggtattttccctgctgccactcattctctttcctgctgccctgtgaagaggtgccttccaccatgattgtaagtttcctgaggctggggagccatgtggaactgtgagtcaattaaacctcttttcttcataaattacccagtcttgggtcataccagcatgggaacagactaatacagtaagaaggcatccctctgtaaaccaggaagtgagccagcaccttgatcttggacttcccagccttcagacctgtgagaaataaatttctgtcatttaagctacccaggctatatttttgtcatagcagcctgaattaactgagacagtgagcttaggactagctgagaaaaccagcagctttgctgcccaaaagttgtggagtgacttgattcaggctagggaagaaagagaagacacacaaactaaacctgtgactttgctggtgaaaagtggtggatttggttggaaacaaatagagaaaacctgctgctgtgctaatttgacattgtggaccagcagaaatttaatagggaaatcctagaaatgagagagccatggaagggttaagatgagctctccacatagagacccaggagagcctggaaaaaagtgaaagctgatggggacttgacaactggctgcaactttgaatgcatttcccagtccatcacagctcaactcactgagagtgaagtcttaaaagcttgaggtttttgaacacagccgttgctgatttgtccacaacattggctcaaatggctgttggagcacaatattggtccatcattaagctttacagacataggtacaaccccaagagagtcagactaaaatgtaaaaataagaattaaaatattaaacggatgtcctgacagcataccttggagggaaacagattctgcagtttaagtctagaccaattatttaaaaactcaaactctgaaaaaaaaataataaatctagagttactgttaagggttccatattcaaccccaaactgctagacatggcaaagaaaagaaataccaggaaaatgtgagtcatcatcrggaaaaatagtcaataaaacggactctgactgggctcagtgttggatttaatgaagacttcaaattggctatttagaatatattgaaagaattaaaggaaaatacagtctgggcattgtgacatgtgcctgtagtcccagctacacaggaggctgaggtgggaggattacttgagcccggtagttcaagactatgatcacacctgtgaatacccacatcagtctagcctgggcagtaaagaccctgtttctttcaagaaaagaaaaaaaaaaaaaaaaaaggaaaaaagaaaaatatgtgaacaagatgctaacaggacacaataaatagagaacctcagtaaagaagcaaactcaaaaagaaccaagtagagattttagatttgaaaagcacagtatttgaaatgaaaatttcattggataggctcaacagatttaagatggcagagaaaatgtgaagatcaataaaaagtattccaacaagagaaagaaaagagatttgtaagaatagggaacaaagccttggagacatgtgggacaatgtcaaacattccaacacacatgtaatgggagtttcagacagaaaggaaagagagagacagaaaaaaatatttgaagtaatagtggccccaaaccatctcaaagttttactaaattctggtagaaaataaaacttaaaaagaatttcagtaagatgaaataagcacactataccctaacttggcagagacagtgagctctggtcctttcagcttctgataagggcattcctgccaagatgggggctccaccctcatgacctagtctaaccctaatcacctccccaaagactccacctccaaataccatcccactgggaattagggttttagcatatgaatctgggagggacacaaacgcctaggccatagcactgatcaagcttcggttatcaccaactgagctggggccctggggaggtacatggggacagccccaggcaagaaggccacagagtcacactgttcttacctcaagctctagcagttttgccagaataaatgtgcctcatttttataacggcctttgggcaattttcagcacccttaaaagactgcctttgatgatgctgtccagttttatatttgcttttttgcagaggggaactgccaatctcttcatgccaatattatcagaaattgagtaatgtttgtaataaaagattttcaacattttactattactaaactttcatagtcacaactttgttatcaagtgaaagaaatcattgtgatatgggcaatattgtttctaatgatgaaattcattaggatgttcactgcagcatttcttgaagacatgggaaaaatagaaacaactgccatgttcctcagacgctaaataaactacactcatcctatgaatctgcaacaactaaaagaataacatggtttcatatgtactaatgtgaaatgttctccaaaatacatttttctgtgggaaaataagtttcatatatcactgatatagtaagatattacttatataaatacagtaacacattatgttttagatatttatataagtatagaaatgaagcatatatcttcatattttctacagatacaaatatgtaaatatgtaagaataggtctataaagacataaagaataggtctataaagacataaagaataggtctataaacacataaaaacaaagtataacatgcattacccctagggaaagagcagagatggaaagctggccaagttaaaaaggctcttgtctctatccagtaatacctgaaattttttacaaaattaatttatgtatacctgtgtaataaaacaataatttaacaaatggattgcccaagctatcagctatgtatatggaaagtcaacatcatgaggattcctagaagtttctatacaaattcacagagattaaagaaaaccatttgatgaaataaaattaagcacccttatataaaagattttattaggtgaaacatgcttggcatcatttctcaagtcatggatttgtcaacccaaagatgatctccttatatagaacatttcatcttttaaaatcccatgacttatatgttagtttgtgctttttatcatggatttctttcctagtagtaagccatttcagtatgtgtcacattcaataatatcttttaataactttaacaggtgcatttcaagttacaagatttctttatgcctacagttaagaattactatgaatgaaacttattaacaattactcttaattctttaaatcgtcatcttatgaatcaagtattttctgctagaaatactttaccctaattacaaccttcatagattgtaaaaaggaaacagactccaagacactgtggcaataaatggaaataatttgtctcccacagttcttttaagaagaaaatgattttataggtgataggagagggccttgagatactatgtcaaagtgaatttaagtactatctttatattttgagctctggcttttcatattctagcatttgttgttgagattagtttttcactgacactttgaaaaattagtcagaaagagatggttgatgagttgcagaatatagataaaatagaatagcatttatgtttttagtaaagtaggcatttaattaggtttttttttgtttcattttgtttttttgagatggggtcttgctrtgttgcccagactggttttgaatttgggcttaagcaatcctcctgcctcagcctcccaaagttctaggattataggaatgagccactgctcctggcctatttacttttattatacaggttgagtatccctaatctgaaatgcttggaaccagaagtgtttcagatttgggatttttctggattttggaatatttgcaaatacataataagttgtctggggagaggacccaagtctaaacataaaattcatttatgcttcatgtacactttgtgtacatagcatgaaagtacttttatatagtgcttttaattttgtgcatgaaacaaagttttgactatgacctgtcacgtgaggtcaggtgtggaattttccacttgtggtgtcctgttggtgcgcaagaaattttggagttgggagcatttcagatttttggattagagatgttcaacctgtataaccttatgagttgtatcaatgtcatttatatttttcaggtaagaagatagatstgtggttagattttttaaaaatactacattgrggaaaatgagattataattcagamtttagtttttactctatttaatcactccttttgccacacatgtcctcagcatttatactggagtgttttatgaagcaattcattattattattctaacatataatgaaatgaagccctcttaatgaaaatgtcattgctacaacctgtttaaaggacagtatgacagtatctgacaattgaaaaatcatgtatcctttgatctaggaattctacttttagctcttagtgtttacttgctaatgtatgtgtatctctctctctctctctctgaacacacacatgatatatatgtgtatatatatgtgtatatatgtgtgtgtatatatacacgtgtatatatgtatgtgtatatatacatatatgtgtgtatatatacatatatgtgtgtgtatatatacatatatatgtgtgtatatatacatatatgtatgtatatgtatgcgtatgtatacacacacatatacatatgtgtgtgtatgtgtatttgtttttggatgctgattgccacactaattacaactgcagaaatggaagcagcctgtatgtctttcagtagaggacagacgagataaattttgatgcatgcatacaatgaagtactaggtatctctaaaagaatgagcttcaatatggaaaaatcactaagattttattaaacaattgcattcatgtaaataaaaattgatgtattcaattttgtctgaaagttttgtgtaaatttgtctaaaaggctagaaagagacttctttaggggagaagatcagtttttgttttttgatttttaaatatttcaatgtaattagactacatcttttaccacatacatgtgtgtttatatacacatacatacacayatttatatacatatgtgtgaacctgtaatggatttttttaaatgttatatgtaaaggtttttttactcactgttcatcacaactttggagtctactccattatctcctgttgttcagtactatcagtaataaatgtcatgcaggtttgattattgttccttttacattaacatttttctttctggaaatccccatttttttatgttttaaacattctgaggtttcacttagtgtttctagatttgggccattttcattccatctgctctgcacatggtagaccccttcattctaaagttttctgtgtcatttaaactcaaatacattttcttctattacttcttcaactatttcctctcacacttattctattcttgtcttatgaaactcttaataggtagtgttggatttgcttctgggttctaactttactcatatttgtcatctttgttctgcatttggaagattaacttgacttgattttctggattagcagtttcaactttattctgtcatttagtctgctgttacattttaattttaattttaatttttgtttttattttagaaacagtgtcttgctgttacctagtagcacagtcacagctcactataaccttgaactctttggctcaagtgattctgctgtctcagcctcccaartatctgggactacaggcacattgccaccatgcccagctaactaatttatttatattttctttttgtagagatgaggtctttctctattgccyaggctggtctcaaattcctggccttaagccatcctcccacctcagcctcctgaaatgctggcattacaggtgtgaggcagcatggccaaccttagatttaaatttgacaataatgtttttaagtgccaggaactttcttattttttggttgctcctttgcttccttttagtgacttgttcttttatgaacacagtagcttctcacatatctctcagaatgctaacaaaaataaaatgttaaaattctcttctattctcagcaccatctgtttttcccccagtttagtttgcttagtttacccgctgtcactgatgttttcttcaaatgcctggtgatataattgctgagttttatttataaatgaaggactagggtgatgattcaggattatatctgatgaggatttcctctgtatttgtgtaggctgctcctcccctcctcccaccagccttctacctggaatgggacgtcatggtcaggcactgagtaagtggtgggtttgtcctcaggcagactgctgcttcagatttataggcagagagcaggtgggagcccttaaaataactaaattaagaaggaagagtactctggatatgggacatattagggtaaggctttgagtggaagaacagaagggaagaaaatggcaccacccctagagttactgggaaatgtattaaggggaacttttggttgttataacacctgtggaagacaacagccgtttgatgaaaaaaggaatttttttctccctaagtgccagtggtttcctgtttgaaaaaccctgctttagtgcattcactcctaggcaatctcccttcctccatccctcctcctctagtgtcctttgcaaagaacgagatctacctcagcctctactctcttttttttcaggctcccacatccccattcagagccctccccaaagagaacaaacccccactgtctttggaaagaagtttgtggtatttagtcaggccaaaatgtgggctcttctatatgcgattccttaatggcctggaatgactgcccctccactgtgcctgcactttgttgttgttgttgactccaagcttgaattttctctaggaatggtttaggaaattcagctctacatttgttttaaggctttaaatactgatcataaattcagtgtttttaagatgaattcagtttagttttttccactaggatacttccagtggtgtgtccccgtgtgtctcatgttcttaacaccccaccaaacccatcaaataaagagttaactgctttcccttatttccacaatactaataatgcagtaggaagtattgttctaggagttttccatgtattatttagcaataacaaacctgtgagttagataccattgtcattcccccatttaacaggtgaaagaaacccactttaggagggtaagtaatttacccgggttttcaggactagttaagtggtagaatgcaggttctttaccactgtgctgtatcacctttttctgtgattactttatgatgatcttatcaccagtttcatacatgtgtttatacattttggtctactctaataaatttgagtttttggggaacagatggtttgtccatatattttcttcaacatctaaccacgtgcatagcgtctagctgtgagtaaatacctatggaattagctgtgcgcaaagtcctacttttctttgattcaatgaaatattactaaattacagtttcaagatagtagtttgagagggaagatatggatagcatattgtcagtttatagaaaattatttttattgatttaatgttttaagtgaactctggttatggtcaaatcagtatgtgaaaatagttgcatcaaaatttaatcttaagaaaatgaaatttcagtcagttcttttttctttatcatctcttggaaatgtactttacaaaataatgtkgctgctgtattgcaaaaaccttagaaatagtgcagatgacttttaagtgcttcctttaagaaaatacttaaaaataatgcatagaatgagattttgtttttcatttcatggatactgtaagttatgcaacatggatctggtgaaataattattttatctgtaaaatataagagcagaagtaatttttaacatcttatgaatgcttaatttagctgtcatattttcaatggaaattcagtttgttgaattaaatgggtgtgaacctatcacctaatgtagttacaaaaggatttttaatattaaaataggcacggcctagtatattaagaatagctcatttacttacagttctaaacctgggtagaaatgcttttgtaaaacaattgttacagaaaacttctggggcagaatataggcgaataaataacacttttattacatttccttaacataataaactgtattgtagacagctagaaatacatttataggcaggaagtattaccgtaaaagcttgccattttagtagactaaagatgccacttctatctttatgccttgttatgcaattcacgggaagttgatagctttaagagtactactctataaacaatatcaccttttgctgcttccaagtattacacaattttatttataaatagtaatatgtacatttaaaactattcttgattttggtaacagaaaaatgtaacatttttgtgactgtgaaactatgccaccaagaagtaatgatgtcccagatgtggcctagttgttggggatgcaaagatgatttctgcactcataaaacttagagtttagaaaggaagttgcacattaaataccaaaaaatttaattatataggtttatcagaattatgaagtatagagtactatgaaagtatgtcttaggagaagttatcctaattagggcagttagggacattgatattttgcccttaaagaatgagtgtgaattaggtatgcaaagatggttgtgtataggtggtggtaagtgcagggagggttttgcatcagggctggggtaatactggtatgtttaaagctgtgggagtggtgcaaattgaatctagcaatatattaaaatgcttataagccataaaatcacattttaattcctcataagttatatgtagataccaggctgttggggtagtctgggtacgatatgataatggcaaggactcattagggggtgatggaaagaaactgatagattctagattctagaaatatttacgaggtagaatttactgcttctttgctgtgtctgtttctactcctaccacttttaagctttgaaatacttttgaatatttttgtacagtgtttctctttagctattccctttgttcatgtggttttttgccttaatactttgctgctgttttaatagagattgtgaagaaaaagaatataaactcaggtagtcaatctaacatattttactgaaccctaggcccactgatttgaaatgtcacctttattgtatattgtttcatttaactactctgaagatttgtctgttcctatgataatactgcactatttgaatatacagtgtttttacagttgatagcaggtacctccttgacatttatgctttcctaaaaaatcatgttggctagttttacgtactttctttttcaggtaaattttaggataaatttacccaaaatgcttttgggatttctattaggatttattcatttttttttaaagaataatttggagagaattggcatttttacgttattggatcttcttacctcagaacacggcttctccatttaatcaatttattttaaatgtctcagcataattttaataattttcatatctgtctgaacattttagtcttatttggttattacgattatttaggaaaactgttgatttttctgtgttgctcttatttatagtcagccaaactctcataaataactttactaattttttcactgatttcttcagacctttctgcagttcttgagaatgcacttatatcatctgcatttcttaaaatgctatgtcttactacattacttaaaacttaaactacaagtttgaaaagtagtcatcgtagtgggcattcttgtctagtccctgacttaatagtaaagcttctgacatttctccattaaatgtgatgcttcctatagaacctggtataaaatgactcttatttccttctgtttttactaaggtaaggttttttccatcagaattgggatttgaattctatctgatatatcttaagcattgagatgagtttgggttttttccttattctatgatattatattaaattacattataattttttaactaagttttgaagtctatgtagaaattggaaagctttcagtcttttctgttttgttttaaaaatgaattatctccatcttaaaggtttgatagactttattcttaaatctctccagatctcatgcctttttttaaagagaggacccttggaaatctttcagtttcttctatttgatctatttcattttttacttctttctttgataattgacattttcttagaaaatcayctacttgactagatttttaaaataaagttgttcattgtattcttaaaagagatttaaaaatctctatacctacagttattttctcatctcgtttctaatgttatttgtgtcttgcctttttttaattaattgacacattaataattgtacatatttatggggtacttagtgatgttttagtacatacaatgtttagtgatcagatcaggataattagcatatccattgtctcaaacatttttcatttatttgtgttgggagcattcgaatatcctctcttcagccgcttgaaaatgtatactgttgtcaactatggtcaccttatggtgctataaaacactagaacttattcctcatatctagctgtaattttgtgtcctttatcacatctcttcctaccccttctttccccctattcttccctgcctctagtaacctctgttctactttctacttctgtaagatcaacttttttagcttccatgtaagagtgagaacttgtgatgtttaactttctgttcctgatttatttcacttgatatcctccagttccatccaggttgctgcacatgacaggattttattcctttttatggctgaatagtattccattatgtatatataccacatttgctttattcatttatctgttattggacactttgattgattctgtatgatgactattatgaatagtgctgcagtaaacatgggggtggcacagatatctcattaatacactgatttcctgtactttgaataaattcccagtagtggcattgctggatgatgtggtagttctatttgtagattttaaggaatmtccctactgtcctccattgtggctgtactagtttacatttccaccaatagtgtaaaagagttcctttttctccaaatccttggttaaatttattcttagggttttttttcagttattataaatataatagctttcttgatttttaatgtgtgttgtttgtgtatagatatactactgatttttgtgtatttgtgttctgaaacctgactaaatttatcagttccaagagtttttttggtagtcttttaggcttttctttattgtaagatcatgtcatatgtaaatagtaacaatttgacttctycctttccaatttggatgccctttatttcttatttgaagagagacaaggacattgtagtaaaagggtaaattaagcaacaggctaaatcaattataaatgcacacaaccctggagcaccagatataaaaggaagtattattacatctaaaaggatagaccctgatacaataatagttggaaacttcagcatcccattctcagcattggacagatcacctagtcagaaaatcaacgagataccagatttaaactgcaccataggccaaatagacctaacagacatttacagaacatttcacccaacagctgcagaatacacatttttttcgtcagcacatgaaacattttctaggaaaaataaaggcaaacatacaatgtcaaaggaaagaaaagtaatgagaagtactgccaaccacatttatgaccatatgttagggcatacaagtcacaaaaatttttaaaaatcaaaataatatcaagtatcttatctgascacaatgaaataaaactagaaaccagtaacaagagaaacataaaactgtacaaaaacatggaatttcaaccacatgatcctgaatgaccaatgaatgaagaaatttaaaaggaaatttaaaaattccttgaaacaaataaaaatagaaacacaatatatcaaaacctgtgagatacagcaaaagcagtagtaagatactagtttatagcagtaaatgcctgcatcaaaaaaggagaaagatttcaaataacctaatgatgcatctgaaggaactagaaaaacaagaacaaaccaaactcaaaggtagtgaaaggaagaaaataataaggatcagagcagaaagtaaagactaaaataatacaaagtcaacaaaagaagttggttttttaaaaagataaaatcaacaagaaaaaaagagcaaatccaaataaaatcagaaacaaaacatgtcataactgatattacagaaacacaaggatcattgaagactattaggaacaactatatgtcaatacatttgaaaatctagagaaaatagataataaattcctggacatataaaacctaccaagattgagtccagatgagatagaagacctgaacagaccaacaatgtatgatacgactgaatcagtaataaaaaaaaagactcccaacaaaggaaagtccaggactggatggcttcaccactaaattatcttctcaaactattccaaaaattggaggggagggaattcttctaaactcattctacaaggccaaaataaccctgataccaaaaccagacaaggacatcacacaaaaagaaaactacagaccaatatccctactgaacataaatgcaaaaatcctcaacaatattatcaaaccaaatccaacaacacatcaaaaagatcatacaacatgatcaagtgggattacagggatgcarcaatggttcaatatacacaaatcaataaatgtgactcatgaacagaatgaaaaataaaaaccacataatcatctcaatagatgcagaaaaagcgttttgtaaaattcaacattccttcctgataaaaactcaataaattaggtagagaagaaatgtaccttaacaaaataatggccatatatggcaaacccacagctaatatcccattgaaagctgaaaagctttgagcttttcctgtaaggactggaacaagacaagagcatccactctcaccagtcttattcagcacagtactggaaattccagcaagagtgacagaaaggagaaagaaataaaagccatccaaattggaaagggagaaatcaaattgttactgtttacatatggcatgatcttacaataaagaaaagcctaaaagactctacaaaaaaaactcttagaaatggtaaattcagtaaggtttcagaatacaaaataaatacacaaaaatcagtagtatttctatatacaaacaacacacattaaaaatcaagaaagccattatatttacaataactgaaaaaacttttaaagtctgttttatctgaaatgaaataagtgtagcttttggttttcatttacatggaatatcttttttcatctctttgctttccctctgtgtgtcttcacagttgaaatgagtttcttgtaggcaacatgtarttgactcttgttttttaaatccattcatccagtttatattttttaattggggaatccaatccgtttacagccaagggtgttgttgatatgtgaggacttactcctgtcattttgttgttttattttctctttaaaaaatatcccttgtttcttacattctcttattgtttatttttgtggatgagtggttctctgtagtgatgttttgatttcttcgtctatgacttgatgcttttcttttgctgtttttagaactctttgtctttgacttttgacagtttgagtataatgtgccccagagaggactgtttggattttatcaattcgaggacttttgtgcttcctggatctgaatgtccattatctcccaagacttgggaagttttttacaactagctcattaaatatttcctatgatatttcccttctcttcttcttctggaactctcataatgtgaatatttgttcacttaatagtattctttaaattattctttttttctttttgtctgccttagttatttcagaagacctgtcctaagttcagaaattctttcttctgcctggtctagtcctttgttgaagctcttcattgtattttcttctaatttcattcattgaattcttcagctctaagatttctgttttctaatatctctctctttttgaatttctcattcaaacaatgaatcatttttcctaattttgttgaatcatgtatctattattttgtatctcactgtttccttacgattattattttgaattctctttgtgatattttgtatatttcctaataattgggatctgttattggagaattactgtattcctttggaagtgtcacgtttctttgtattttcatgtttgatgtagctctacattgatttatttctacacatatggtagaaaagttgccttttccagttttatggagttgttgaaaaaacttagagtattggttgcgtggggtgcattcactttgtttttaggtagacccacttgtgtagtctctttgcagattcttcagcagtaatcaattttagtgatgtttgtaagtgtttcagtggcctaagctgcaagagtttgtggctgcgatggtgcagctttgccaggggtgggctcactgggctgtttctcaggtcaggggtgcatgagtgaacgctgtgatgaggcaaccaacttggtgtctggcttgctgggattatggccatggggctgttactctggctggtggcatgggcacatgcctgcttggctggcttggagacacaatgcctgggttggggccactgggctatttctcaagttctcaggggtggtgtgcagccactcggccagtctaggggcatgtctgccagaggagaacctactagtctgttttttaggttctgggctgggtgcacaactgcttagccagtctgtgggcatgtttgttgagttcaggcctcctggagtatcttagggtgtaggtgccaatgtggagccagttcaaggacatcttcaccagaggctagcctgccaggctgtttttcaggctcaggacatgggtgtgcaactacccggccaccatggggacatgtcagctgctcagttgctcagggacctctgctgctcaggggagggcatacagtggtgtgactggctcaagggtgggttctccctggatgtgtccaccagactgtttgaccagaagtgctggcagcagggattggtttccttgctctgcaggaccagagccacagcagatcctgtgctcaggctctgtgcagctggggttgtggcattcagacacctgtgtggacttagtggaatgaaaacaactcctaggctggaaaagtgcagggtgtacttcagaaatggttctggtctcaaggtgatcggtgacatgctgcagcagcttggctcacaagggagtaagtgcagatcttgtgctcccagtctgggggaatacagctgtgtgaattcacagcagctccccaaactgggctcagggcttgcaaggactgtggattctcctgtagtaaggattgcatgtgtttgcagtgggagtggaggctgctgaggttcctctgattaccttcctcccctaccaagcctccgctcccacaaggagaagtcccttctgactctgggccattccaggctcggaggatgggatggcagaggcaggatgcctccacgctggccttgtgggctcccagtcatcacaggtacctctccacttccctgctgtacttcggcactctcccttcaacactccagtcaaatcttagctgtttatttattgccgtggtcctttcttgaagcggaggaatgtgcaccagacacttaccgtcagccatcttactgacatcactcttcgtgtcttgtctttttttgattagactagccaagtatttgtctatttaattggtcacttgaaaaagccagctatttactgacttactgattgaatctatctcttttgattggatgacttttgcttttccttttattcgtttctggatttaattaccttgtaaattttggtctttcgtgatccataatagtttactcatactttcctgctctttgcccttttttaatgggagtattcttccgcttgatctttctgtgtatcacaatttaatctttgtttttgtttttgttttcctctctttttatttggtagtaattctgtttctctggaggctcatgcttttgtttgttgaatttggttagtctaatgcatgctgctagttttcataagtgattggtgattcatggtttattcatatttgtaactgaagagtctagattaaatctattaatttttctctagcccatgtaagaatcccatttatggctgggmgcggtagctcacgcctgtaatcccagcactttgggaggccgaggtgggcggatcaggaggtcaggggatggagaccatcctggctaacacggtgaaaccccgtctctactaaaaaatacaaaaaattagctggccgtggtggtgggtgcctgtagtcccagctactcgggaggctgaggcaggagaatggcgtgaacctgggaggcggagcttgcagtgagccgagatcccgccactgcactccagcctgggcaacagagcgagactctgtctcaaaaaaaaaaaaaaaaaagaaagaaaaaagaatcccatttatgtgttattgaatctagggtctgattaaaatgtttatctcctctagtgattattgagaaggagtggaacttgtaggtaacttactttttgagtttagactctcctttcttcccgaaatctctaagtaaatgggaaaaacttccctgtttttctggctcctatcttaactttgtaaggctcccattccagagagcctcttattttatatattaagtttttacatatactagagttgtcttgtgtttatcgatatctgaataattattatagatttatgttttaatattttataggactaaatcattttgctactttaaaaaaatcacgaaagtacattatttgaagtttggagaagaaagggatttggtaacaaaggacagccatttccattttaagcagctaaacagcaggagagatttctgtaagaaggtaccagctcagattccattgttcatcattttggtgagagactgcagaatcacttgtactaagttgggattaggcccatctctcattatttgttataattttgtcacatggtttttctttatcgtttcatatgcttttaggataatatagtttaaaagaactatgtattgtattttgactataaatccaccaaatatacaaactaatttgagaatgattgacagcattataatatttgagatttctttgccaggacaagggatgttgtcaagtttatccatttctagattaaattccatatgattaagagtcagtaacaacttatgaagatctttaaaataaccaaagatctatttcacaatttctttcacttttctactgacttaaacaccaatttgaaaaaaaaacaagcacttcaagaatcaatacagaaggtacattttttaaaaatcttcagtacaactggcgttatgaacactgactaaacatttgataacattaaggaattactgttaatttgctaggtattgctaatttgwtactattgctaacagtattttggttatgttgtttaaaaggagtgctgatctttgagacatatacattgaaataggatttctggaatttgcttcaaagttatataaggtagaaagtatataggagtgtgaaacaagattggccatgagttgctaattgttggagctgatcattgtgtggtttattatattattctgttttcttcacatatgtttgaagttttccataataaaagctaaaaataaaaacaaatgtacaatgtcaaaagaaagaaaaataaataatgggaagtactgctaaccacatttatagccacaggacaaaagtacttttaaaaattgattctattgttccctgcccacttaaaggtaacttgttgaccttaagcaaaattactaagtagcttagtttatattctttacttcttatgtcatctttcttcatgttaatccaatacttgttttccttctcctttgtcaagtgcacattgtcctcttgttcgcttctttaccttcaaaaattgtcagtcatccatgaaacccccatggatgaacctgtccaagttaacatacaagagaatgctttgtgagggagatcagggatagaagacaggaaataggtctgatagagtattagaaaaatatttgaatatttagaaaaatactggtaaaaatgtgagaagcttgttggaacatttggaaaaaacttaagagttccatatgaaaaacactattgattttgtttttaaaaattgagagtctgaagatagggaaagtaaaagctgaaacctctagtattctaacagaaaatagataatgtccaaaatgggtcagtcacaaagtagcaatattagcatattatccagaaagaagagaaactacgaacagatctgattagaagaaacaattaaattcctagtaattacttctgggagtaggataagttgggagaagggtaagcagcatggaacagaaaactgtattttataagccatttagtactacaatctgacttttaacagtgtttatattttactttaataaaaataaaagttaatattaaaaacgacttctgtatttactgttgatttattctatgagctaagagataaaactaataaaattaagattataatattgagtgaggggaggggtctagcgtcactctctaacatgtacatatgttgtcccagcaccagctgttgaaaaaactatttttttctttattgaattgtcttggcacattgtcagaatcaattgaccataaatgtatggatttgtttctagcctgttgtttagttgtatgtatgtatatatgctagttccacacagtcttgattactgtagctttttagtaagttttgaaattgagaagtgtgaggtctccaactttgttgttctttttgaagactcttttggctattctggtttttttgagtttccatatgaatggaatgagcttgtcaatttctacaaaaaaagaaaaggcagttcagattttgatagggagtgtattaaacctgtaggttaatttgggaattgttgccattttaataataagtcctctgatccatgaacatgggatgtcattccctttatttagatcttctttcattctttcaatgatgttttatagtttcattgtacaaattttgtactacttctgttacatctatttctcagtattttattgtctttgatgctactgtaaaaggaatggttttcttaatttcatttttggattgtttgtcaccagtgtatagaaatacactatgtgtaacaacatattggttgttttgtattaatcttgtatactgaaaccttggtgaactcacatattaatgataataaatttttgtatattaggattttccatatacagaatcatatgatctgcaaatataaattgttttacttattgctttctagtctggatgscttttctttattttcttttttcttttttttttttttgcttaacagccctgtctagaacctctaatccaaagttgaataaaaatgccaaaagtgtacagccttatttttttccttattaggagtaaaagcaccattaagtatgatattagctgtgggtttttcatagaagccttttatcagagagaagaatttcccttctatttttagtttggtgaatgtttttattatgaaagagttttgggttttgtctaatgattttctttgtctgaagtgtcatttggttttgttcttggttttattaatagagtctgttgagtttttatctgttgaaccactcgttcattcctgggataaagtgaacttggccattatgtacaattgtttgtatatgtcactggattcagtattttgtttaagatttttgcatttgtatttctaggagagattggtggtaatttttttgtgtgtgatgttgttgggtttagtatcagggtaattggtctcatagaatgagttggaaggtgtttccttctcttccgttttttttttttttttgaaggagtttgtgaagtattggttttaattcttttttaactgtttgatagaattcagcagtgaaggctggttctgagcttgtgggaagtttctgattcctaaattagactttttccttcttataagtctgtttgaattttctgttttttcttgagtaatgtttttaaatttgaaaaatacagagcaagtgcaaggttgtaagtatgtgtaaggtagtctgataaagtccaaattacatataaaaatctatcctgctattaattcctgggaagtcaatttgaaactcatactgtttaacaatttcattttttaaaatgttatttttccaaagagtattcttaatgtctagttgcattattaaaataatcttactccataacggcttgaaatttaagggtttttgtttgtttgtttgtttgtttgtttttatgttgcttttatctcagcagcaatgcagcaagtcttggaaaaccttacggagctgccctcgtctactggagcagaagaaatagacctaattttcctcaagggaattatggagaatcctattgtaaaatcacttgctaaggtatatagatttattcataagattactgaattattttggacttagtttttatagagatrttttcagatattactattttagaatttggttgatatacattaggtttagttagcaaataaaaacattcagcacataatgaaatcttaacatatgcaaaaattagaccatttttctcttttctactctgactttaaatacaggatgaaatgactcttagttttggcgtaatgcctttaaggtttagagaaatcatacctgcacagttgtgttttaacagggcctgtgaaaaagatcctgatcctatttccattttcaacaatggcaaagtactgattttcttcttttgcattagactgtgtacctacttttcatgtaagttcttgacttcctttatctagtgcttttttgaaattttgktatttgttgcataagcctggtattttaagtctgtttccctagtcaactctggagtaatctctttaactcattgataagtatactttacaaccatttttattaaataattattatatgctaaagcttaatgtattacctattttacaaacctgctataccattctttagagttcccccaaatgactcttgctttcaagaatctatgccacatgccttctttgatcttttcttcatagagccatcttgttccttttggtttttgctctatgagaatgttgatttcactctcttctgtgatttttttcttagccaaagtctgttacttgttttcttccaagacctctgaaaaataccttttacaaggttttctattagtgagagtgaattaatgatgcagattcttcttcttttttttttttttttttttttttttgagaggaagtctcactttgtctcccaggctggagtgcactggcacgatctcagctcactgcaacctctgcctgctgggttcaagtgattctcctgcctcagcctcccgagtagctgggactacaggcgtgtgccaccacccctggctaatttttgtatttttagtagaggaggggtttcaccatgttggcgcaggctggtctcgaactcctgacctcacatgatccacccaccttggcctcctgggattacaggcataagccaccaggcccggccaatgatacagagtcttcattttatttacgtgtttacttatgctaaaatcacatggtataaaggcccttaagtagaaacgaatccatttgcagatcatccaactggaatttttattttagtcattttttactatagcctttccaatgttcattagatatttttatattttaataataatgtgcagggtattgtttcagattcaaacttgtcataaacattaattcctactgttttaaagtaatagctccagggtctgttgaaattagtaggaactatttaaatttctgttaaatagtttacctgggttcttattgtacttttaaaatggttttttactcttttcttgatgtttttctgttgattgtcagttattgtccatgtagctgttacactgttatctccatgtttatttaatttatagcttttgatctatagattttaaaactatataatgcactaacaaatgtttatagtttgcaaaggtctttaaaatacactgttttgtcttcacaacaactttatgaatttaaaatatactgttttatctttcaacaacttttgaattgaaaagtaagactcagtcaataagtgttgtgtctaaggtctctctgctagcaaaagacagatgaggtttaggccatgtgttctatcatcaaattctgtgttctacctactccaacaccgggtgatggggtatgtgtatgtttgtgtatgcttattcttaaaaactggtgggagtaaaaatttactgattttatgccattgatgttggtctttcagaggattatcttgttcattattcttaacagttgcaatggttggatgacttttgagcaggtaaggtgctactgtactcttttgatgataaaaatgaaataaagcaaagagttatccaataatatgcaacattcaggcagattcttaataaggaaaaacaatggtagttcagtattcctataatataggttaaaaaaaatcccaggaataggggaggaattccgcttccaagaaagaaatagtaagtcacagcagcctagcactctcagtataacaaatagaaggaaaaaagaggcacacattgctagatatgcagagaggcagaaatatctggccactaatcatgagaaaaacaacagaggcagtcccataaatggttcttttattagcatttatacacaaggatttgaaaataacttattaatgtacttttagtagaagaaaagggaaaaaaacatgtaaaatatttttagaaaatcagaataaaaaataatcaaatgaacattttaggatcaaaaatacagtatctgaaattagttcactgatagaagactagacacaacagaagagggaataagtgaatttaaagataggttattagaaaatactcaagcaaaaactaatagagaagaaagaatgaaaaaaagataacaatatgtgaaacatactcaaaatatctaatatatgtagtttgtattccagaaagaaaggagagagggaagaagaaatataggtaaaccctatacttttgcatttcactttattcccctttgcagttactgcctttttaataatcaaaatgggcaaaataaccagctagcattataatgacgggatcagattcacacataatattaaccttagatgtaaatggctaaatgccccaattaaaagacatagaccagcaaattggataaagaatcaagacccaccagtctgctgtattcaggagacacatctcatgtgcagtgacacacataggctcaaaataaatggatggaggcagatttaccatacaaatgtaaagcaaaaaaaaagggattgcgatcctaatctctgataaaacagacgttaaaccaacaaagatcaaaaaagacaagggcattacataatggtaaagggatcaatgcaacaagaagagctaactatcctaagtatatatgtacccaatataggagctcccagattcataaagcaagttcttagagacctacagagacttagactcccacaccataatagtcggagattttaacaccccaccgtcaatattagacagctcaacaagacagaaaattaacaaggatattcagaatttgaacttagctttggaccaagtggacctaatagacatctacagaactctccaccccaaatcaacagaatatacattcctctcagcgccacatagcacttattctaaaatggaccacataattggaagtcagtcctcagcaaatgcaaaagaacggaaatcataacaaagaatctctcagaccacagtgcaatcaaattagaactcagggttaagaaactcaaaaccatacaactacatggaaactgaacaacctactcttaaatgactactgggtaaataatgaaattaaggcagaaataaataagtactttgaaaccaatgagatcaaagacacaatgtaccagaatctctgggacacagctaaagcagtgtttagagggaaatttatagcagtaaatgcccacaggagaaagcaggaaagatctaaaatcaacaccctaacatcacaattaaaagaactagagaagcaagagcaattaaattcaaaagctagcagaagacaagaaataactaagatcagagcagaactgaaggagatagagacatgaaaaacccttcaaaaaaacaatcattgaatccaggagctggttttttgaaaagattagcaaaatagatagaccgctagccagactagtaaagaagaaaagagggaagaatcaaatagatacaataaaaaatggtaaaggggataccatcactgatcccrcagaaatataaactaccatcagaaaatactataaacacctctctgccaataaactagaaaatctaaaagaaatggataagtaattcgtggacacataacaccctcccaagactaaaccaggaagaagtcaaatccctgaatagaccactaacaagttctgaaatagacagtaataatagcctaccaaccaaaaaaagcccaggaccagacagattcacagccagattctaccagagatacaaacaggagctggtaccattccttctgaaactattccaaacaacagaaaaagagagactcctccctaactcattttatgaggccagcatcatcctgataacaaaacctggcagagacacaacaaaaaagaaaatttcaggccaatatccctgatgaacatcgatgtgaaaatcctcaataaaatactggcaaaccgaatccagcagcacattaaaaggcttatccaccacgatcaagttggcttcatccctgggatgcaaggcaggttcaacatgcacaaatgcataatataatccatcacataagcagaaccaatgatgaaaatcacatgattatcttaatagatgcagaaaaggcctttgacaaaattcagcccctcttcatgctaaaaacactcaataaactaggtattgatggaacatatctcaaaataagagctatttatgacaaaccaacagccaatatcatactgaatgggcaaaagctagaagtattccctttgaaaactggcacaagacaaggatgcactctctcaccactcttattcaacgtagtattggaagttctggcccaagagaaggaaataaagcgtattcaaataggaagagaggaagtcaaattatctctttttgcagatgacatatttagaaaaccccattgtctcagcccaaaagctccttaagctgataagcaacttcagcaaagtctcaggatacaaaatcagcgcgcaaaaatcccaagcattcctatacagcaataatagacaaaaagagagccaaatcatgagtaaacttccattcacaattgctacaaagagaataaaacacctaggaatacaacttacaagggatgtgaaggacctcttcaaggaaaactacaaaccactgctcaaggaaataaggacacaaacaaatggaaaaacattccatgctcatggataggaagaatcaatatcatgaaaatggtgatactgcccaaagtaatatataatctcaatgctattcccatcaagctaccattgactttcttcacagagttagaaaaaactactttaaatttcatatggaaccaaaaaagagccggtatagcctagacaatcctaagcaaaaagaacaaagctggaggcatcacgctacctgacttcaaactatactacaaggctacagtaactaaaacaccatggtactggtacaaaaacaaatatatagaccaatggaacaggacagaggcctcagaaatgacatgacacatctacaaccatctggtctttgacaaaccagacaaaaacaagcaatggggaaaggattcgctatttaataaatgatgttgggaaaactagccatatgcagaaaactgaaactgtaccccttccttacaccttattacaaaaattaagtcaagatagattaaagacttaaacgtaagacctaagaccataaaaaccctagaagaaaacctaggcagtaccattcagggcataggcatgagcacagacttcatgattaaaacaccaaatgcaattgcaacaaaagccaaaattgacaaatgggatctaactaaagagcttctgcacaacaaaagaaactatcatcggagtgaacaggcagcctacagaatgggagaaaaattttgcaagctatccgtctgacaaagggctaatatccagactctacaaggaacttaaaaatttacaagaaaaaaacaaccccatcaaaaagtgggcaaaggatatgaacagacatttctcaaaagaagacatttatgcagccagcagacacatgaaaaaatgctcatcatcactggtcattagagaaatgcaaatcaaaactgcaatgagataccttctcacaccagttagaatggtgatcattaaaaagtctggaaacaacagatactgaagaggatgtggagaaatagaaatacttttacactgttgctgggagtgtaaattaattcaagcattgtggaagacagtgtggcaattcctcaaggatctagaactagaaataccatttgacccagcaatccattattgggtatatacccaaaggagtataaatcattctactataaagacacatgcacatgtatgtttattgcagcactattcacaatagcaaagacttggaaccaacccaaatgcccatcaatgatagactggataaagaaaatgtggcacatatacaccatggaatagtatgcggccataaaaaatgatgagttcacgtcctttgcagggacattgatagagctgtaaaccatcattttcagcaaaataacacaggagcagaaaaccaaacaccgcatgttttcttttaagtgggtgtaagttgaacaatgaagaacatatggacacagggaggggaacatcacacaccgatccctgtcgggggtttgggaggcaaggggaggggggatagcattaggagaaatacctaatgtagatgatgggttgatgggtgcagcaaaccaccatggcacatttgtacttatgtaacaaacatgcacgttctgtacattatcccagaacttaaagtataataataatttttaaaaaaaagaagaagaagctgcaacaagttacccagaagatctagctgagatcattgattccagtggctacacttaacaacagattttcgatgcagacacagcagctttgttttggaagaacatctagagctttcacagctagagagaagtcaatacctgccttcaaaggacaggctgactctttggttaggagcttatgcagctgatgactttaagtggaagccaatgctcatttaccactctgaagatcctagagcccttaagaattatgcgaattctactctgcctgtgccctctaactggaacaacaaaacctagctgacagcacatctgtttacagcatggtgtgctacatattttaatcccactgttgggatttactgctcagaaaaaaagatttctttcaaaatactactggttattgacaacacacttggtcacccaagagctcggacagaaatgtacaaagagaggaatgttgttttcattcctgcagacacaacatctcttctactcatggattaaggggtaattttgactttcaagtcttagttaaatacatttcataggactacagctgccatagatttcgattcctctaatggatctggataaagtaaattgcargccttccagaaagggtttactattcyagatgccattaagaacatttgtgatgcatgggagaaggtcagaatatcaacattcacatgagttggggagaagttgagtccagctctcatggatgactttgagggattcmagacttcagtggaggaagtcactttagatgacaagtgactttcacttagatgaaagatgacactttcttgactttagaagacaagaaaacaagaattagaagtggaacctgaagatgtgactacattgctgcaatgtcatgataaaacttgaacagataaggagttgcttcttgtggaggagcaaagaaagtggtctcttcagattgaatctattcctggtgaagatgctgtgaaaattgttgaaatgataacaaaggattacaaatattacataaagtttaggtgataaagcaggagcagtttgaaagaattgactccaattttgaaagttttgcttggataaaatgctctcaaacaacattgcatgctatggagaaatctttcatgaaaggagagtccatcaatgtggcaaaccttattattgtcttattttaagaaattgccacagccacccaagccttcagcaaccaccgccttgatcagtcagcagccatcagcatcaagacaagaccttacacaggcaaaaagattttgactctgkgaaggctctgatccttagcattttaacctttaaagtatttttaaattaagrtatgtatattgtcttttagacatattgcagttgcacacttaatagatcaccttgtcatgtaaacataacttttatatacacagggaaacaaaaaaatttgtgtgacttactttgttgcagtatttgctttattgtggttatcttgagcagaacctgcagtatctctgagctatgcctgtacagctagtagaatgttgaaaccttcaactataatagtagattaacctatctctttttgcagttctgtcagattttacctcccatattttaatgctcttttgttaaacacacattcactaagattgttatatcatctcagagaatcaactcttatcgttatgtaatgcctctctttgttcccaataatttttcttgatctgaagtctgccctgtctgaaattaatatagctactccagttttctttagttaatgttagcatgatacacctttctccatacctttagttttaatctctctatatctttgtatttaaagtaagtttctggtagacaacatgtaattcgatcttttttaattcactctgacagtctctttgtttttttatttttagacggagtcttgctctgttgccaggctggagtgcagtggtgccatcttggctcactgcaacctccgattccctggttcaagcaattctcctgcctcagcctctcaagtagctgggattacaggcacgcccagcttatttttgtattttcagtagtgactggtttcaccacgttggccagggtgrtctcaatctcctgaccttgtgatctgcccacgtcggcctcccaaaatgctaggattacaggtgtgagccaccgcatccagccaacagtctcttttaagtgctttagatcactgatgtttcatgtttattgatataattcgattaacgtctttcatactgttactgttttgtatttgttgcctgcttgcctgcctgccttccttttttccttgtgtctctcactcattttgttttctctgctttaactaaacattgtatgtgatttcaattttctctctcttagcatgttagactttaaaaaaaaaactttttagcagttctccttgattttgcagtatacgtttgcaatctaatacactttcgaataacatcataccacttacagtgcaactaccttataaaataacactgtttcctgtcccatataatattgctgccattcatttattcataagctataataatcaaatacattgttgtgaataaaactattatctattaaatcaattaggaataagaaaaataaaagattttattttaccttttttttctctagcactcgtctytatatcaacccaagttttgcacttacaccattttccttctttctgatgaatgtcttttaacatttcttgcaagacaggtgtagtagtaacaaatattctcaatttttgttgaaaaagtcctttttttttttaacttttttatgataactttactggataggtaattccaggttggtggagtttttttttttttttttttctttcaacatttaaagatttcactctattctctgcttgcatgtttcctgaagagttcagtataattcttatgcttgctcctctgcaggtaaggttgccccccccccaccccgatstttcagtattttgttttttattttctgcagtttgaatataatatacctagacttagaattcggggtttttaatcctgcacagtgttctatgagtctcgtggatctgtggtttggtgtccatcattaatttaggaaaattctcagtttcrgattttgtagcattttggattttagatttttggattggggatactcaacctatattatgaatattgctgccataaacattcttggacacacttttatgtagacgtagttttttatttctcctgtgtatataagtaggtaactgtgtttcattgaggaactgccggactgttatccatagtagctgtaccattttttattcccaccagtagtgtacaagagttctaatatctctgtatcatcttcaacacttgttattatttgattttttggttcttaactgtcctagtgggtgtgaagtggtattttattgtggttttgatttgtgtttccctggagactaatgatattgagcatcttttcatgtgcttattgaccatttgtacatattttttggagaaatatctgtttagattctttgcccatgtttaaattgagtcatatttatttttattatgaagttgtgagagtctttcatgtattctgggtacaagtcttttatgagatatatcatttgcaaatatttctcccattatatagattatctttttactttcttcttagtgccttttgaagcacagaagtttttgttttttgttttttatttttatttttttgagatggagtcttgctctgccgcccaggctggagtgcagtggcacgatctcggcccactgcaagctctgccttctgggttcatgccattctcctgcttcagcctcctgagtagctgggactacaggcgcccgccatcacacccggctwattttttgtatttttagtagaaacggggtttcaccgtgttagccagtatggtctcgatctcctgacctcgtgatccatccgcctcggcctcctaaagtgctgggattacagtcgtgagccaccacgcccggctgaagcacagaagcttttaatttgatgaagtccaagttgtctttttgtcttttgttgccttgtgattttggtcttatatgtaagaatcttttgctaaatccatggtcatgaagatttacccctgtgtttccgaagagctttatagttttagctcttacatttaggtgttggatccattttaagttagttttttgtatacgatattacgttaggcaccaacttctgtcttttacatgtgcttctctagtccatttgttggactttcaaatggtgtttcagcaccatttgttgaaaggaatattttttccccattgagtggttttgggcacctttgtcttaacatgcaacagttggccactgacatgtggttttatttttttactttcaattctattccattgatctatagatctttccttgtggcagcatcatgttttgataactcttgtgtagtactttttgaaatgaggaaatgtaagtactcccattttgttctttttcaggatagttttcactgttctggatccctttgcaactctataagaattttagaatcagtttgtcaatttctataaacatgtcacttaggattccagtaggcattgcattgaatccrtagttcgttctggggagtattgccatcttaacagtgatgtcttctaatccataaacatttatttaaatctttaatttctttcaacaatgttttataattttcagagtataaattttgcacttgttttgttagttatactcctaggtattttgttctttttgctgctgttatgaatggatttgttttttaaatttcattttcagatttttcattgctagtgtatagaaatataattgatttttgtatattgatcttatatatcttgcatccttgctgaacttatttttttattcaaatagtcttttagtgaactccttaggattttctaaatacaaggtcatgtcatctgaatatagacagttttatttctttttaacctgaatggcttttttatttttcttgcctaattgtcctggctataacctccagtacaaatgttaaatagaagtgatgagagtggacatctttgtcttgtttctgctcttaaggggaagtatctaatctttcactagtaaatataatggaagttgtgggtttatactgctatcctataccttgattttttgcataagattttatatcagtacctgtgtcacaactttattctttgtaaatgtgacataatattttattttatggatatgtcaggttttttgagtcagcctgctgatatttagatggcctttttcttacaagttatgctgtaatgtgtaatcttgctacatgttattttgtacatacacacacacacctttttaggatagatctgaaaagaatcactgtaaggccaggcgcggtggctcatgcctataatcctagcactttgggaggctgaggcgggcggatcacctgaggtcaagagttcgagtccagcctgaccaacatggagaaaccctgtctctactaaaaatacaaaaattagccaggcatggtggcgcatgcctgtaattccagctactcaggaggctgaggcaggagaatcgcttgaacccgggaggtggaggttgcagtgagccgagatcacatcattgcactccagcctgggcaacaagagcaaaactctatctcaaaaaaaaaaaaaaaaaaaaagtatcactgtaatttaggtggatatggtgaatttgcttaccagtgtatgttcccactagaaaaaatatgtcaaagtgcctgtcttctcccatattctcattagcatgatgtgttatcagaatttttatctctgccaatctgataaagagaaaagggatttcattatagttttagtttgtacttctgagtgaagttgtgtgtcttttcatatgtttaagagatatttgatacacagtaggtgactattgcaaataactatgtaatacatatttcaagatagctagaagagaagattgtgaatgttggcatcccaacgaaataaatatttaaaataatggatatggtaattaccccatttgatcattatactatgtatatacatgcattgaaacgtcacattgtacaccataaatatgtacaatatgtatcaattagaaatataaaattaaatttttaaagataggttcctaaatttttctttctgtgaatttctttgctgaaactcttcacccagttctcttaatgagttgttgatctttttcttattgatttgtagaagtccttcgtaagtagggaaattagctttctgtcttgaatatgatttgtgttttgaccctagtttgtcatttgtattttgactttgtcgatttttgatgagaaatttaaaacgttcattaagttaattttattgggccttttttgaaataatgtatgtatctttcagattttgtgttatagttagaaagatccttcccactcaaaggttataaaaaggttattgtgtatttcctctgaatactattaaagccaagcttttaaaatgttgttttttcttttaaaaatttaacagattcccttttctggttttttgacatctgtgtggttctcctgattctacagatatatctaagagaagctcagcagtgctatttagaagtttcctgagtaccttgatatgtaacttatctaatctcggaatttgtattttggttaactaggcaatttctgatatgttctttactcactagagaattccattctgatttacttacacttactcatctttttttttttttttttttcagagcaaagctcatcctttttgatataatrtatgcagaaacaaaatagaaattgagttctccattctctctgtctcatttctactttctgctcaaaaattcttttttatttttgagtattagtgagcctgtgttgatcttgagttttaggtctctagaataaaagaagagggtggtgcttgatcacagccaaacttatttcccatttacttagctttttcaagaaataataagtaactactacatacatagctcttttctcaaaagatagaaacaaaatttatgatatggtccttgtgttttagaaagaccaggtttctacacataacaataatatgattgttattagaaaataatatttgtcactttagatatagcccacaacttttgtttgcaagcatggttggagtgtccttgagtgaaatacccagaagttctgaaagaacattttcttctctgaagttcatttctcaaaggtgcagtggtgaataaaattctcagaactggatatttaagaaggctaggccatatttgtatcagctgcaaatactcaatgccagtcatagaatgttcttccaaccacttgtggcaagtgaaatatatttttattgagttatgctagtgttgcaatagtgctctttaatttaaaaaaagaaaacaagatttatttatttaaatagtatgtggctcacttgctcctctggttattttttgtgtgtgtttcctttgtcttttttagtttgattagttaaatttaagttggtacttgcctcttgaaagctaataaaaaaaatctgaccttaaagtgaattagaggttccaagtttttgacaacatctcagagcttaaaaagctatatgttaataaatgtggacctgcatttgctttcttagaaaaagtaaaattgatcccagttgaatccaagtatgttggttttccatgttaatatatttatagctacagtttctaaaaaaacctttttttctcccttcaatttctgtattttctagtgagattctcttcttccatagaaccaaactgtgaggctgatatgaaaaaatcttcagatgtgcttgggttctttttctaacatgattctgccttctcacatgactctcccctgacccccaaccccttgccattagtctttccacattcctacttctcctcacccaatttggaagcattaggttaatacacatactaaggaatggagttttcaagtcattgatcatttctgttcctttacttctcctaaagtcctgaattaaaccaaggactactgttgtctaaagtactgttgctgatcatataacattttcctgaagaaataaatggtcttcatagctcttacttagagcaaaggagtgaaagtcaaagggacgagtggtattctgaaccatagaagtataaaataactgtgaggatagatacggtgtaatggaattaacacatctagactggaagagccatgctaatcagcaacaactaaattagactgactgagatgtatgtcatacatttaagtgaatgagaataatgcatcatttattggattgaataattaactgcaatttaatgttagagtggctctctatataaagatgaagtaaagtaagctttaatagatgagagttcaagtcttggtgttagactacttgactctgccattcaccagtaatgtgaactcacgcaaatcacttcacctttttttgcatcagtttcttcgtccatagtgtgagtataatatacctacctttgctgaatmcacacacacacacacacacacacacactacttagaatatagtatccaacgcagaaaaaaaagcccttcaatagatgttaaggttctttccttcctttttttttcctttgaagctttctttttatactatgttaaaagaattggagtattacaaggttaaagatgctaaatcaggtagtggctttttattccagcaaatatttctatctaaacaattggcaattctagcttatttcataagagttaactaattctgtagattattttcttttttttttttccaatggtgatagtcttttatgataaatattgagtgtcctcatcttctcatccttatctggcttgtattatatgttcagaaaattacaaatttacccrttttcattttttgtggcattttctagtctaattttttttttttttttttttttttgagacggagtctctgtcacccacgctggagtgcagtggcatgatcttggctcactgcagcctccgcctcctgggttcaagcaattctcctgcctcagccttctgggtaactgggattacaggcgtccaccaccatgcctgcctaatttttgtattcttagtagagatggggtttcaccatgttgggcaggctggtctcgaactcctgagctcaagtgatctgcccatcttggcctcccaaagtgctgggattacagacatgagccactgtagtttaatttttttaatctaaatctcataaaacttcttcctctatttcaattacttttggtcttttgatatttttctttttgtttagtaagagttttttcttctttctcggtatttcatatgacttttagaatttcttcttttaaggtctttctttaaaatcttgcttaatatatagctttcttttccacttaagaacttattttactcctgtgaattacctagaaaaaatagatttaagcaagaaaaattgtcttttaaaaattagaatgttttatttggactctgaaggatccactctatggtaaaaataacatctaaagtatkatagtttaggtatctgaaaaagtttagttgatactgttaccacttgaaatgtggatttttctttagcaatccttgaaatggatcttaaaatataagatttgctatcttacatggttttgtttatgaattaaattttgataattacgcttttcctgtcttcagaattgtatagcaaccatttatcagaaaagcaaggaatgcttaaaagttggagccgcttagtgttcattctcaatttgaacttaacactcggctttactcctactatgaaaggatgattagaattactttcggccgagggcggtggctcatgcctgtaatcccagcactttgggrggccraggygggyggatcacgaggtcaggagatcaagaccatcctggctaacatggtgaaaccctgtctctactaaaaatacaaaaaattagccaggcttggtggcgggtacctgtagtcccagctacttgggaggctgaggcaggagaatggcgtgaacccgggaggcggagcttgcagtgagctgaggtcgcgccactgcactccagcctgggcaacagtgcgagactccatctcaaaaaaaaaaaaaaaaaaaaaaagaattacttactttctgtgacagtgtggttgacggtctattttctgtggaaaagattgtgagattaagaaaaaaacaactttacttataaagacagatgatcatttccctgattaaattatatagtcttttaaaatccagtttaagggccacttgctctaaattgacttttttttccactgattttcaacattggaagataggagcttccagattctggggtttccaaaattatttttatcattttaaaaaatattaacatataattattacattcctattccttgtttttattatgcttaatcatttattttaataaaatgtaacaataacatctagagtttgagccttgaccctaggaggtcgttaggaaattctcttggtggtaagggactgtaataggttttgtaaataattagctgacttgtccagttttttcatggtttagttataaaaatgagtttttcatgactttcaggatagaactagaggccaagatttattatattgcatgatatacttactgtaaaatctatatattgcctctggttgaagtattaaatttggtttacatgaattaaatctccaagtaatatattttaaaactttacgaaaaagaaataaaccatggtctggtgcaaataacaaataagtattactactttaatatactcttattttttcaggctcatgagaggctagaagattccaaactagaagctgtcagtgacaataacttggaattagtcaatgaaattcttgaagacatcactcctctaataaatgtggatgaaaatgtggcagaattggttggtatactcaaagaacctcacttccaggtaactttccctatcactcaactctcaagttccctgtattcccaaagtattctcctttactttccagtttaaggtgatgttttcttcaaagattatttagggctataataggtaagtatgtaaattccaaccttggtattttaatgtcctcatatgctgaggatatataaagagacatatgtaacaataatgctacataaatgtacactgttacagaaatacatcacaatggatttttctttgtgccattaaagaaaacaaccttaattcaccgtcagaccacatgctggagccattttcctcactatgataatggatttttttcttcctcattcccattctgtttcttagtcaatactttttagtattgcttctcaagattgttgtgcagtcagtgaccatggaacatagagagctgtgaagtatagaaactattgtataacataatctccacaggtacagaaataagtatgattttagcaatggcctgtaccaatgaagagttcatcagttttacaaagaagaatgcatttcagaagagaaaagacaggaaagatttcttgtaaacgtataataattaagacagtgtggtattggggaaggtgttagaaaaattaactcattgaaaagaatggaaatccccgataaatacatccagccgtatatggtaacttgatttatgactgggacactgcattttcgtggaaaaagaatggtgctgggatagaataaagtaaatgtcacctgctttcccctgcaaatcttagcactgaaaatcaaatggtaacagccttttgctctttctcagccaaagattttatgtgactcttcaacaatgttactgcaaaatatgaaggtttatagtgagatggttccgacataaattagtgtcttaggtacaaaagaaatatggacacatatctcagagacatatcctgtgcaggtcccagttgattgagtccttataaaggcatactgagttatttggactttatcgtaaggacaatgggaaactttaggtgtggagggggagatgaataggaaaggaggatgggttgggtattaaccagggaaaggtcaggtttgtgaaatgagatggttaagttccaaggcaagaaattatgatggcagtacgtatagatagaaatttaaagactttcaagttttaatgaataaaatcaacaggatatagtgattggttgcatatgacagttgtagaagagagatgtgggaagttgataacacaatttatgacttaaacgatggctgttgaatgaggtaaggaacactagaagaaaatgttttggacatacttatgttaaggaaactggccaccttaggtttgtgatacattggaagcatctaggttttcaggaatgctacttattattagtaaatatttgtaatttaataaatatataagcacatacattatatgaagtgtagcatataaaaattttagaataccagcaaataaaaatacaaaaatgaagacattgcttttcttctacccagatcactattgtactcttagcgcatattcatccatatttttctatgcacaaatgtacatatataatttttttactaatttgagattttgcacaaactgttttaacttactctttttttaagttattgatttctaattttctgtttcagtgaacttccatctcatataatacacacaccatattcagacttctccatttgataccacaatattatttacaggtggtttgtacatataagtgtccagtttaggtccatgtgtggcagctggttgcaccataccttttccccttgattatgacattgacctattgaaaagaccaggctattgtcctgcagaatgttccacccccggatttgtttagttacttccctgtggtgttgatgttatttcttctatttcctataaacagaagttctatctaaaaagttgatgattcaagttgattatttggagctagaatacatcttaagtgatacgatgcaacatgaattaaactgcattagaagatgtgtaataccttttggcccaccacagggctgagattggtcctttgattaaaggtggtgatggcctaatcctttctttgattactgggaagtaatcaattgtgtttttatcttaacattatacaaattctgttctctatcaaccatgtacctactgatgaacacaagttaataatccttgcctaaatcaatattttcttttttcttttttttttttttttacttttgttttaggattaggggtacatgtaaaggtttgttacataggtaaacacatgtaatgggggtttgttgtacatattattttaccacacggatattaagcccagtacccaatagttatcttgtctgtttctctcccttctctcaccctccccactcaggtagaccccagtctctgtttttcccttcttgttgttcataagttcttaccatttagctcccacttacaagtgagaacatgcattatttggttttctgttcctgcgttagtttgctaaggataatagcctccagctccattcatgttgccacaaaagacatgatctcatttttatggctgcccaacctcattgatcttttgaaaggttttttggtattccatggtgtgtgtgtgtgtatatatatatatatcacattttctttatccaatctatcattgacaggcatttargttgatttgtgtctttgctgttgtgaatagtgctgcaatgaacatttgcatgcatgtctttatggtaggaagatttatattcctctgggtatatacccagtaatgggattgctgggtcaaatggtagttctgcttttagctctttgatgaatctccatactgctttctacagtggttgagctaatatacattcccaccaagaaggtacgagtgttcccttttctctgcaaccttaacagcatctggtattttttgaccttttaataatagccattctgactggtgtgagatggtgtctcattgtggttttgatttgcgtttctctaacgatcagtgatattgagctttttttcatatccttgttggccacatgtatgtcttcttttgagaagtgtctgttcatgttctttgcccacttaaatgggcaaagaacttgtaaatttgtttaaggtccttatagatgctggatactagacatttgtcagatgcatcatttgcaaatgttttctcacattctgtaggctctttactctgttgatagtttcttttgctgtgcagaagctcttcagtttaattagatctcatttgtcaatattggcttttgttgtgattgcttttgatgtctttgttgtgaaatctttgaccattcctatggccaggatggtattgcgcaggttgtcttctggggtttttacatttaaatctttaatccatctmaagttgatttttgtgtactatataaagaaggggctgagcttcaatcttctgcatatggctagctggttatcccagcaccatttattgaatagggagtcttttccccgttgtttgtttttgtcagctttgtcaaagatcagatagtcatagatgtgcagccttatttctaagctctcttttctgttccactggtctatgtgcctgtttttgtaccagtatcatgctgttttggttactgtagccttgtagtatagtttgaagttgggtaatgtgatgcccccagctttgttctttttgcttaagattgccttggctattcgggcccttttttggttccatatgaattttaaaatatttttttctagttctgtgaagaatgtcattggtagtttgataggaatagcattgactctgtaaattgctttgggcagtgtagccattttaataatattggttcttcctatccatgagcacgggatgtttctccatttgtttgtgtcttctctgatttctttgagcagtgttttgtaattctcattgtagaaatctttcacctccctggttagctatgttcctaggtaatttattctttttgtggcaattgtgaatgggattgcctttctgatttggctcttcctttggctgttgttggtgtatatgaatgctagtgatttttgtacattgattttgtatcctgcaaaatttgtatcattcggaaggatacaaaggactttgtatccttggctgaagttatcagctggaggagcttttgggctgagactatggggttttctatatatagaattacgtcatctgcaaacagaaatagtttgtcttcctctcatcctatctggatgccctgtatttgtttctcttgcctgattgctctggctgggacttctaatactatgttgaatagaagtggtgagagaagtcatccttgtcttgtgctggttttcaaggggagtgcttccagcttttgcccattcagtataatgttggctgtgggtttgtcatagatggctcttattattttgaggtatgttcctttaatacctagttaattgataatttttaacatgaagggttgttgaattttattggaagccttttctgctctattgaggtaattatgtagtttttgtctttagttctgtttatgtgatgaatcacatttattgatttgcaaatgttgaacagaccttgcattctggggatgaascctacttgatcatggtggattagctttttgatgtgccgattgatttggtttgcaagtattttgttgaggattttgacattaatgtttgtcaaggatattggcctaaagttttctttttctgttgtgtttctgccaggttttgatataaagatgaggctgccctcatagaattagttggggaggagttcctcctcagttttttggaatagcttttctgtaggaatggtaccatctcttatttgtacatctgatagcattcagctgtgaatccatcaggtcccaggctttttttggttgataractatttattactgattcaatttcggaggttgttattggtctatgcagggaatcaatttattcctggctcagtcttcggaggttgtatatgtctaggaatttatctctcttctaggttttctggtttgtgtgcatggaagtgttcatagtagtttctcatggttgtttttatttctgtgggttcagtagtaacattcccttcatcatttctaattgtgtttatttggctctcctctcttttcttctttattagtctagctagtggcttgtctattaatttttycaaaaacccaactcctggattctgatttkttgttgttgttgttgttgttttaatttaatttaattaatttttttttttttttgagatggagtcactgtgttgtccaggctggagtgcagtggcacgatctcggttctctgcarcctccacctcccaggttcaagcaattctcctgcctcagcctcccaagtagctgggactaggcagtcacgtgccgtgacacccagctaatttttgtatttttagtagagacagtgtttcactatgttggccaggctggtcttgaactcctgacctcaggtgatctgcccacctcggcctcccaaagtgctgggattacaggcgtsagccatcatatcatgcccagcctcattgatcttttggaaggttttttgtgtctcagttttcttcagctcagctctaatttttgttatttctcatcttattctagcttttgggttgtaaatcagaattttcattagaggttgcaaaatgacgtttttctgttctacattattagctagtattcttccataatgtagagcttctcatcaactgggctgcttagtgcatttctactgaagaggcaggaatgtacttgatccttccttttactaagtttcaaagtgaagagctgtttaaaattgcagtttcaagtggtaacaaatgagttttttcagtctttttttaaatagcattgtggatctatggattttttattcagtgttttaatcttttacaatccctacttttgattttcaaattgccgtgactttgacgagttgtgggcaaatttttactataaaaatctgaagcacatgagatttctgaactagagatagaaatttaagagttgtcaatgcataagtagtggctcaagtcacaggagtaaatgaaactgccaaaggaggatatagggtggaaaactaagcagcgcaggttagcaacttccagcatttataggaagaatccttacatatggatttatgagttgttttattgaatttttttctccagtgtttcacaaattgttttatgaaatgaccagaaattaccaattatcctgattgcttttttcccgaacctgttaatatttgcttctttctattttgatttattgtttttgaacttgaattctatccagcccctcaagaatgttaacttatctttatgttgaatatgcacagttgcagtaaaaattattcttttttttttttttttttttgagacagagtttcactcttgttgcccaggctggagtacaatggtgcaatctcggctcactgcaacctctgcctcccgggttcaagcagttctcctgcctcagcctcccgagtagctgggattacaggcacacaccaccacgcccagctaattttttgtgtttttagtagagacagagtgttgccatgttggccaggctagtcttgaactcctgacctcacatgatccacctgcctcggcctcccaaactgctggkattacaggcatgagccaccgcgcctgccctaaaaattattcttttaggataagaaatgaaaaaaaatttaacattttagtattaattaagaaattccttgggaggccgaggtgggcggatcatgaggtcaggagatcgagaccatcctagctaacacggtgaaaccccgtctctactaaaaatacaaaaaattagctgggcatggtggcatgcgcctgtagtcccagctacttgggaggctgaggcaggagaatcacttgaacccaggaagtgggggttgcagtgagccgagatcacaccactgcactccagcctaggtgacagagtgagactctgtctcaaaaaaraaaaaaaaaaagcaattcctagaaagctagatcaaaaccacccatgctggtagcacatacatagtaagtataggaggtaaaaaaaatacgttatattcgggactattactgacttgtttttttgctcaaaaaatgttccttttataaactaaaacctttattggtaatataaaattttttgtcactgatataagatgctaatatttatccattttctgttggacatcttttaacagacgttttctacatataaaaagtatatcatattactaacatagcaatgttaggtaaaaatgtcatttgaatttgaatttttatggtattttagtaaataggattgatggtaaatattgaatgatatgatgacagtggtggcaataaaacccagtaccttcattgcaccagactggaaacctaggttcagtttccagtgaacttgccagtttttaaaaagcatcactaatatctcttcatatctcaaagaaggaatatratattgtttgatgataataaaactatatatttttatatctcttaaaaattatatatttatttgatcaacctgatatttgggaatttaataccatgtgccttggaaatttttagtactccattggaataatgaaataacaaagtacttttagtaacaaatttcatccacatatcataaataaccrcaggctattttgactccttatagtcactgttggaggcccatgatattgtggcatcaaagtgttatgattcacctccatcaagcccagaaatgaataattcttctatcaataatcagttattaccagtagatgccattcgtattcttggtattcacaaaagagctggggaaccactggtgagtayagataaatcagtaccctattaaatctgaaatatgacataatttgtggttcagtcactactctgtttcattttttttccttttcataatgttatgaaaactgtattcttgtttggcctgtgtataaagacacagctgatgctttctcaacttggtttagcctgcaaaatttaactaaaatgaaaagttaaactgagctagaagtagaaatatggcaaggggtagcaaaaaatttcagaagatgactattatgtttcttcctaccctttgaagacatgaactaccctttgaagaaatactgacagtatcaaaatataaaaagaagttgttattaaaaattgaagccatactaggactctctaagtagtgaagtttactattccttggtaaaattattacttctggatcctgactataagaacagtgagtgcaaaaaaggaaaagccaggaataagtccatcagaatgcacaaataccttttcctgctctctcgagtttccatttagcctgtaagatacatcctatccactagtgtaataaactatactagtacacagtttaatgggagtgaaatattgagacaggagagaacatgggaaaagtaagaatgattcattttacctagttttagaattattttcttacatatgctcatgaatatttaagcatttctccctaataattaatgagaaatctgtttcttatttttcatagggtgtgacatttagggttgaaaataatgatctggtaattgcccgaatcctccatgggggaatgatagatcgacaaggtctacttcatgtgggagatataattaaagaagtcaatggccatgaggttggaaataatccaaaggaattacaagaattactgaaaaatattagtggragtgtcaccctaaaaatcttaccaagttatagagataccattactcctcaacaggttagtaataaaatttttggtagtattaaaaatactttcatgtttttaatcacagtgttggaaataactatcagttgctactattttgctaaagaaaagagaaaaaattgatttgagtgttctgaaatggcttattttgtcatgggtgaatttttgaatttttaaacaatgctattttactattgtaaaggaaatagtagatttcttcattaacaccaggaaccctggcataatagtaacctacagctaggtatcagaagaaccataaagtctttgaattactaatctagtaaacatttctgacagctgttatgttcaggcattgtattaggccctgggagaggataaaaatgcagtccagatcacctccagcttagtgtttgtgtcatgggtgaaatgactgatgaggccagaaaagaggatgggtataaagaaaatcttggacccctggtttgcacacatttgatctgtattttaaaactaattttaggtaaactaggtaattgaacgggaaaatgttttagttatagagattgtctagactcggtatgttaagtgaattcaaaaagaagagagatgagattatgtaaccaggtggcagatttttgaaggtgtgaggtgatttgtgaacaacagctctaatgaatggttaagatgaccacttaggttcaaataccagtgctgccagttatcagcttaccttctctgtgcttcatttttctcatctatatagttagggataaaatttgttttctcaaaagattgttatgaggattaaacgagttaattcatgtaatgctctcacagcaacacctggcacatartgagtgctcaagaagtggctgcacttgctgtggtgatgacgcagtagtggtgaaatggaaccgtaaagaaagaaaaagaaattgcggaggaagaattgaaaattatgataggagtgttggaaccaaagagagggttttcaagcctaagtaatgtagaagtagatgcctctaatgctyaggtttattccagaaatttattgtttgatgtatgaatgaaattataagttttcttacataagatactgccagtgtatcttatttcatattgttaaaatgagagtttaaaagtctagttcttacatttccatacagttatttgaaataacatttcattgaatgtctattttaaactgttctttcaaaggtaaggatagattatttagtcattaatattagcatgtaaattgaacttatgaaaatagataggcttgtaattaactttggttgaaatgaaggtagttttgtggtcctcaaggaaaagaattgtgaaaaataaatgatattagtacttagacatttcatatcactagtacctctcaggctacctttattcctcagttggcaactttcaatttgtgacagcctgaggccttatcttggacctgcgtacgctggaagagtaaaatctaggatttacgtattttatttattattatgtgttagttgtagtaggaagatcttattttccttctgtggtctaaactccagaattcttctagctcaccatggctataagagacttttacaggcaaaataaaattttataatattaataactrgggctttggcccaaattcctacatagattttgcatctggtgaactaactgaataccatgaaatgcaaggacatttagccttgtttaaacataagttttccacattccataccctctcaaactctgcttttcacttagcatttagagctggggaaatgaattcaagtaggagaggaggagtcttataagtccgaggtagcctgaggcgtgtcctcccataaagaagtaaagaaactataacatgaaggcttccaaaagaacatccaaattgagactttttttttttwaaatgaaaaggggaacattactcatatgctggaataataggcataaaccagggcatctgcaaaccatgggcatcctactgagatgctatagggaagcaagggcattttgcstcttcaactctttcactaaaatctccaccatgtaktgctgtggagctagtctcagctctggattgctgcaagagcaaatgaaagccaagaactcttccctaccacggtaatgtttttcaaaagcatagtcagtagatgatctttatcagaatcgtttcaggtgcytggtaaaagtccagaatctgctatgggacataagtatctatgttttaaattttgasggccagagtgagttagaagtagccaattctgaagttcttcaactttcttatagcttagatttccgggggctattcgtaattccatttgtttattaaggccaactgataggaattctctcttattctttggaaccaacatgacctggacaactagaaacaatataagaaaatatattacaggactgtttcattcaaggatatacattaaaaattctcaacaaaatattagcaaatcagatttgattgtgtatataacaaagatgatacaacatatccaagttagatttattatcccaggtatgctaggagagtttcatattagaaaatccatatgtatgtaactaagcacattaccagatgaaaagagaataacctcaatggagaatttgataaaattcaatgatttttaaaaaatgattagtaaattaggaacagaagggaaaagccttaattttattacaaaaaaaaaaatagaacaaacattattctgaattaactaatgttagaagctttccctttaaagtcagaaactggccttgcagctggtctgcctgagacctctagtgccaaccccaataccccacgaagtttaatttccactcacgaaattccactttcgttttcattataaaatgaaaaagccctcacaaaccatgaaaaacttgccagatttcaagcacaattgtgcactggtaaaaaggaactgccctcagatgatacagcaaacattatctgttaaaacagatgataaaaaaaatcttcagttttcctgaaagaaagtagaaataggcaatatctctgatactaaagaggtatgtctgcaaaccaaggaatggtgatcttcattaacaatcccagtgttcagacatctctagcagcgaacactttgaccattaccagacatgctgagacaaagcagctaacagaaatgccacccagtgtcttaaaccagcttggtgtcaacaagcttaaggaaactggcagaagctggatggaaaagtaccacttactattggggaagtggtgatcttgttcagaattttgatgaagcttccaacagtgaggcaaactgaattgattcagcttctaaaaaataatacaatttcaagaattttaactgcttttaaaatttttgttttatatatgataaaatgtaagtctataaattccaagacccttggacactgctttttaattattgattatatacagttatttattggcaattaattagccagaaaatagtttaaaacaaagataaagcctttgcctagttaaaaaaaaaaaaagaaactagagaaggatgctcactagcaccacttatatttaatattttcttgaaggatccataagtmcagtatgacaaaaataaattatacaagcaaaatgtttggaaaggaggcaataaaacttatttacaaatatgatcatgtttttgcatagaaacccctcaaaactacaacttattagaaataatagagtttaccaaggtacctgaaaataagatgaagacacaaaactcaattgcatttctgtatgtcatcagcaaacgtctagaaatgtaactatgacatcatttatagtagagtcagagaatgtcacatttatgtctaggaataaattaaccaaaaaaattcaagacctctacacaaaggaattatgaagaggatctaaataagcaggtatatcatgtcatggacaggaagacaatattgtgaagatgttgatttttcactcattaacttgtagatttaatggaattccagtcaaaacagggttttccatggaatttgataagatgaatagccaagacacttttgaatcagaaaagcaggaatggggtctgattattaatatgtaggaattaagatattgtgatgttggcataggaagagacagcatgatcaatggacttttagagagctcagaaagagacctacacatacatattactttgatatgtgacagagataatgtttttcaatgtggaaaggagatgatgcaatgaatggggggaacctggttattctagggatactgtttgaaattgtgtttcactctacacagaaaaatcaagtaaaaggggacatgtgttcagtaaacatataaagatatattgaaaatcataatgtgatataccattaagttggtaaaaattatagctgtgaatcaacagcatcttttctacattgctggtggcagtgtgtattggtataaacacattggggagaaaagtttaatgtctcttagagttaaatattcacatatatcaagctgcagtaattccctagagcaattcttacgtatgtacagctggaaacatgttaataagcatataaaccccaaaagattacatgcatatagcatgatactatttttttacgtttaaaataactatataaagagtacgtatagatgcagtagaactataatcaaaatgtaaagcaaggagtttgtgaacccaggattcagggtgaagtgtgccttggttggggaaaccgaatgatgggatgggatggaatgagggcaggagaatcaagtaggattttaatgttagttttaggtggcaagtgcatagctgtctattatattattaaaactaattgaatcgacaaaagcagtccttgcacgaaccagtgatataaacttaagaattatgattagtataattttggcctaggttagtagttagtagattttttttttttttttttttttttgagatagagtctagctctgtcacccaggttggagtgcagtggcgtgatcttggctcactgcagcagcgtgatcttggctcactgcagcctccaccgcccgggttcaagtaattttcctgcctcagccttccaagaagctgggactacaggtgtgtgccaccatgcctggctaatttttatatgatttttaaaataaaattttttatttggctgaggcttcaatttgtggccctcaggtatttatcagaaaggaacgtggattgcccttcaaaacttttttaaccaaacataccttcttgttatcttgctgttatcaaaaatgtgtgtgtacatctgtatttaacgaagtagaccaagttcgtacactgaaaatttttagaaaaagagcatccttccttgatcatctcagctagtgtcatggaaaatctcttagcaatgataatcactttgttcaccatcttgtcactcactctgaaatgcagattcagatgggcctggaactatggtttaagaagtaggttcaataagcaacatttgcaccatgtttagccaacacattcccaaatgaattactagccaccttctgatttaacatcagggtcaaggtggagctgtttttctagccgtttcatccatttaatttttctcccactaattattgtcatttgcataagcatagtgtattcctgtgcaatatttcctcaatacttttactgtttttatctttacttttaaaaatatccttgagataaagtttatataaataacataaagtgtacaatttgatacatgtggacatacataatatacccatgaagtcaacacaattgagatgatgaacactcccagaaatttatttgtgtccatttctttctctttttttttgagacagggcctcactccgtcacccaggctggagtgcagtgacatgatcacagctcactgcagcctcagcctcccagggctcagataatccttctacctcagccttctgagtagctgggaccacaggcatgcaccaccacacccggctaatatttgtattttttctttttttttgtagagacagggtttcgctacattgtctaggctgtcttgaactcctgtgctcaagcgatctgcctgcctcagcctgctaaagtgctaggattaccggcataagccattgctcccggcctcccagcttctttgtgtccacttctcattcttccctcctactccctttctctctaccacccctgactccaggcagctactgctctgctttttgtcactttaaattattttgcattttccttatttttatataaatggaatacctgtattcttttttggattttgtttgattcgtttgtttagcttccctcactcagcatagttgtttggagattcattcatgttatgtatattgatagttcatttctttttattgacaagtgatattccattgcatggctgtaccacagtttgtttatccattacctggctgatgaacatttttttgttaccagtatggggcttttacaaataaagctgctatggacatttacatgtaagtctcttgagtatataccaggggttgaaggattgagtcatatggtaggtatatgttgtacttttgaagaaatgactaaaccgttttcaaaagttagtataacaacttaaatttccaccaacattatatgaaagttccaattactctacattttgggcaacatgtggtatggtcagtctttaaaattttagccattctaatagtgtgtagtggtatctcactgtgattttaatttgcattttcctaataactaataatattgaacatgtttttatgtgtttatttgccatacttctgtgcactttggcgaagtgtcttcaaatattttgtccattttttgttgaattgtttttcttagttttgagtattctttatgtattcattatacaagtgcttcatcagaattgggatttgccaggactttcttccagtctctatcttgtcttttcattctcttaacaatgtcattcaaagagcagaagttctgaattttgatgaaatccaatttatgattttttttctttgagtcatccttttgtggctttaagaagtccttgtataacctaaggtcatgaagattttctccaatttgttttctacaagttttacagttctatctatgctgtacctctgagtctatgatacgtgtactgtatgttaatttttatataggatgtgaggaaaggatcagagtttatattttgcatatgaatattcaatttttccagctcagtttgttgaaaagactatttctttcatcaaatttagaaaaactttgacaataatttcttcagacatttttttctatttttctgtttctcctgtcctttggtgactgtagttacatgtatattaggcccattgaagttgkcccatgggtcactgattagttcatttatttcagccttttttctstgtatttttcatgttggatgttttctattgttttgttttcaagtttactaatcttttcttttgcaatgtctaatctgctattaatcacacctagtgggtatttttcatctcagatattttggctttcatttctagaagttcagattgggtcttttttatatctgcatgtgtttaatagacttaatccttcctatagtttcttgaaccatgaatataatatgtaaagttgaaacaattactgtaatgtccttttctactaattctagcacatttgacatttctgggtcattcttcattgatttttctccttgttataggttatttcctccctctttgcgtgcttggccattttgattggctgccaggcatcaaaaattttaccttgttgggtgctggatatttttgtattagaaatattctttttttttcttccaacttttttttttttttgagacagagtctcgctctgttgccaggctggagtgcagtggcacgatctcggctcactgcaacccccacctcctgggttcaagtgattctcctgcctgagcctcccaagtagctgggactacaggcacgtgccaccaggccaagctaatttttttttttttagtagagacagggtttcatcacgttggccaggatggtctcgatctcttgatctcgtgatccatctgcgtcagcctcccaaagtgctgggattgcaggtgtgagccactgcacccggcccttccaacttctaggttcaaggggtatgtgtacaggtctgttacatggataaattgcatgtttctggagtgtagtgcacaaatgattttgtcacccaggtagtgagcatgatacctgataggtagtttttcagtcctcaccctcctcttatcctctgccttcaagtaagccccagggtctgttgttcccctctttgtgtcgatatgtactcaatgtttagcacccacttacaagtgagaacatgcaataatctggttttctgttcctgcattaattggcttaagataatggcctccagctatgtccatgttgcttaaaggacattttattctttttatggctgcatagtattccatgatgtatatgtaccaaattttctttatccagtccaccattattgggcgcctaggttgatttcatatctttgctgttgtgaaaagtgctatgatgaacatatgtgtacatgtgtctttatggtagaatgatatatattcctttgggtatgtacccagtaatgggattgctgggtcaaatgatagttccgttttaagttctttgagaaatctccaaagtgctttccacagtggctgaactaatttacatgtccactagcggttcccttttctctgcaactttgccaacatctgttattttttgacattttagtaataaccattcttaacctttgttctaggatacagatgattcttttaaatcttgctttttaaggtttattaggtatgattgcaggatgtagtttagctcataacccttctaagtattgtaccccacctcctgtgaattacgaaggtttttccacttggcctggtgagaacagaaactattcttgaccgtrtacaacttctatatatagttccctgtaatgctttcaaatgattctttaccatcattgaggaaagagctacacagagagaggatgcaggtagcttcctcatacacatgcattgattaagtactcagttgaaaacagagggagtccctcacaattctctctctgtgcagcctttcctcactgatactgtattccatgcactgtaaccaccttgatctcccaggtctcccagttcatctcctcaacttagagaccatcaggcttcacctttctcccytcctgatttgcagcctggaaaccctctctgcagttagctggggcaattgtgcagctcatcttgtttcttccatcttttaggatcactatcttcattgcctgatctcggacatcttgaaagacattgtttcacatattttgtcaacatagtttttagttgtttcatgttggagggtccttgttacttcatctgaatccaaatgggagtgatttatctttattaccttaaaattttaatttttatataggtgaatcattcccatggtttgaaaatcaaaaaatgtaaatatgtattcagttgagatctccctctgaatccttcccactaccaacctagtcctcatccccccaccagtaacaaactttgctattaatttatctttccagaatttcttcattcatatgcaagtaaataaaaattacatatcctttttcacctttcacctcctttttcatagaaaggttgcatagtacacatgctattctgaaccttattttttttcacttaaccatctgtcttgaggatatttccttattggtgcatacacttcctattgacaaacacacacacacacacacttttttaacgactatatatagtgccacatcatgtagacctaccatcatttgtttcaccagttcctttttgttaaacaattaggttgcttccaatcttttgttattaggaatgatgtagtcttgtgcataagtcattttggatgtatctgcataacatagctgttgaatacattcccagacatggattactaggtcagagggtttatgcgtttgtaatcktgacagctattgccaaattgtcctcccaagaggttgaaccattcttccacaagcctattaggaaaatgcctattaacccacagttcttttgtagaatgttataaaatacaaggatttctgctaatctgataggaaaaaatgttataaagtagttttaatttgtatttctactctgagtgaggttgttgaacatctcctatgcttaaaagccatttgtacttccttttctttgtactttaaatcattttggtcattcagttctttttagtaataagaatatgaaatagaaatattttagtaggtggtgtttagttaatgatgaatgaacagttaacatccatagcctataagtgcaacactttaaattgcatttaataaaatataattatactaaatctagtcatatctttaatggttttagagtcattacaaaatrgttagatcaaaggttgggttgatttttcagacaaattttcaaagttcaaagtaaaatcaggttaatctgagtttttgaccataacagtaatgttctaaaactactttaattaatgaaaaaaaaaaaataaattgttctataaatcttttacctttgagagatgtggtttgtattccacagataatggcatttccataacaatttgacagatgttggaggaatgaatatttgaaatttggactatcttgtaaagtctgagctttatggttacaaaatatattctgttccacacataagaatggtaatcacattcatggttagatgacaggattctcttgctattcttcaatcactgcatctttcttgagaagtaaggagtatgcaggtatttttataactttgcataccaatcctttttctctgcctgatctcaaatacctttaactttttgttctatcatttataacttgcaggtattatactttgtggacaattaattagggaggtagttgccttaccaaatgagtgaagtaataaaatggtctagtagtttgtttatattttcttaatttattataaattaaaagtctggctttatttatgcaattacaaatatatttttagagtttcatcaatatggagaggcatccagcacacatcccatcaggtatgctgtcattccagaacattctctggtacttcatttttctgtcttatccgccaactaaatttcctttggttaaatttaattattttggttttttcccgttgtcaaaacatggagctgcatgacattatcaagttagccaattgtcacactttagcaatcttaatgtttgtatgcttgctttttagatctaaaattatatatcaggaaaaaaattattgacctactgatttaaggattaatatttagcttttctagagtagttgaaaatgttctgaatgctttctatgaaaatcatctaattataaataactaagattttattacatgttcccagatttcgttattttaaaattattttgtatgcatcgatcacaatacttttaccacactaataatataatatgtctacttgtgttatttgaattttgttggttacagaagtatgataaacaaatagaaaaagaacattgttattttgactaattgtgtrctttcttattaaagtttacatgctgattaatgctaaggcaattctttagaagataacatttgaatttctataaatatatataaaacaagtctgttttaagaaagcagttgggctgggcgcagtggcttatgcctgtaatccccataccttgggaggctgaggtgggcagatgacttgagatcaggagttcgagaccagcctggccaacatggtgaaacctggtctctactaaaaatacaaaaattagccaggtgtggtggcacacgcctgtaatttcagctatttgggaggctgaggcaggagaatcacttgaacctgggaggcggaggttgcggtgagcagagatcacgccactgcactccagcctgggtgaaagagtgagactccatctgaaaaaaaaaaaaagaaagaaagaaagacagcaattggtctgaaccttccatcaaataccaaaaatgcataatttaattagaatttaaattaaagcaaataagcaaaatagtccaaatttcggagatcataactaacagtgttaactgacatacttttattaataatgcaaatgtaaaagaaatgtgtatacacaaatgaatttaaaatggaaaatagtttcgagacttcttcagtatttgtcttacaatgaatttaatgttgatcatttaaatttaagatgagcatataaatcagagcaagatgattaaaaaagtatttaaggctaccaaatatatttcatatctgacttcaacatcaacttttattgtttaattttggtttcagggccttttcacagagttctaatacatctgaaatatataccttaaatcaactacctatattatatttcaggatgttaattggatcatagcatttacttgcattaaaaattatgcagtgttggttggaaaatcaagtgaaaagattgaagaaaagtggaagaatggtgggatagaatgattatcaaactcttgttgatttaaagttagatattaaagtagagaagaagttttattatctttctgataccaaaatctgttaatattctaataacttgatttccatttatgagagacaagttcattatctgaagtactaaatacattgtcagttacaattaaatcagagtggtttgacaaggattttttaaattcagtggcaagtgatacaactatagtrtttttaattgtgctatgtgttttaggtatttgtgaagtgtcattttgattataatccatacaatgacaacctaataccttgcaaagaagcaggattgaagttttccaaaggagarattcttcagattgtaaatagagaagatccaaattggtggcaggttagtatgcttctcagaagttcctcagctacttttctaattttaatcttagatctgatcaatatctgaatagtcaggaagaatattagcatttgttacaatgatttttcccacatgaacagctcctgcttcgtggctactaattttgtggacataagatcaaattgggagggaatttgcaacttaataagtgcrgaattaaccassctgtggcactaacccattggtttagggattagaccaattggtttttttcacatgggtaattgcattaaaatatgctattggccaagaagaactcacttgggtcatcccttttcaaaagataacttgggttttgtttattttaagtaggagacttttactgtgaaataagtgtgtctcttgtctcctctccctcatgttcgttcatagcaagtaaagcatcatttcttaaggtcttaatgtctatttgctcccctcttctcagatattgggaaatggaggttcactctatcagtkttgtttggttttggattaaaatctgtgtatatggaaagagatgtgtattatcactgtatttttccctccttttttcagaagatctgtttaatggtattcttttttcttctcctaatgcagctttcagaaacccctagcagcagtaataagtctgtttttgtaatggtttatgttagctaacaaccacaatattcagaactggaaaaactgacaggtcaggaagtctgaaatgccttaaactatcaaagcaaatgagagttttactaaagaacaaggagtaagaggaaaggatccaggacttagcaccaaattctaaaattaactgagatgttggtaactcacattagctctaaattatagatctacttctaaggagaaacaaatcacagaatgagaacaatcttacttatgtgtccttaaatttaacttaaaacattatgtataagtgcactatgtgttgagacagctaagaaatgggtaaattaaacagaatccatgatttcaagaggtttcccctgaactttttttagatccctcatttaaaaaatctctctgtggctgtttcctttattgaattattccagttttccattttttttctttttcctatgaatacgatctcttagttttctcttctaacctgtcaccattctctcagtttctccctgcattttgatagttggttactttaattctgtttttcaggattttaagtgcttaaagttatactagattttctatgctagttgtaaggatagaaatactaactttgtgagataaaccactaacagccagttctccagccactattttaaaatatttctctttggagcttattttaagttagctgttttacattaggtgaagtttcgcctagtttaaacttacaaactcttgggatattcagactcctggtggcataaattaaaatctacactttatattccacatagtatctccttttcatttggtttggcctgaaataccaacatagtaggattaaggttgacagtaaatatcttactaaagggtgctagataaaatgtcctgttaatacatcttatttagaatagcattttccttttctaacttagtatcataaataagaagttttagcaatttaatttgtattttggtccccacatttcactaccagatgacagatatgaagaattttaggtgccaattgattcttcagtgctgaattgtttaaatatcttaactgacaatgctatggatttaaatctcaaggttgtttttaagagcaaatgtgacttttttgactgaccactgcttgtcttacttaatagaatatggtctcaaattttggtcactgagatgtacaattcattaatttgattctaggctagccatgtaaaagagggaggaagcgctggtctcattccaagccagttcctggaagagaagagaaargcatttgttagaagagactgggacaattcaggtgatgagctcgacacaataagtaacaagcagtcctttgtgaccacctttctttgtctcttttgtctaaataagcaaatgcatttatttaaaatatgtctagaatgaatccctccctctgctttctctcgctcataagtaatcttttttgatcccgttctgccacctgctggtagagtatcaaaattcagtggcttaactcacctccaccctcttttgcttcctaggatgccacwttggggagataattctcccacccctgtaaaatactatagggcaattttttcatattctgatatactgcttaagttatatttgttttatcatccttcaggacctttttgtggaactataagtagcaaaaaaaagaaaaagatgatgtatctcacaaccagaaatgcaggtaggttttaaatactttttgagaagtccaagtgaagtagctatatgtcatttagtgtggcataaactctgaatatacagctktaagtgagtgtaattcagattagtacctagttgcaaggggctgacatatgaacacatggtgcaatataatataaattatttaaaacccacattatatatactaccatgtgctttattttgtgagtatagtttacaacacaaaacaaattggttaagatttttgtttgtcttaatcaagaagcagtatcataattgaaactatttgtccagagaattttgaaatagtaatttatgtgccatttctaaaggatagaatgcctttgtcaagatgttaaaagagttatgtttagggcaactgtatcctgccataacactgaccatgatagttttagaaaaatagcactggaccaaataaatcttagtctgatctaatagaattctgtcttaaatcttttagtcatacagaaagaaatatatttaaaaagaaagaaatggtaactatatgaggtgatggatatgtttaatagcttgatcgaggtaatcattcacattgtacacattcatgaaaacatcaagttgtacactttatatacaattcctgtttgtcagttgtacctcagtaaagctgaaaagatttttaaaaacaatgtaaaataagaccccagacctggattggctactcattggctattaaaaataaataaataggaaagaagggaaagaatggaaactactatatttattcttcccagttgcagaggatgacagaaataaaaaacagctctatgaatcagaaatttctggaggcttaatcaaaggagttggcaattttaaaagtactttcttgacttcagagctacctctatgctggtaataaactaaatagcacaccataaaagaaaataatatagaaggaagaagtaggcttgctttctcttaatattggtttaatctactgtggggaaattgtgcaaagaaagagttactattaggataataagctaaggaaggagtgttattactacagattgagagttacagtaataacaggtaatataatatttcaaatcatcactttggccctattattcataaaatatatgcccataaggcttttttgcaaaatagaaaatttgtaattttcccatcgactaagattataattttgggttatgtttctagtgaaacagttggatctaaaatttattttatatgtaaatttcaaaatcttaatatttaaatgtatgttgtcagtaaatgtcagtatgttgaattctaatcaaactgataattgttgatttgccatacaatatttattcatttatataattggaaggtcacttgttctgtggaacttacttaagcaaccacgctaggtttactcctgtcctccgtatttgctacatgctttctatatatactggtttgtaatttgattatttatattaaaggatttttactggcaaattgataataagtttcagtggatagaatctctgataagtaaggataaaacatagaatttttctagcttgattagataaattttttttttttttttttttttttttgagacggagtcttgctctgtcaccaggctggagtgcagtggcgcaatctcgtcttactgcagtctctgcttcctgggttcaagtgattcccctgcctcagccccctgagtagctgggactacaggcgcacaccaccacgcctagctaattttttgtatttttttagtagagacgaggtttcaccatgttggccaggatggtctcaatctcttgacctcgtgattcgcccacctcggcctgcgaaagtgctgggattacaggcatgagccaccatgcccagcccgattagacaaatttttaagggcaaatggatggaaccagatgtttaaagcaagatataaaataatttactggggcaggcacagtggctcatgcctataatcccagcactttgggagactgaggcagcaggatcatttgaggccagcagtttgagaccagcctgggcaacatagcaagatcccatctctacaaaaaaaaaaattaaaaattagctgggtataatggctcatacctgtggtttcatttactcgggaggcttcattgagcccaggagttcaagggtacagtgagctaagattgcaccactatactctaccctgggtgacagtgagccccggtcttaaaaacaataataaaataattattatttattgtactttaccaaatttgtaaaaacaaatctatgctaagtgggtacaagtcaagtgatatttaactatcaagacagctaagccattactagacagaattgcagagatttctttcatgtatataaaagttgactttgtattcccatttcctttttcatttagaatttgatcgtcatgaaatccagatatatgaggaggtagccaaaatgcctcccttccagagaaaaacattagtattgataggagctcaaggtgtaggccgaagaagcttgaaaaacaggttcatagtattgaatcccactagatttggaactacggtgccatgtaagttttctgtgttttccttgctatgcaattggcaggaaagagtatgggcatatggaggaaagggggattattatcattagttattgttattcccaaataagttttctttatggcagtgaaagtgaacaagtaaaagacattgaaaaatttagtaattctntagctgtcttgaaatagtgctgcagtgctgttggcttgctgtctggtggcaagtgcttctctaaactattcagttcagaaatgttagaattaaatgcctacatttaagactcgtggcaagataggcatttaggattttcttgtactgatgtctatctaaaaagttggatttttcagccattttagtgtaaagaaaaggggaaagcttctgacccttggacatacccagtgtggcaacagctgtgtgaacttacgtggcctggcttgtagctctcagtcatgcaaggtcataaacctgatttttgatagcacataagagtgattcatcttttactgcaggcagcattcattaaggttacagagtctgatgtatagaataaaatagtactgatgagaagtataaccattaagtgaaccaagcactcattttatggtctttgcattcatttctctatttgcatatttacatagaaagttaaataatcatgtcagaagtatgcttgatgagaatggaattagatcaaggaattggatgatgttagtgatttactgtaatgactaatacacatttgtctctgactgtagggactaataaacatttgtctttgtttttgaaatacgtgratctttacttgtgaacttagatgttctctcccttgaagaaagcaggagataagctaacattgctttcattcccattgctgtgcttctatttctgaccaagcccccttttaacatggcattcctttaggtatattaatgcctttaagctattttgagtcaaatcctaggctaactttaacccyatctcttttaattgaattttagagtttccctggttttgtccagtatattttgggtttaattctcagtgagtactcttattgctaaaattcttaaaagttagggaaatagccttgtcattgcccccctgtgctacttataatcccttcagtgtaaatcttctgattctactgcaggcattgtaaatcactaaatttagacaaatcctactaaagtggttaacagaacaaaaacttcactgtaatcaacgtatgttaaagctgcacttgtgaagtaaaaagtttttcgcttttatcaaattcatatgtgcccaatatttttagcaagtagttcttaaagacatataatggggaaaaaaataaccccttctcttccyctgcctcacttatgaaaaacagtcacttttcattgtttttgctatttcttttggttgtgttccatatttcttaataatgtctttagtctgctgtttcctgctttatgcagtttaggccttatctgttgacttcctgactgtccttccaatataaagatagctgtattttcagttagttcaatttcactttcttgaacagccctttccccttctgtgacccaggaatctctggagttctgtttttctttatactacctgattttatatatatatgtgtatacagttttttsttgttttttaaactaaagacttgtttatccagtaagtcaggttctttttttttttcctggagacctctgtctcagaaccctctgtctttctgcttcaatgaggactacatgctgtctctctggctgcccagctgttaacactggagtagttccctttgttgttatcctgggttgaagctgttgttcctggatcccattctttctctttcttggtttatcaccttgttttgctggggtacatcctcttgtatgtggaatgtaatgtctgcatctttgtgttttaaaatgtatattttctgccctttatttgactaattagcagagaatagaattctggattgtaaaattcaaaagctgttacaacgtcttcatcatcgccaaaagaatctctgtacccatttcccaccaacttcctcaccccctgctgccaggagcaatcatgaatctttctgtcaaaatagatttgcttattttggacattttatatactggagttatacaatatgtggtgttttgtgactggcttcttaacatgtcagatctcatctgcattgtagcatttatcagtacttattttcttttccttgctaagtgattattatatggctataccacattttatttatatattcatcagttgatggacatttggactgttttatttttagctattgtgaataatgctacactcagcatttgtatacaggtatttgtgtggacatatgcctgtttctcttgggtatataccttggaatggaatttgtaggttatatgatgactgtatgtttagcctttagaagaacttccacactgttttccacagcagctgtgtatatacccttcacaatcccagcagcatatgaagtttccagtttctctacatcctcaccaacatttgtcatctggctttttgattgtagtcatcctagtgggtgtaaagttgtatctcattttggttctcatttgcatttccctaatgtctgatcatgtcaaacaacttttcatgtacatatttgccatttatatattttctttggaggaatgtctgttcaaactggttgcccatttttcagttaggttatttgtccttttcttaagctgtaagaggaggtcatattatattctgggtacaggttccttgttagatatgatttgcacgtattaatattttctctcattctttgttgacttctcgtgtttttgatggtgtcctttgatatacaaaagtttttcattttgatgaagtccaaatttatatgtcttttgttgctcatgcttttcatatcgtatcaagtatggtaccatatcaaggctttccctaacccaaggccacaaaattttactcctgtattttattttaagagtttatactactgactcttacatgcagattatatgatcaattttgtgttcatttttgtgtcaaatgtgaggagggggttccaactttattcttttgcttgcacttatccagttgtcacaacacaatttgtcaaaaagaatagttctttcctccagtggattgtcttgccaccctttttgaaaatcaattgattgtaaatgtcaagatttatttataaaccctcagttctgttccattaacctagatgtctgtccttatgccagtcccacattgtctcgattactgtatatttgtattaagtttcaaaaccaggaattgtgaacccaacttgttctttctttttcagcttgttttggctcttctgggttcctgacatttctatataaattataagataagcttccagtttctgcagaaaaggtagctagaattttaagagggattatattgaattctagctaccttttctgcagcaattggaagcttatcttataatttatatagaaatgccagtaacttggccttgaggactactgccatctgttttgttttgttttgttttgttttgttttgttttgttttgttttgttgagatggagtcttgctctgttgcccaggctggagtgcaatggcatgatctcggctcactgcagcctccacctcctggattcaagccattctcctgcctcagcctccccagtagctgggattacaggcacycaccatcctgcctggctaattttttttgtatttttagtagagacttgctttcaccatgttggccaggctggtttcgaactcctgacctcaggtgatctgcctgccttagcctcccaaagtgctgggattacaggtgctatattaacagtattaattcttccagtctatgagcatagaygtctctctgtttatttaggttttcattttaatgctgtttatggttttcattgtacaaatattatgctgcttttgtcacatttattcctgagtatttttttcttttttattctgtagcaaaaagtattttcttaatttcctttttggattgttccttgctagtgtacagaaataaactgatttttgtgtgttggctttgtcttttagccttattgacctcattgattctaatgatgatttttttgtgtgggttcctcaggattttctatatacaaaatcatgtcatctgcaaatagagatcgttttacttgtttctttccaatctgggtgctgtttatgtcgttgtcttgtctactttcctcaactagaacctgcagtgtaatgtgtaatagtgtaatagaagtggcaaaagtgaacatccttgtcttgttcatgatcttaaggagaaaggagaaagcattcaatctttccattttagctgtgggtttttcatagatgcctttcatcagattggagaagttcccttctgttcctgctttgttggctttttaccaagaaagggtactagatcttgccaaatgctttttctttgttaatggttcatatgatttttgttttttattgtcttctattgataggatgtattgcattcattgatttttatatattgaaccaaccttgtctttttgtggtaaattccatttggttatgatgtgccgtctttttttgtatacttctagattcagttgcttgtaatttgtaaggatttttgcatctatatttataagggatattggtctatacatctcattacttgtgatgtcattgtctagctttgatatggtaattcagggcacatagaatgagttgtgaagtattctttcctctttcattgtttgggaagagtatgtgaaggattaattataattctttcaatgtttgatgaaattcacccatgaagccatttgaccctgggcttttctttgtgggaagttttgattattagttcagtctctttccttgttataggtcaacttggattttttttaaaatcagtttcaggatttctgcagggttcatagtaatgttttttctttcatttctgattttagaaatttcagtcttccctcttttattcttagtctatgtaaagatttgtcaatttgttgatcttttcggacaaccaaattttgcctttgctgattttctgtattttttctactttctaatttttgctataatctttattattttctttctacttgtactttgggtttattttactctctgtttttttagataggaaattagattattgatttgagatcttttttaacataggcattcacagctataaatttccctctaagcacttagttgcatcttaaagttcttggtatgctgtgtttttgttttcattcatctcaaaatacttttgagtgggttttttatatatatatataaataggttcaatgatacatgtctctgtagatggctacagagactttaaaattgtaatcccgaatatgcaactatgcaacacagaccagttagccagatctaaaataataaactggcttcttacaacaactgtgctgttccaacccttcttccctccacaatgaccttaaaccttacatgagtacagttaatatggcagaacgggaacccatctttgtgaccaaaagtaaaaaccgaagaagaaatagcaattcatccattagttggggaaagcaagaaatgtagtgcccttcactgtgctgcttactcttactcattttgtccctattcttcagcccatccatgttagctcttaatatgtttgaattagccatatgattcagctcttcagtgctcaccacagtgctgatctttttcccatcagtagcttttaagacaattatcaagggcttaaagccctccacagaaccttttcttagaatgaatgggtttagttcaaccatcatacatcttcagggtaatgaacatgctgctggacaactggcactctggaagagcctggtcagctctgtctgtaactgtgctcttcaacagcaccatctcctctcaaagtattttctttcacttgtgattgcttgtttgatccattggttatttgggagtatattgcttattttccatatatttttgaatttctaaaattttctgttataaaattaaggtgatttaactttctttatatattacaaaatgatcctaagataaaatagaaaaacattgttattttagggagatgggctatgttatgcatcctgttttcaatttaacattgacatcttgacatcttgagcttagttaacaaatgaagtattactttgttgattgtgtcttcattatttgaagagcagctaaaattgagaattttgcctatcataaaaaattacttctaaaaaatcacattatgtagttgcgcagtatagaagtctaaggaatcagttgtagtcaaaccttcatgttctaatttctctgttctagaaatggaaagcagtttaaatatgtggcaacgtagattgttttttgaagtgttagtagagaataggattgtagttaaaattcacttgtaaactaaagaacatttctctaagaattaagattccctcagcatggaggtagaggtaatacatgtgcatatacatatttatttcaagcagcgcattcccctatatggtttcactgtaggacttcaccgaaaaaacattaatttttaaaattaatgttcacaatgttgaaccaagtcctattatgcatttatttggggagttacaagttgccttagaagtttttttatttttttatttttttaaggtttttttttttcccctcttattattatacttttaagttttagggtacatgtgcacaatgtgcaggttagttacatatgtatacatgtgccatggtggtgtgctgcacccattaactcgtcatctagcattaggtatatctcccagtgctatccctcccccctccccccaccccacaacagtccccagagtgtgatgttccccttcctgtgtccatgtgttctcattgttcagttcccacctatgagtgagaatatgcggtgtttggttttttgttcttgcgatagtttactgagaatgatgatttccaatttcatccatgtccctacaaaggacatgaactcatcattttttatggctgcatagtattccatggtgtatatgtgccacattttcttaatccagtctatcattgttggacatttggattggttccaagtctttgctattatgaataatgccgcaataaacatacgtgtgcatgtgtctttatagyagcatgatttatagtcctttgggtatatacccagtaatgggatggctgggtcaaatggtatttctagttctagatccttgaggaatcgccacactgacttccagaatggttgaactagtttacagtcccaccaacagtgtaaaagtgttcctatttctccacatcctctccagcacctgttgtttcctgactttttaatgattgccattctaactggtgtgagatggtatctcattgtggttttgatttgcatttctctgatggccagtgatggtgagcattttttcatgtgttttttggctgcataagtgtctgtccatgtccttcgcccactttttgatggggttgtttgtttttttcttgtaaatttgtttgagttcattgtagattctggatattagccctttgtcagatgagtaggttgggaaaattttctcccattttgtaggttgcctgttcactctgatggtagtttcttttcctgtgcagaagctctttagtttaattagatcccatttgtcaattttgtcttttgttgccattgcttttggtgttttagacatgaagtgcttgcccatgcctgtgtcctgaatggtaacgcctaggttttcttctagggtttttatggttttaggtctaacgtttaagtctttaatccatcttgaattgatttttgtataaggtgtaaggaagggatccagtttcagctttctatgtatggctagccagtggtcccagcaccatttattaaatagggaatcctttccccattgcttgtttttctcaggtttgtcaaagatcagatagttgtagatacgcggcgttatttctgagggctctgttctgttccattgatctgtatctctgttttggtaccagtcccatgctgttttggttactgtagccttgtagtatagtttgaagtcaggtagtgtgatgcctccagctttgttcttttggcttaggattgacttggtgatgcaggctctcttttggttccatatgaactttaaagtagttttttcgaattctgtgaagaaaggcattggtagcttgatggggatggcattgagtctgtaaattaccttgggcagtatggccattttcacgatattgattcttcctacccatgagcatggaatgttcttgcatttgtttgtatcctcttttatttcgttgagcagtggtttgtagttctccttgaagaggtccttcacatcccttgtaagttggattcctaggtattttattcctttgaagcaattgtgaatgggagttcactcatgatttggctctctgtctgttgttggtgtataagaatgcttgtgatttttatgcattgattttgtatcctgagactttgctgaagttgcttatcagcttaaggagattttgggctgagacaatggggttttctagatatacaatcacgtcatctgcaaacagggacaatttgacttcctcttttcctaattgaataccctttatttccttctcttgcctaattgccctggccagaacttccaacactatgttgaataggagtggtgagagagggcatccctgtcttgtgccagttttcaaagggaatgcttccagtttttgcccattcagtatgatattggctgtgggtttgtcatagatagctcttattattttgagatacgtcccatcaatacctaatttattgagagtttttagcatgaagggctgttgaattttgtcaaaggccttttctgcatctattgagataatcatgtggtttttgtctttggttctgtttatatgctggattacatttattgagaagttttattatacacacctttggtgactaattccagaaaccttaaagatcacacagttttaaatatgaaaagccatcatagcatcttgaagattctcaaagatactttataaatactcttcacagtagtctaagacgaccactctcaaggttgagccagaaaacaaggggaaaacaggagtcctattatacataatgatctcatttgacccttatttttgagcatgagtttgaagttcattttgttcttataaaagttttctatgtcttaggcttattagaaatagtcaaaacactgtcatctttttattcggattactttcttagtttagtttggtgtagttaataattccatcagttattctccaactacttagctaatagaaacaggatacttcttatatccgatccagcaaagcccagagtaaggctaagcttgaaataacacgctcaaaaattacttttcttcttcaaagctgttgttaacaaagttgtcagagagtacacatttgcaacagtttaaaaaatggtaataaccgttcctagcacagaccaacttgcaaagggttgtatgtctctgaaagtattcaaagctgtaaaatatcagacaaaaggatctcctacttctaaattttgacttgagctattcartctcattttcccagaaataatatgtcaggtcagaggagaggaggttaatagaccataataataatgaggcgtctagctctaccactgaagtataaaatagaacagttaacatttgggaatatcaataaacaggaagctaaaagcgttggttttgaggtaagataaaagatagataatttgtgggtaaaactgcactttacaaaattggtatcacaactaagaacaggtgaactttgcttgctcacgttttggggcagttaggaagtgttaatgtggaaagaaaagatgtaatagattcctaaggagaaggagagtgctggtcagttgaaaagatactcactcacaacatgcctcaaacacttaccataattaagaacttcattgaaggctctgctgctaggtaaatatactttgagtttcaaagtgattttaagaagcatatttttggatacaaattttatttgggggactacctcttaaaatattcccctaaggtatcaagaaacttttctattaaagggccacatggtaaagttttaggcttcgcagtccatacagtctgtcacaattactaccaccattttaatgggaaagaaaccatgtatgatacataaacaaatgagtatggctgtggtccaataaaactttatttacaaaaataagaagcagatcagatctggtcatagcctacagtttgctgcacccagtggaaaaacgttaagccaccctatgtattttagtctattttttatgccctamaatttctttgtacaaaaatctcaacactattttatttagttacttcacggaaaccaagggaagatgaaaaagatggccaggcatataagtttgtgtcacgatctgagatggaagcagatattaaagctggaaagtatttggaacatggggaatatgaaggaaatctctatggaaccaaaattgattctattcttgaggttgtccaaactggacggacttgcattctggatgtcaacccacaagtaagctgcttggattccaaagctgttttatattttattttctgtggagtttttttcatgtgtgtcggggttgttgggttggggttgtttgttttgtcaggktggaaaggtgactccctccrttacctttgggtgatagagaatgttattatgtatacatagctagttaaataaatctctgaacaattagccaacagaggcttgggtggcaatagaaactgtgtgattagatctacaatagaagtttagtatgtatttatttacctgttcaagtaatgcataagtgcttgtgttaagaaatgttaagtttaaaactcaagtctgcaatataaagaataaaaaattaaagtcactccccctcctacctgacacacatgcacacctctacactattcattttattgtcactctatatttctgtcacctaccccttcccactccgctacactcagcccaacctcacgtccctactcagagataaaaattgttaatagtttcttatgtctctttctagtcatttcactatgccttaaatacaaatatatataaggtaatgggttttctgtttttgttgtttctttttacataaatggaaaaattctatatagattcttcaggggttttattaaatagaactattccttggagatctttttrtggtagttactgtagagctttttttctttgtaattgctatatagtatgaatatatattcatttaaccactctccaattaatcaacattgaggttatttctactttttgagtattaacagaattctacaattaacataaaaaagagtttacatcactcttgatgatttttggatcattgttttatactttgttcaagaggaacagactgagttcaaaacaaaataaatggatcactgttttaagaaagtactatatggaatgagaaggacagaacagggataagtattaagttatgtcctttaattcatagaacaagtgcaaacagcctttgatayatactaaagggtagcagaattctagttctaatattgtataaattggcttataattattcttttacacaggcactgaaagtattgaggacatcagagtttatgccctatgtggtatttattgcggctccggagctagagacgttacgtgccatgcacaaggctgtggtggatgcaggaatcactaccaagcttctgaccgtgagctaaccatacgattttccttctaaaatctttccttttcttttgagcatgtttaactgttatctaatttatttttatttatttatttttgaggcagagttttgctttgtcacccaggctggagtgcattgatgcgatctcagctcgttgcaacctccccgtcccgggttcaagcgattctcctgcctcagcctcccaagtagctgggattacaggcatgcgctaccaggcctggctaatttttgtatttttagtagagacggggtttcaccatgttggccagactggtctygaactcctgacctcaggcaatctgcccacctcggcctcccaaagtgctagaactacaggcgtgagccaccgtgcctggccaactcttagctaattatgcttatgaaataaacatgctatataaggtgctacagaatgaaaattaattagatgtagttaggatctggaacagtattcttttacttgaaaatcattgtacactttattttaaatcaaaagtttagttcccctttgtaaaatgaaatggaccaatattaaaatatgcgtattaattgaacgccttcattttactagtggggtaactgggctccgagatcattaacaggcatgtttattatatggtttatcattggtaaagtggggtgttctgatgtttagtttctattacrtgttttttcctttttttcctgtctacttttttacttaatggaaattcaaaaatatatacaaaagagggaataaatgagtccctatgccgatcgcctagcttcaataatcgtggcaatttcttgttttaattagacccctccccacttcctcctcaccttgaattattttgaagcaaatctttgatatcatgtcatctgtaaatacttcagtatttatatctaagagataaagacatttaaaacataccattaatacaacaaaaattaataagcagtatcttactatcatctacatgcagtctatatttgagtttctccaagatttttttttttttttttttactgttgatttgttcaaataaggattcaaacaagatcaacacattgaatttactcattgtcacctaaatcttttgccagcttaattgaggtataattgacacataataagctgtgcctacctaacatgtacagcttgatcagtttggccacatatttgtactcatgaaagccattacaaccaaaataatgaacatgtccatcatctccacacattcgcctgtgctcctttgtaacctgctccccacacccttccccctaccactgtcaccttttcccctcactgtacttgattatatgccatgaaatcaggtagtattagttttctttgttctttttcaagttgatccatgtctctactttctgaacgtatgaaacatagtgtttaatgtctttgcaggttctaacatttgagtcagttctggattggttttgattgaatgatttttctctttattatgagtatatcttcctgcttctttgcaatcctgggaactttctttggatgccagacattgtgagctttgttctaggatgcagttatttggaaatagtttgtttttttcaggtctcactttttaaatgtgttaggtaagacccaagcagttctcattttagggccagttaatccccacaaataaggcaagacccatttggtactcctaccacagggcttgtgagtcatgagattttctgttctggctaaggggraataggtaccattcctgggtacctctaatcctttctggtggttctttctcagcttcaggtcgttgtaccaatgtgcaggttggtacttcagccgaatgctggaaggagaccttctacaagtctccaaagtctgtctgtgctgctcttcccctctggcattccgtcctgcaaactcttgccacctgggtctccctggactcagctctgtcctcaactcaagagtcctgtaggctcctttgggctcactctccccatcctactgcccagaaactctttcaagccaggaagctggggtaatcataagastcacttcatttgttttctgtctttctatgatctgtttttaataccttgatgtatagtgtcttaaaaagtgttgtttgatacattttgtccataaattaattgttaggtgggagagttagtctggtgcctgttattccaccttggctaaaagcagacatccctttaaatctgtaaattctcactgccaccctcccttccctctcttttcacattgtactttagttgttaaaataataataataataataagtcacttatcctacagcatgttccatagtctggattttacccattctgtccccattgtatcattttcctctatcccttctatttcctgtaaactgataggttgatctagaggttggtcagacacagattcaggttattcaggtttttggttggttggtttttgcaagaataattcataggtggtacttgttttattaacatcatgaggcatatgtcaggctttttgtcataagattaatcagtggggtcagaagttgttagcctgatctataaagttcctcagtaactctttacctactggttttagcaaactttattgatctttgccttggataaattatatttttagggatggcaaggtggtagtattctaaatttgtcattccttctacatttataaactagaattcttaagaagaacttttcctcatcaagtagttgattattctgaggtacgattgatacaggaaaggcaggatacatctttgatactgtcctttgtaggtcagctttcagaataatgagtttattccccaagagcctctagaggtaacaggtgaccagctgagattggctttgtttttttagtttcatgagcacgtatgttcaaacttatctggtgtgctttattctgttgcagtgattatttttattgatgctaagattgtcccatcattgaccaataggagcttattctagttggcccttgagaccttttttttttttcatgacgctgatagtcttggatagcttccttgctatctggtagaacaaatgttccaggctcatcttgtacattttctgttctaggccaggaatcagccatttttccaagatactctggtttcttttagggtaaatggtgttttaagaccataatactaacagtgcccattgtcacatagttgatcactgcttcttgctagacctttttatgtggacagtgctagcatatatgcttttctgtttgtatatttgaaggaaaatatatcatgaatttattctgatattttccaatcaaattcaagattacaggatttttatttaacttattttatcttatatgtctaattcctttctcttatgctgaatatcccttctcataacactggaaatgttagaattagaatatcaaataattgctcatttgctttattctacagtacaaacacaacattctgggaataagtatatcaacataaccaccactagtatcattactgtgaacagtccccccaactgcccacctaggtctttctgtctttagagtatatcccactaagtagatacagtcagatcactatggggtttttttgttttttttttctgtcgccaggctggagtgcagtggtgcagtctcgactcactgcaacctctgcctcccaggttcaagcgattctcctgcctcagcctcccaagtagctgggactacaggcatgcgccaccacacccagctaacttttgtatttttagtagagatggcgtttcaccatgttggccagggagatcactatgttttaaagtcacttgaagtacctcctttctgtgtatttaggtcagttattcttttttaatgtttaaattgttgtgtcttcagcagtaggagcctattcaacttggcttctgagtctttttaacrtgattctagtaatgtctgataattccttgctttctgatatgacaagatgttccagattattctacatttcctggcccagacctggaaccagccatccagaagcccttgtttcttttagtgggagatagcatttaaagataattcagtcagtaagggtgtacattaaacttagttggacattgtttttagaccttttcagtaaccagaagtaggaaataaattttttgtttttagaaaacatacatcattagttcaatttgatagcttcaaatgaaattttacattattcttcttgggctttatatttgcctttttttcctcttatcctgaaaaccttggttcctgatgataacatcatttcttaacttacatgtatataaatataaataaactaagcacatatgtaatttgagttatatctgtattaacaatatgattattgaaaagttttaagttccaggcttttattgttcttaggatatatcccactagattttttttttccttcaacttttgttttaagttccggggtgcatgtacaggatgtgcgggtttgttacataggtgaatgtgtgccgtggtggtttgccgcacagatcaacccatcatctaggtatttagcccaacatccattagctattcttcctgatgctctctcttcctcgtgctcccaccctgacaggccccaatgtgtgttaatcccaccatgtgttcttattgtacacctcccacttataacccactagatattatcttcttttaaagccactgaaataattccttgctgtgtggttaaaccaccaacttgaaacacaggtttatttgttttattttgcttctgatttttaagaatggctgtaatttgaatttaaattttgttgtataattctatacaacattttcattgctccaacataaatcttaaaacgaatccagcttttctgtgccctctccactttgtttcctcccacccacataggctgccattattggtagccattttaccatgttagtttccagtataagcaagtgtgcctgtgtctcctcctcccccccattttatacataaatcataccttatgtacaaaatgtgcctgcatttttccaataccagtatatcctagagaccactctatagccagagagagaatctttattcctgttccatctgtatggcatactccgttattgttaacagggtttttttttttttttttttttaacaaatcagattgctaataggcaagaattgctttcaagttgaaatgtggcctgtttacatatctgtgatcaaagatattttagctgtttcaaactcatttagaagtctcagtatcagctgaaatgtaagtattagggtccttcaggcctggcagtgaatccacttctctctctacactttctacacaaatgacattgttgagtgcttccatcaacatcatttacattcatgccattgttatgctaatgatttatatacagctagcccagacctcagagctctgatttgcataaccagtcgcctgctgtacatctccacttggatgtctcacagacatcttaagcttaccatattacaaagtagcacactttgtttcccccagaaattatgctctccctacccctcaactctgtatctcccacagccacccatttacctaagttagaaacctaagagcaattcttgactcattcattttcctcccttttcaaatcctggatgatgtaaaaagctaatcctgattattttatcaccaaaataaatttmcagtctggtgtcattttcatctcctctgtcaccatcataacctaggcaacccttctctctgacctggattcctgccatcagtctccctgcttccactcatgtcatgccacattttcactcaaggcccacagaggtctttccatctcgtaggggtcctccatgacttaccttgtttcccaacycttcacccattctggtcttctttcagtatcttgaacgtgccagggtcgtttccttcctctggattttgccctgctgtttcctctgcctgaatgctgacctccttattttcatttagttctcagcttaactgtaatttactactcagtctttttccaatcactttatctaaagtagatctcttaaaattctttgtgcctgttttgtttctttcatggtagttatcacaacttggtatttcttatgtttatttccactttatctcctccactaaaggataggaaccctctctcttattcattgtcatacccactgattctgaaacatagtagacaccttaataggaactcaataaatatttgtagaatatgtagaggtatagtgaaattcaaaacaccatcttacgaaaagctttacttatgtagaacccattgcttatgtactccccacatcattccaaaatgactaaaattactttatgaaatataaacagtgcctggacaaaaacataaataaaagtatgtgagtatgtgttttggtggaggatgggcagcatgtaaggttaatcttcaaaaaacacttctaagattctctgatcttatagagaggtagcaagtttggctttgagcttaacagccactgcaaattgggtaccatgttgtacatgggccatgagataaaaatctttcgaaaaggatgatatagtggagctggaaaccagtcacctgcagtaattgttttgttactgtagattcattccaagattattttcagcagtcttttaattaggaattttatcctaatataagtgaggcaaaagatgcagaatactcataaatgtaaacatgagtgttgttggaaagaataagacatgaacagatggcagtgttgtctttaacactatatggattagattttgaagattaataccagaattaccagaaatatatctaacctatttattatattcacttctagtkggagtttgagcaagtaaatatgcattgtaatacaaacatttccttttaaaactcttcaacaggactctgacttgaagaaaacagtggatgaaagtgcacggattcagagagcatacaaccactattttgatttgatcatcataaatgataatctagacaaagcctttgaaaaactgcaaactgccatagagaaactgagaatggaaccacagtgggtcccaatcagctgggtttactgatgattcagtaaggttaacaatgaaaattaaactyttaaaaagtgactgcaacaaataaaccttctactgagaaaatacatcacagatagaagattatctgctaagtccaggcatttttatggtgtagattgaaataatagtacacttctgaatttttatataaaatgtggttggaaggtgtactaatatataatttatcttaatttttctaactttgtatggataatctttctattcatatcacataaagaaatgcgttgaagcattttgtatatgttttgatttagtacccttgcctttttcatcaaaggaattttcaaatcattcactctaacattggtctcatattttcactgtgataatgaatattacttgaaatagttttgtaaagctgtcatttagttcagtattcaaatagtgaagggttagtcttaatagaagaaaatatagttattgaccttccttcttataaatttcttacaaaagcagaattttaagtcagtgttatagctagtctactaccatctaaatctgacatcaaaagtctgatcagtttacgtattttcattatttcggagatgtatggctatccattctaatttatacagctatattagttttgtctcttcatttctatctttactgaaaaattgaagagcaataccttgcactctcttttgaggttattctttttatttgttgcagtgatatgatgctaactaatttaacatgtacacagtaagctctggggctggaagcaaggtcatgcagactgagagagtgccttatcctgtaaaaccttacagcaaaatgacacttgaagaaagtttattttcacatgtaaaattttgactgacaaaaggaacctactactttaaacaatggttttattagaacatggtcagcaaatgtatcatgcctctgcaaattttagtgatgtttagagatgcctctaagtttgcagttggaggtttttgtgcttttagaaatgtgatgtgatccttagggtacctgttttgtctgttgtgttgagaaccaaacccattgaacaacttaaaaaattgggaaataattgtcagctattttgtatacatacacacaaaatatatacattatataatatgtatattatgtattatataatatatataaaatgttttgtatattttttacatatctgttaaaaaatgtactttgtttttttgtttgtttgttttgagatggagtctctctctgtcacccatgctggagtacagtggcgcgatctcagcccgctgcaacctctgcctcctgggttcatgcgactctcgtgcctcagcctcccaagtaattgagattacagttgggtgccaccatgtccggctaatttttgtatttttagtacagatggggtttcaccatgttggccagggtggtctcgagctcctgacctcaagtgatccacccaccttggcctcccaaagtgctgagattacaagcatgagccactgcacctagccaagaagtgtactttttgtttaatgattaccgaaagaagttctcctttagaagcattgacttatacaaattcccacattcacctcagttaatatcttcctttaggattcttggataatagaaattcttcctaaaacatactcagagatgcagctcattattaaattaaggtaaccacattctgtattgttgctagcttttcatgtaaacattattcacactttaaaggattaggtgtttaaatattgatggtcatctttgtctggtgttaggtgccagacacctggctgctgaatttgttttttccctcaccaaagttgtcatttggaacgccagctgggaggactttgaaggaaaagaaaatatatgacaataggcagtattgacacattgtttaaaatctttttcacaataaaacaaaacacccaagttgtcatattgttaaagttggaaatctataggtttttctttttttttttttttttctttttttgattctagatttcatggccagaacacaaattcacgtttcttgtcctaggacagggaattggtgacaaaatggattatactattttaataacagtggaaactttcaaactacatgtgtttacaccaaattcttggcttctcaaagcaacatgaattaaagcacagtatcaaggtgatgccctatgacaatgtttcaacacacacttgaaattttaagagaaatttcagttcttcactcaggaaatgtgctgtattctctaatgtactttcatgctgcagcatggagcctctttaaacagctttgggataattatagcagcacaagaagtttatctgcaaaatatttcaatcatcttggtacaatagatgacttttacatcatgtatattagccttatgtgatataaaatgtattacttagaaaatatacttaaaggaattatttctattataaatggtattcatgattgactacttaattaatgcacattagatttctcctaatataaaatgaaatgatgcagtttagttcatttcagtctagatgcccgtactaacaagaatacagttagataagttcattgtatctcaatgaagaatcattgaacttgaaacccaagtcccaaatgaatctgcaggaatgagcagtgctctgcgggggcaaacagccccagaggtcccagggttcttcctaggtaatgagagtatagctgtgatcaaggaaatgtgaacttctcttttgggaagatctgcgataattagctttatggaagcgaaaatggtttagagtggtgttgagcaattgttaagagttgaaatagacacacacatgcatgtgcttttgggaaacatgatgtgccaacgtattaatgtgcctgagggctccttgtggataggtcagtgtccacatttcagcactcagggcatgactgtacacaacctaagactatatatatattttttcattttcaaatgtacaaatacccatagaggtgatgtgcctggataagtcatttaaccatagcttagtgaaataaatgtgatggccctaaaaagtagaattttcactttcattacagccatgcctttattatgcagtctccatttctgtgtgatatttggtaatatcacatgtcaaatacatcaggactttgtttattttggctaactctaactatacaattgctgaacatagctttctgaaatagaaattataagagaaacccagtatgcctacagcattagtagcctaaatcctagattctagaatccaataaatttatagtagttcttaagaagtttcctttaaagcaacaaatagattattaaggcaaatttagataataacccaagttagcaataaaaccatgtgacattatagattatgtccagatactaactgctttgaccataatatcccaatgacaataaaaaatgatccttggtttaaaaattattaaatggtacttatttttatgtataacaagtgtcatgatcccagtgactggagttgattttcaaggtggatagccatagagttaggtaaaattattttgaattggcaaactaaagataacaattttgaaaattgctcaaaataataatctacttaaattttacttttgtaacttctgaaacagtactccattatccagaaatcacaggctagagagccaataattttgtagtaatgaaccttaactaaacatgaaaaaggcaatcctgaagttttatgtacatagatagcagttcattttttaaatgttcgagttgccatatattatgtatgtgtgtgtgtgtgtgtgtatatatatatatatatatatatatatatatatatatacagctatgtgtataatatgtaaaattctcccaaaatgtatgaatataaaactgaatgtattcattcatgtaattataactagcattctaaaatttttaattactcccatttctttgacattctgaaactttttttagattgttttaaaacgctctggttccaccttgaagctgataatctttctgaaaaatatatgagaaactcagaaagtagtcattattataataaatttaattttcttagggaaaaagggcagggttctggatggaaacccctttggaaattcttatttaaacttttgaatgaatctttaatatgattcaggctgagattatgatacctgcccttgtcttatttcaagaggtttgctgtgagaattcatgtaataacatctgtaatgtatttggaatttttgggagaaattcattcttttaaataatgggattattgtatatagtacaaatgaatactcacaaaatttaagaatacatttgactaataattgagcatcttgtcagtttttatgcaagcatatattgtatacctgaggaagatgacagttctataatttttttaaggtaaggttatttttaaattgcatttttgttctaacgttttgcaatttatattctttttaaaatatttcccataattcatcatgctagcttctgtgttcttggaatagtttttgaaaaatgcagagattcgaacatgagtccttaatatactaaacagtgaaagaatgatgatatctcatttctaaagtaagcatggttcacaccactttggcaatacactgcagtactttttaaaaaatattctctagtgataaaagtaaagacagggtactggccaagatcctaattctgacttctgactgtgtgatcttcgatgaaatttatatttccctttatcattactattctacttgttaagtaaggctaagttaatatttgtcttcgccttaaattctgatttgtaatttgtaactctgatgtggtagctgtgatatggtgaactgaaaaatccttattaggctactttatctgttctcttttagttattttaaagtgtacctgtttctgaagtaatgtagtgaatggtgaatacttttcaggaattcttccagttttaaaatagccccaaagatacagtttcagctggtggaaggtctgttctgctctcttagtcctaatcagaaagtcccttttatcttataatcccatactaaatccaaacccttagcaaatccttgctgccaaccagaccactcacaaatcaaacaaaatgtaagcaagcaatccagtactcggttacaccagaagactctgatctttgcccccgaaaactgtcctactttatccttatacctgaaatcactgcatacctgaaatcactgcagccctactgttttacccataccattaatttaaaaaggcatctatttctttatagaaagaaacattcacagtgaggtcttagtttgtgaacctcaaaatccagatattaatccactttagttattactttgtaattgcttctcagtcattggctgataatgcaatggtgtgataaatttgacttatctccacatacaaaagtcgatcagaagggatagttctcttcctttttttcccctcctactggctcttactgttttctaatctccagtgtaaatggaatgaacacatctatagttaaggtaaatgccaccaatcagaagattgagtgatttactgcttgtaaagcaactgtctttgaatcttatgaaataggtggtgttgctaccacagaagccaaaaaggtcttaaaattggaaatagatgtctttattgtacttcagccaacagcaagccaggggaaggaacatacataaatatgacaggtcatatatgaaatttggctctcctcctatcaaagtagcctaggagcttggaggaagcctaattaactaaaacaggaaaaaagcatactcatctgatgtaaaaactcatcagctgtaaattaccaacattaaaccagaagtcattaccagttaaaatgtgtggttttcatcttattcttaaataggagaggtggacagtagtgtaagtaacattgctttaaagacataaagcttgtcctggtaaacatggtctaaatgagaaatgcctccatcttttcaggtagaaccagatttcaggcatagctcagctacatctgtatttgaaatacaataaaaatatttcttatgtctctgtattctcttttaaaaagaactgctgactggctcctgtctcttcagtaacactgatttttttttaaagaagtgatatgttggactctgttgtagaagaatgagcactagtattcagcaacaagtgcaatttctccatgttatgttgagctctgttggagcctatggtgagtatttgatgtgaaaaccttgctgtgggaattttttattcttccttttccccccacgccagttcgttttggtaagtcttttatttgaacacaagacgcatgcttttttaaacctctagtttttgaagtaactgtagaagagaatctttaaaaaaaaaa

SEQ ID NO: 95814 - DNA, 43572 bp, Homo sapiens
ttgcatctccagggtctaccctagtgctggatggagactaacagctaaagaattaagtgatgctggaatgaatgtgtgacccttgacaaaaaagctgatctgaaacaccacataaagtcaagggcctcaatgtgagataaagtttgctggaaactgcatctctataatagcttttatatttaaaggatgattatatgtggggagagaaaaataattacactgagaactgagcttttaagcatagcattttcctttgtcaattagttgactcagggcaattaaaacaatatcatgaatgtaggatttaaataccttayggatagttaaattcctggaatgtaagtacatgttgaaggtatgaagaactcagatctcttcttcatttgaagaaatgatgtaaaatatagtggagtcctctttctagttttatgaaatatatatgtgcaggtagagaatgggagagaatgctatcatgagacaggaagaaagcatggaacttgactttgacctgtttctaaatccaacatggctagttgcaagctggaacatacaaccttcaagaagttacttctctgtacgtaaaattaggggaaaggaaaggagaatgttcaaatctcccagcatacagctactcaataaatgccatgtttttatttgcctcttcatttctctttcttgtttcccataccatctagtagatttttctgagattgcacaaaatagttatttttccttagtttacagaacttactttacaataatcattatggtgcatatattgaaataacctaacttgattaaatatgaaagcttttttttttaatttaagaactaactgctggtacatatacaccatggaatactatgcagccataaaaaggaatgagatcatgtcctttgcagagacatggttggagctggaagccaatatcctccacagactaacacaggaacagaaagccaaacgtcacatgttctcacttataagtgggagctgaacaatgagaactcatggacacagggaggggaacaacacacactgtggcctgtcaagggggtggagggagggagaacatcaggaaaaatagctaatgcatgtggggcttaatacctaggtgatgggtcgacaggtgcagcaaaccaccatggcacatgtttacctacatgacaaacctgcatgtcatgtcctgcacaggtatcctggaacttaaaagaaaattaaattaatttttgttaaaaagaactaattgcctaagcttcaaagcattctacaaaatatttatttccaccacaaagcagattaatatatatatagccagttcttataagtgtcattgtaaacatttccaaaagaacagtgttccaaagtctatggaaagagaactctaccattgtgtaagagacttcttgtggcattagtgctattttaaatctagaattaaaacaaggctttgaaaggaaaagccagcaccatcagttttcagggacaatagggacatactctagaggacttcagtgaggactccaagacagaagagagctgctagaaacagcatgtgctgattgaagttgagagttcagagtaagaggtaagggtctgagagtcacagttcaaatgctccttggaccttctattacaaatggaactagggactcatgagaatgattagattgaattgtaatttttctgttaatgcacatctgtgagctcctaagtaagggattgaatttcattcttcttaataaatctctacccatgtacctagcacacaggctgctatatgggaggtacctaatacatattgattcaactgaactgataggcctgccaggaggaaaacttttttttttctgaagagtgtgaggttcccagtatccttgaataaggcctaaaagagcaaatcattaagaccgactcatcaaaagatcagccagctttggtcccaaaatctaaaatcaaagagagtgccacaattttccatcgccctgaaggtattccagcactcagcaggggccagtaatttgaacaaggggaccacttcaagcctgcaatactgcaatttttctaacactgatgtgtgtaattttggccacagtttaacacaggataacaaataaaagcaatattctatttgtctatagttgtttacataacaccatagactataagcttttttatgaaattgtatttactgtgcatactttacctaaattaactaagcattcctcctctgcaatatcatctgcacagggctaaattctccattagaagtcttaggcacactgcccagagcttatggtaccttgagggcttcccaaaaatgatttaatttcttctaaaaatcagaaaaagataaacttttagattaaagaagatatttaaataaagaagaaaatatactcacctttatactaatgtaatcataagatataattttaacttggcaaggcagggagcaggattcataaaggaaaacatcataaaagtcataactggacctcataaccacatatgccaagatgtgtcaaatttggtgtcataaagtagataatcttaaaaatcctgttttcagaaaagaatcactcaatttgtcatagatggatggattgttgttacatacacagagacaaaattgggcgttgggacgggatggttggggaggcatgagatgggtgagctgagttggaaggaacaacaatcctccatgttttatggctgtgaccctcatttcccctctcactagcggactgctctagctaattagcaaatcaaaagaaatagaaacaattctagacctcagcacaatcaaattagtggagttattcgaggatatcattttcacacagtgcaatcatgctctctttgttttggtcaaacgagtgaaaattatctttcaaacccaacgcccttccctctacccaactggctctgtggatagtggcatttcctatctgctctcataagttttacagatgatctttttctattaagacaggaatgtgcaatgcacaattaaacaatacccaacaagcttcccttttaaaaatacatttgacttttaaggtgattcagcagtaagagccattagtacctcatctaaatcaggacttggaaagtttattaaaattggatttttaacctgatcccaatttcctttgtggataaagagtcccactggagtctttaatattcatgctattaacctgaaagattcaaacagccatgatgggaagaaaggctatacagggctgcccactagactgggggttacaaataaaaccccattgagtctgagcaggtagactactgtggattctggacatcttcaaaagaagcaacttctctctttttctctctctccccttttcctgacctcccgtctcctattacatattttgtgggaaagagaaaaaccagaaaaatagcaaacataagcatattacttaattacatagagcactagactaggagtctagtttttactggaagggtagcttcctcctctagtgctctaatgaaatccctcaattataaaatagggaagtctgggctaataatctctaatattggttgagaagatgcactttggagtcaggtgagaactctttgaatatcagccctaccacttattagtatgtcaccttgaacgagtcactaaactctcctaaacctccgtttccccatttgtaaaatgaacaaaaggtgcagctcctatgattcattttgcatagtacctggcactataagccttagatacactttagctggtattattactgattattgcccaaactcataggtcagttgcttttgtttctatttcatgccttttcactccttgagcctttatcttctttagaacagtttacaactgtgttaactcatgtctgtgcgtgtctgtaaaggtaggctaggagtgtttgccttgtttttccttgagataagattttatgctctcttagggcaatggagatatcttattttttcatctctctcttagtaactggcatagtgttgtacacatactaggtgctcaataaagacttcgagatcttaaaatattagcagtacagagatcttccactaaaaccctctcatttttcagttgttggaactgataaaaagagtcttgggccacacaactgactgacagacacttttgcagtcaactactactgtgtctcctaacagcctctattctcatgcccacggctttgaaagggaaacatgtttgacttaaaccctgactccttgagggaagttccatttacaaagttttttttttttttttttaagagcatagtatgtttcagataccatgcaggattgtaggattctgggattcagataccatggaggattcatcattaaatcacgatacccaagctcaaggcgtttataatctattagagaagacagatccctaaatagatgtttcaataatgtgattgcgttgtcataggagagctaagctctggcactacatgagcttctggataagaaacctaactcatgaccagaagacttcagggagagctatttaggagcagtggcaaatgcctggacatacacataaaactaagtaagaacaaaatagccagttggtgtttttatttatctgaatgtaagaacatagattatcgatcaatgaacaattgctcagatttaaaaagaaatgaggaaaactaaaatgttagtcctcaaattcctgtcacttcccacatgtgccctgcagtcatttcctgcaaatggaaacttccaacaaaatctctgggctggagacctggggttccagtttctttcaaggtcttgtggtagggaactaagtgggtgagtaacctgcctttggcttccagggtgcaaacagaatcattgctaaccccctttgtgtctcacaatgggtaatgaaattcatactatggcaccaaagcactttgagctctttagaaaaagtaatcataccaacttagagcattaaaaccacmccgtattttgaaggactcatgatctgcactgtgcttggctgctggtggaagcttaaagacaccagtaattggcagaactttatcttagacttccatttgaccctcacaacctcacacatgattttacacagcttcctataatgggggagaaaagcccttcttttaaatctaatgttagtttaaatgctaaggctttcaaagtgggcctttaaagtcactttttagaatttgtatttttttttaacctaaaatagacatgccaacattattctgactaaaagaagtagacaaggtcattcaactcctaaaagcttattttccaaaagcacagttaggtctcagctttcagggtgcttctggctgtatcaaaaagacagaatatactggtcactgtgttgttttctgaaagtgccgagggtaatctgtgtatgagttaaagggccaatttcctataggaaccttctcttagatgggatttttttttaattaaacaatgttggtgaaatatatttaaacgtaaatcacaaattcgaagtcttccaaatatttatttactaatgtggaagacatggaaactacagtaatctcatttaaaggaagttactttgatgtgcatttgcttttggcggggtatgattgctgacctgcctttgagggcaacttcctttggctcaggtaagcaggcaaacccgtttctccaaggcgattccaaccccacgcccctcaaaaccttaaatcttaaattgagttattgggtgcaggtcctttctcccacagaacctcccagcttccggaatagaggagcggggcagaaatatcctgctttttatttcagagctgacgtttgcaatcctagtgcactagcggaaaaaaaaaaaaaaaaaaaaaaaaaaaaaaaaagctgaattttccgcgctctcctggcaaattggcgtccgctctccgacgctaaaccaaaggaaaaggagtgttcaatggcgacagggcgctctttgaagccggctcctcacgcggattctggcccaggccgccgctccggtcccagtccggctgcagagcgaattggagaggatggcacctcctgcttcccggggggcggaaggagcgccagcgcctaaggtgggtcacctgccaggaagggaatacgcatggtgcagactcacgtgggaggagcacaggtcccgggtacaagtgccgagctggcgacttagagaagaggtagactcgggctcagaccaagcaggcgtaagggagtagacgggacgtcccgtgtttgcagtgacggcggagtcacccatcccagcagcctcaccttcttggagcgctggtccctccccttggactgaaaccccaggggccaccgcaccgggtgggcgggaccgactactacccgaccagccgctggagctgcgtgccaggcggggctgtgcggagcagctgagcgcagagcggagcaccaggcacctagcgggccggactctgggcggcacccgagcgggccgggcagcagtgggcgctcgcgatcctcctctgcccaacgcgctctccctccgggcccggcctcctccgtcccctccttttgctcccgctcctcctcccgctcctccccctcctcgggattgagcaccaaaacgcccgcctgcaaggtcctctgcgccctggcagccaggagtcgccgccacgacmgccgggtctcagtgggtgcctgcgccttctccccgcccgcctgccccgggccatccagaaacttgctctacccgccgcgggtgctcggcagtgctgcccatggcccagccyaggagcctatttagggcgccggacgggctggacagaggcgcggctcaggtgagtgcggcgcgcgcggggtgggagagtggcaggacgcaggtgtagagggctccgaggtgcctttgtctggcgttctggacttcgggcaagtgcagaacctaagaagaatcgaggctggagcaggtggagtggatgcagagggaaccaggaagcaaaggctggggattttcccatcctcctcacctcctgccctagcacctctgctctggaagtcccgagggaccggttgatctgtaaggacagggacccagatttctgactcttactgggttggatgttttccccccctgcagagtcgtgaggttcgctcctgccggccgcttcgcgaccgcagcttcaccataggaccctgtagggcagcgagagcgcagcactcaacggatcctgggtaccacctggggccagaaactggggcgaggacacagcccgcaaaagtaactcggctgagggagcctttgggggtggagaagccttggtcgggtttgcctttgcatttggttggagataggcatctcccaaagagagagattgaggtgacagccctgacaataaacctctcatccctaatgccaattacatgagggtcttgatttttttcttgttactttttactgatttttttcccccttcgtggttttctatttccgggcccttgggtagtggcagcggatggaggtgagggatggcggggtgcgaacccgcggttggaacgcctagaccccagctcccaggaagggtcttattcgcggagcttgacctctccaggtgcgctctaccagccagggggcggacggcgcgctgctcctccttctagccccagcctgtcccaggaagcggaggacagacccagaacgtaggcggatgatgggaagaagaagctggagccaaagccgggtgccggcgcgggatggggtgtgctgggctctgcagttataggtctataactctgcagttataggcgctataggtcttccatctctttccctcccctgggagccagcgattcctcgcacactcagggcgctctcttgggccaagggttgcatcctccctcttcctcctcctttgcagatccagtggtacccttgcctcgccttgcgcgagtctcgctcctccctttcccacaatgttatcatgagctatttttatctacaacttgtgccaagatgcttttggggggattctagggaggccactccaaatccactgtctttgcgctgcgctccgagaaacagtctcctgttagcatggagcagcctcaaggagtggcggggagggtggccgagaacggaaggagccagtccgccctcttctcctccctcagccctagccccggagggaaaccccgccaccaccagctcggctgcgcctcccgccagtagccccggaagagggtccccagacgagtccccacgctcccgctttcaggcgctgggtgcttggacactgctgaggcagcagcctggcacaggcaggatccttcattcccacccgtgcgttctcgctttgcaggcaaatctcattttattttgttgaaatgcttccacccaagggttaattccaggaattccatctttaaaaaaaaaagaaaaaaaaaggagggagaaataacccaacttctgcctccctgcatttctaaagcaaagcgcatcctttgacgttcggatttttttcttgctttctgcattcctggtaatattgggtaacactgggtgcaattagaataagccttacctactgaaattccaggagacgcgcgctccgctgcaaatccctgccttacccttcccgttgtacatccagcgcttagattttcccccacaggattgcagaaataacatattgaaatggaccattgtgttacataaggttttctccagcgctaagcagagaaagaacagcttctaaaagagtctttccaggttttggttagcccatctaactctttcagctgagtttgacagggatggacaacttcatgactaagcactcttaagwggaagcagttaattacaacagcagcatagatgaagattccttagtgaggcttattaagctgtgcttctagactgtggatcctctgtgatgccacagggtatacaatgctctgtagttttaagataggagatttttgttctgagaagctggtgagaaattggcatcttgagatggcatcggaaaaagcaaagggttctttactttcctgtggttatgtctagaatgaagcctcaagcccccsccctgggtccccctaaaagttggagcatgtacttttcttattaaaataagaaattattttactggaaaaatcttgtgagggttggggggggggcctctgaagggaaaagccacatggaagcttctcttgccttgaattgaaactcgatggtgactaggaaggggctagaaagatggcctgggtggtgtaaattgcttcactcatgcacactgcctttctgagaacatagcagctacccacaatggcatatccccaccgtggttgctaaatcatgtctgtctatgggggctaaagtttggaggaaggcacagtaagatgtatctggtgtcctgatgaaattgagcctgtaggctgggtcagtgctcaggcaccaggtttccgggcctgcatctaagcctgggtccctgtgttagagacagttgttgcaggagagtggtaactttttagcagcttccagggaaatgcagtaactttccagctagtgctggaaaatatcagggctattcccagtttttttcccctcaacctggctacttgacctggtgctttcaattgaggctgctcttttcttatggcagaaggcaggagagtgctagctggatttaaagccaacttcttgccccatgaccttgggcaacaatttctccctccctgaccctaaatttcttcctctgcaaaacagtgatgaaaagattattataagaaagtgagaaaatgtatatgaaatgcatcttgccgattggagaacacttgtgcaattgtaaagggtaaaaaatacaaaaaattaagttttatcgtagatctattttaatgttcattttaatcatagtttgcatatgtctgagtaaatgacatatgctaaacattaagtgggagagatttcttttaattggccagtctcttcttgtgatcactccacctgaatgctacaagcaccgggcctcactacttctcagaatgattcctttcttgttttcaggatcacagtcaatttttagagtgtttttccttttaacataatacacattacatgtcttaagaaaatctgtttgaagagagggccctgatgttaattaataatttttttwaaaaaggagaaaagtcacaaatggggagtgactccactggggaaaagtaaaacatgaccagtgtcacgagatgacccgggtcccccttgtctgaatctttcatcagcataatgcactggctcctcatcattgcattttaggtgttgttccaaacgtgtctccagaacctaactcagtgcctgcctggcacttagacattcaataagtatatttggaataattgaatgagtgattggactgaatcttcacagcaaccttggagagcagatggcgtcatttctattttaaggatttggaatctgccgatcggaaaacttaattaattttctaaaggtacaaaggattccagactagaattcaggcctgtctgttcttattccactctacagtcgtgcttgtagtgccctctctcttcagactcacttaaaacccttctaagcagttggaaccaaacatcctatttagggaacacaaccttcccttcatagaaggattttttttttttttttgtgggagatgggcctctttctccttgtccatatctcccagccctgaactagggcttagttgaatgatcccacctggggcctggaatcttgaaagactagctaaagggcasagggacattggagtgtttatttaccaccttggatcatggatcaagtggcgttggcagcagtatgcatgtcccaagctgtggtcccagaggtgccttttctgcaacaccatcttgatgtgcctctggtgcccaggttcctttcattccttctcattttccaatcctggcttttcagcttctcagcaattcctagaggcaacccatagtcttcaagtgaattccctttctccctgacttagccagaattgcaacccactgatgtacagcttctccccattcatcttcaggcctgtctccagcatgaaacatccttagcttcctctacccatggggaatgaagkctgtagctttttcagatcgttagaataatatctactgggccgtagtttgtcaatagttatgtgctactacaagaggtctagaaaaatgaatacattattcttccaagcaatactctaaacataacagaaatagatcccagtgggcatctttctttttctctaatacattatgctttttggtagttttccagcaggggtcgcaaactctaatgtcttcagcagccaggcaagtaacagcttgagtggaacaggacttgggccctgtgcctgggtaagtgggggttgtagcccagatccagcacaggggctgcaggcgggacttcaggtctggtcttgccagacctggttatgtttttttttttttttttttttcaagatagactgtcaattcacagttttatgtaaaatctactcactttcaagtgccagcagctaattcratattcctaaataacaccatgtgggccaaaccaaacatttctgtgtgtaagccttatatctgtcacacaggcctccaatgtatggcctctggtttccagggatatgagggaaatttggaatatgaaattcaggagggcatgttgttcagaatatcgaggcaagagtgtagggacatggagcacagacagtgctctagttagttactgtttacagagtgaacctctgttcgggatgttccttcttcctatctctgcaagtggttacagcaatcatgtttactcctttaacacgtttattgagttccagccatgtaccgcatattgttctgctcaccggtgacacagtagggaacaaaacagatggaagtcctcgcccttgtgcttatcttccagcagaggagacagacaaaacacaagacagataagcagaatctctcctagttagatagtgatgtgctaaggattaaaaaataaaaactagaggaaagtgataggaaatatcaggatactggggagaaaccttaggctgttagccagggagcctgcagttcagtctctggctcaacataacccaaagttaaatttcattatccaacataaaatattttctatgtgggagtttgattgtatcctgggwctatcatccattgggtagttttggatattgagctatactctcaattttaataaaactggctattgagcacgtttattgtctgccatgtacccggcattgcattacgtgttagagtacattgatgaacaaaaccagtcaaggactactctgcaaggaaattatagaccagcatgaaatacattaaacatgatctcaaatgattaggcaactacagtgattgaggactgtggtaaggatgccttaattgttgagttttcatactcagaactctgacgttcagcactttttttttttttttttttttttttttttttgacggkgtctcgctcttgttgccctggctggagtgcagtggcgtgatcccagctcactgcaacctctgcctcctgggttcaagggattctcctatctcagcctcctgagcaccttttaacttgatcatttgttttgttccaggaacagtttacatctgtgcttattaacttactttaagcctgctcccatcgtccacggaaatttttttgaggctttaatttctttatctggcaatgacatttttattataaaatttcattttgcattattaaaagtatttatttttaaaaaatgtgttccaagtgtaaagtgtgcttgtgcccttggagactctggtacaccttctcccaaatctgcccctacctttgctattgattgtcgttcacaaggcagttgtgcaggatattaagaaatagttcctgtcattgatgaatttacagtttagtatgggagtcagataaataaccgagtctctgcctgtctcatgagatggaccatcccaagaatatttccctttcatcaccttctttctttcatggtaataatttcttcagtaacataattaggtagcaagtatgtttatctggagtcaccttgttactggattggcttatttgcttactttctcacactctcccaccagaatatgtgctccaggagagcaggggcagtgtctgtttgctccagtttctagaacagtgtattgctcagaaaagaagaaacaggcggcatttctgtctgggggagttaggaagcggttcatggtggaagaaatatttaagaaaagagatgtggtgagaacagccaaagaagaatgataagacgtagtcaaaattgcatagccctcaaacctttgttgaaaactcatttgtctattttagggattcccaatacggtcagtccagctgartaactggcatattaatacaagcgctttgctgaatagatcctggtctgcttgtgcaaaagcactctggcatgaaaagaatgtagtagataattccttactttcacataatgtgacaatacccactgcctcctttatctctcgtacccagtcctgcgaggactgcaggggagctctcaccatcttcatttgctatttaaggaaactgaggtccagaagtgaagaaacttttcttagagatgcccagagtaaaggtggcagactccggatccagggacaaaattctctacctgctgtgagcagtaggctcaaggtggagatttgttaaatccctggagaactgagtagtccacattttctataagcaaagaaatacatttagatgtgaaacattcacatctcctttcatccctcaagaacttctatttcagcattttatgtcttgtcgaatttccactagaattcctgcagatgaagtacttgtacaccctgtggtaggttgttttatgtaaatgtcttcactctttagtttaggagggtaaatcaaagttctgtgtcagcagttaaaatacagtgagagaaaggtgatttcggctgcagctgaaatgaaaagcaagcttgcctagctgtgctccgaaaaatacatacttgtgtggcagggaatgagagtgggctgggagcctcctctggaaaactggcttgcactttacttgaattacttctaaaaccagatctctcccagtgtcctgggtaggaaggagggggagggtgttggttatagatttctgagattagattttggagctattttgtggttgaaagagcatgactttggaagtcatgtatgtttgaatttctggcctggttctcactagttgtgtcactctgagtaatagacggtttttctgggcctcggtttttttccatactctagtgaggattgagggagatggccaatatatagtgcctagcacaatgctcaatgtgtttttccttgtgtagatttgccagatttagcaaatacaaatacggaacacctaattcaatttgagtttcagacagacaacaaataatgttttagtatagtatgtctcagatactaaaaagtaagaaatgtgtcatgtttctctaaaatttcaatttaactggacatcctgtattttattagcatccctattctcctggtagcagttctgaacgattcttttctgaaagttcttgtgccatagaaagataaagaaagcagtgttgtcttcaaggtgaaatgacttgtccagggagtagggtccaagatgaaagagaagggctgttttctttggtgagctaagcaacagaacaatcaaacaaaagcaagcttatttctttgcttaaaaggaccaaaagaagtgtagagcaaaacagaactctgggcattgaagaagtgagtctgattcttgcttatgtcaccaaagcacaagccagattattctcaacacccttcaagaagaaggtatttcaaccctgtgaggccaccagcgtagtgttcgttccgctaagatagaaccttattaaatactaacattgctccaagctcgttactgtagggctggaattagaaagactagcgtcacacagcgttccactgagtacactgaagggatactttgtgctttgaaaactcacacctgaaattgctcctgcaataaaagctaataaaactgttagagagcttttcagactcgctccccccaaatagatgaacacagattataaattgagtctgagatctctcctgcgactgctggagcatgacgttctgaggagggctgtgaaaatgttgcatttccatttcaggtgatagactgatggggaactaaattaacaacagttttgttgcgtgtggtctttccaaagcagagtttcatgctttcttcaatagtgaggtactgctcatgccaaaataaccagttcctgttgcgtgtaatatcagtgactcctcatttaacctgagctcctaactagcagggtgtttacatgaaatatgggacagaaagaaggtagaacagcagtatgattagtgtgaaggcttaaccagccagagagatctggttagaatctgctatgctgctttgcagccatgccataagaggtgagctactttacagctcaacgtctcagctccacctccacaaaataggcttaattaaaattatagcacagattttatttcatgtgcattaaattaataagttatgtcatgcacttatacggtgtctggttcacggtcagaatttttttttaaaggatgccattaatgatgagggaaagcaaggaaggcctctggattgcaaactcaacgtcctgtcacaaagaccacagactaatttgttttttcaaattatattcttaatgggttaaatgtgcccctaccatatacgttttattactagaaggcccctactttttctttttttaaaattttattgtattttgttttactttaagttccaggatacaagtgcagaacatgtaggtttgttacataggtaaacgtgtgccatggtgttttgctccacccatcaacccgtcatctaggtttcaagccccgcatgcatcagctatttgtcataatgctctcctcccctctccccaacctccgacaggccccggtgtgtgttgttcccctccctatatccatgtgttctcattgttcaactcccacttaggagtgagaacatgcggtgtcacaaactaaattttatgcatcatattcatgggagagtgtctcagttttttgccctttgtttctttagtcttaatttatataattcaagcaagcactgttattcattttctaggccaaccaatgagatgcagcaatgtagcaaaatatggaaggaacagtgagggggaagatgcagaaaaagtacaaggagaggaagagaagtggggagataaggcaagatggatagagggagagagaagggaagagaatacaggacaagagagaaaagaaaaatcatgacaagcagaaaaaaggatttgaagagcatagaagtccagtgatgttttgtgacagggtggtcttcagcagcccctgagtaaaccccaacgcagccagaccactgagagtggtacaygccactccctctccctgcctcagcagagcttctgaggaccccaacacaacacctcatgatcttgagggaaagacatagaaactgtagtgttccaactagaaagcatatggagcatgataggagcagtgagccatgtgctttctccccagtctgtttctgtgacagctgaacatcacagatgaaaactgaagacaagggacctgagtgccatcttgtggagggacaggccatggtgcccctggtggtcctctcactgtgtgggggtttggtttggtttattggtttgcatggtgtatcctggccttcctcctgtccctaagccccacctgcctgcaccatgggaactgatcctttctggggtgatgagtacattgttaccagtcattctgtgatgcaggatcattcttggggccagagctccattcgccacgcagtttgaaattcatggtggctctgggtatgagagactattccctgatccaaaagggagtgtagtatttgaagcatttgatgacagggaaatgactttgcctcatcgaacctttgtcgccttatctgtcaaacagaattatatttccttatggacttttgttgtgagaatcacatttcataatgtatgcaaagcacccattagagagcctggtatgtagttaagtgtctataatgctgcacttaatagcaatgattatttttcttgctggtaagcctgattttgattgaaaagcagattacaaatgtcatcatagatctagctgcttattgccttccagtccacctctgccttctggccgatcctcccctccaggtggctaaagtgccacagtgtcccaaagcagccgatgtcatcactctgctctaaagtaggaggggagcaaggtgcagaggggctgagaagagaggggctctcttttaatcacagaggaaaatctttctcaaatgccagaatattttccccttgtgtcctcttggccaaaaactaggtcacaggctcacaggcaaaaccattacagaataggaaactgaggcacaaagacatttgaagcagtgaaagaggaaaatgaatcgaatatggtaactctgaattgatccctcttgcctttgggcaacaattacacttctgtttgtatattacaattggagattgatcctgctcagcttcatcacttgtcttttactgccgtcttcagctaaaatacaaatctgatatctttctggcttctgttttgtttttccttcccagctctgtcatttttacagccatttgcaatctgcaatatttctctatgttaatctctcttgctaacctgagaaatctttgtaaaacacgaatataattaggttattgcccagtcccataattcagaatgttccatggatttccattactcataatattaatgtttaagtgcaggacttttagatgcaagaagagatcaagtcctagccacatcacttcatcacaatatcaccttgggcaggtgaataatctctctaaacttcaggtattcttccatgatttttaattatgtatttttcatacactcatttattaacatttaatttagtctaatagatgaaattgtaagaggatggggactttgtctagagccgcccccaccaaaatctgtctctaatctgaaccaatgcctggcagacagtggtcacccaggaaataattgtggagtgaaaaaccatggaacataacgccctccatttcatagaatagccaggattaaatatgataatgcatttactgattattttaattataatgcatttgattaacttagaatgtttaatacacatagtgggtgctggaaagctggctgtcctttcagtttttgtttttttaaataatgaaagtagtaccaaaattcaagttctgcaggatggctctcacattctaatttattaagcctcatcattagccactctctgttctgtatacatacctcataatctgacctcaggaccaccstttgttcccagataaatcaggaatgtgagcattcacacccctacgcatactgtttcctctgcgtagaacttttgtacgttctcccttttcttatcaggttcagactgtatcattctttaagagctgtctagctctgtcccaatacactgctccctctccatagtaaatcactgcatgtgtgccttttgccttggatcactctcttccaggcacttgatgggacatgctttccttcctagttggagttcagcagggccatgcaaaagcaaggggaactgatgtgtggtcacctggcctgaagctttaagagccagcccatgctttgtgtcagatctcctccccaccagcctggtgactggcactactccggagagtacctgctccgtctttctgcctctctgagagactcgaatgagcagtgtcctgccaccaaccctcatgggacaaacagccaaagggaggagggacagagatgtaggtgttgatctcagcctaacctggcataccctgaacgaggcaccacctcttcagtcctcctggagctctccacattgtgcagstggcactgttgtcattgctcattgacttggctgcatccctcaggagacagctcccagagagcaggacagaaccacrgtcatgccccttcatgccccttcacacctctcgtgcytagtccagagtataagtccttgatccctgagtgaaatatggatttatgtggtgaggsgcgatgaaaggaggggcmtttggtcatggttgttaggaagtgaaagtaccaytatgataaacagaattatcagtctttgaggggaggcagatcttttcattcggattgcctgagttcagattggcagctgtcctttgtcatctcatgaagggtttaaagtgacctgagaaaatgtcccctgggtaaggtcaatgctacctgcactctgcccttccctgaactctctcatgggagttcttatgtgcatcagcccttccccaaccaggaaggcacctgttctaggaatgtttttacacttccaggcgtactggagcagcctgctcctgccggcttctcacccccacacaagtctccttagctgcacacatttccgcagaagcactctctctgcattgtcaytgggtcatttggtgacatagaccastgggccctattcatttagacaaacccatgtgtttggtttaagattgtcatcacctgctcctttttcttgctttagttcttaaggttctctgctaaaggcagcacaaaggctaattatcttatgataagttgtcctttaaaaacactagattaagagccactttaggctttttattctgctttttctttgtcatctgtctctgcacagctatcaatagagcagcatttttctgctttcactggagaatgtttctttcttactcatcaattttcagaatgttgtttctttctttacttatgacaactatttaagcagacaaaaatagttgttaaacctaagttattactaatatttttctttcacttttctcttcaagttaatatcattgagctattattgattgagtgaatactattgagcaattatttattgtgagtctatcatatgtcaggtgggctaaaatgttttttctataatattttacttaattccacctaagaaaacaagcactggtccctttcttcaagatagggaaattaggcccagagtgaaaaatascttcttcaagggcatgtaactaacccagaatgcaaacccaagataatttaaacatgattgctttgatctttctgccccatccatttatttctctgtttccctatttacatactttagcctggacattagttcaaagtgttgaactttgtttttgtcctcaccagacccctgaactttcctcaggtgccttctccatgaagcatattccaaatttcctcatcccaacctccttaatgttgatgaaataatgtctattccacagtttctttcatctcattggattggcagtgtttgtttccaaatccatctttccccttacacagtgggttccttgggatgggacctcattttcttcttacatttctgggcttggttacctgtgacctgagcaaatgacatctaaccctcttcagtgtctgaatttgctaatcttacattgtgggggtgaggaaaggggataataattgtagaaagaaatcctggattccaacttagtgactcacagtattaaaattctctctatgaatctaagcatttgaagaaaaactgtgaaaaaccaatccagaaatctcaacacaatttccaaagcttatttaacatgagctactgttctttggccaagcctactcatcttccttggcatgttggacactaacgaatctgttggtttagatttgatatcaatctggaatacaaagccaggcctgagtgttcacgctagctggttggggaagtaaatacggttgttaaagtagaaaagcaatgggactgacttcaccaaggaagccacagtcagttttattctttagacgcctctgaaaactcatctttatggtaccatgctatgggctagaacatttcaggacctctaggcatagcttccttcattaatgtgctgatgaccttgagaaggttgtgagaagcaggaagtcttgaaaactcagttcatcattggaacaaycacacacgcgtgtatatgtatatayacacacacacacacactcaaagagagacacaacaattatatgccacaggcccctcttgaaaggagatggaaccaggacttgatgagtgaaccttgctgaggtcccatcaaatctaatgaacatgacagaataaagagcaacatagcaaaggctctcttgcctgcagctataccgccctgcaagtgcctgactgcagaagctaagcatggtcaggcctggttagtacttgggatggaagactgtccaggaagatccagtgttttatgctttaaaaaaaagaaaggaaagaagcctatctcatgcatcctcctgctagtccttcatttctcctgccaatatctttgtttttccttctttctcactatgatttagaggaaggaatgcagttattaacagacaataactcatgttcacatgktttttttttcaattttgaaacacaaagcaatctatttctaattgtagctctgctatccttcttcttatctcataaagtatgaataagaccaaaatggttttcatgtagatctctcagtccattatcgatgagcctctgtgctcttcccacaagcatcctgtccttagccctctcacagccctaaccctaaggtgatcatggctgtttttgttttgttttgtaccttctctcctattgttccctctccacaccctataccctgcatggtcccaagttgtttgagggaagagacagggtgggtgtcaactgtgtctctaatttcttagtgcctgatgcaccgtacatttatttaggccttgactctgaattgtggatactctcaaaccctgatactttacaaagtttgcttctccatttgctaaggaagaggcggaagaggctgagtgtcatatgtggcacaaaccaggaaactagacccctgtggcagttctcagtcctcggctcttttcctaagcaattctactcactcccaatcgtccatacctcatttaagcaagcagaagtcttagagcaaactgccttcctccagcctagaaggtgattaagctgcctgtttggtgtggggataagggaaatcttatcccaccacatgccccaggttggaaggattctcttctaatggtatgctttattgtcactgataaactttttatataatacttatcttagttaattagggctactatgaccaagcaccataggcctgatggcttatgaacaacagaaactgacttctcacagttctgcaggctggaagtctgaggccaggatgccagcatgcttgggttctggtgagagccctcttctgggttgcagcccctgctgaattctccttgtaccccacatggcagaaagaaaataagccagatttctggcctcttcttagaagggcgctaataccattcatgacgtcttcaccctcatgacctacttgcctcctaggggccccacctccaataccatcatgatggggatttgattttaacatattaattttgtaaggacacaaacattcagtccgtaggagtataatgctttcttctttgccttgtttcattctagtaatggttaagcattcttcatagattatttctcagtctaactgatccacctctcaatcaggtcctgggttcaatgaatattcattgaatgagtgctaagtatgatctgagtggaatcagagcagcaagtgcagtttgagagaccctatccaaggaaacagcctcttttccactaaaggctgtattcttccccctccccatcaagragacctcagcagcttagaagtttgatatatggtgctacttttaacctataaaatgttagatgcccacattggtgacaaaactttgtggttaatttttaacagtaatcactttggctaggaattttggattccgtggctcttggaaaattctcttgaaattytggattccaagagagccatgcatgatcaacccgtatgtttctcaatcctctaaagcattcatgttttagattgatcttatactatcttagaatttacgacccaatcgtttcactctgtaaacaaggcttagagtatccctgtgtcttgctgaccatcacatggaagtcaagacagaaccagggactagaccccagctcctatctcccagttcagcaccctatttaccctggtgctttggccctttcgagcaaagaagactttgtggatatgcatcttatgtgtccgaattattgattacctraatagaagctttatcagctattgggatatggaagtctgacggttacaaaaactgaaatttggtgggagttttctatgycagccccactctttaacagttcacacagtcacacctcctttgatccccatgacaatcccatgaggttggtgctgttaccatccccatatttcagatgggaaaattcatatagagatcacatggcttgctcttggtcctatggagccagtatgggtgcagccaggattcaaacccaggcccttaatcaccagcctcccgactccgagctcctgtaattcatcttgatgattcctgaacttctccttctgacattacttaagtaataataaataacattttaaaaatataaaatgtaaatcattttgcatcaacattcagaaagaacagatgaccaggccactgatggattaacttgacatacaccagtgcatttaatctgaagatagtgtaattataataagagataacaagagattacagagggggctgtgtggtgtgcacgatctaggtgttgtttctctggatagattacatggcatttaaatatttcaagattagcaagatgattaaacagcacctcctgtttaaagtaaagcttgagttagaggcaaatgagatactaatttacttgtagaacctgaagcatcagtataatgaaatattcaacttgaatgacactttaaaaacatttcaagtaagggacagatggaaatcacagtggtgtgtatatgtatgtgggccagaggaaagaaccatgtactattgctttatttagtgctatcatatgaagtgcaacagttttttcaatataaaatcaaaacccactagggcatactactcatattatttctatgccagttttccccttgagctctttcaggcatggatgccgctttgtcattgctctatccctggtgtttttcatggtgcctggcaatactaagcactctcttaaatgtttgttttcaaatgatcatgataaaccaagagcacacatacctaaaaagaaagatagtaaaaagttcctgggccaaagctgaacaaaagtttccaagttacaccattaacttttctcaagtcagagcctgtacatagtgaagtgacactgctgagatttaagttcaggactatatgcttcatcccaatgccagggctatttttcctctacttttttatttatttatttatttatttattttttgagatggagtctcgctctgttgcccaggctggagtgccatggtgtgatcttggctcactgcaaactctgcctcccaggttcaagcaattctcctgcctcagcctcctgagtagctgggattacaggcgtgtgccaccacgcctggctaatttttgtatttttagtagagacagggtttcaccatgtttgacmggctggtcttgaactcttgacctcatgttctacccgccttggcctcccaaaagtgctgggattacaggcataagccaccgctcccagcctcctctaccctctttctaaatttctagagagaacactgcagcctctcaagctgtgggtcctgtagcctcatccacaccagcacctgccatggcctgtgctccccayagcatatcttagcataggctgaggctttccttgtaccccatytggctttttctcctactgccctgaatgaatgcttccgtgggacttccttctgagcaatggccaagttttctccaagattgtgttcgaacatgatctttgctgtgaggtccttcgaggccctccctgaccctctgccrgctcccatctctttcctctgggctcttgagtttccacggctggatctatgtctactctgaggtctagtcattcattcctyccacgtgcatcttccacattataaggtgctccttgaggacagggacgggattatttcagtgtccccagggactcagtacaattttagaaacatcgtagatgtcttgtaagagtttgagtgatcacctatgggcaaagcatagaccttaggcattgctctttgcagacttgccattcagtcttttttatttttattttttccttttcttcactttacttggcaacttatatccatttatgagattcctaaaaatcagcacttttcacataaatatccatagttgagttttgagaaatgtgaagatcagaccactctggtccctggtctctgacaatatctgccagagttggcagcacctgcttctttagccaaactacacacacagctgattgccaccgtctcccatcagccagctggcttcatacatagatgtcacttgcctaaacctggaagcatctgagtgctgcccctggaaatacacacagtggaggaagtcccagccaaacagttttgctttactaattattctgaggaccatgtactagtcagctagggctgctatcatcaaatamcttgcaatggatggtttaaacaatagatatttatttctcacagctctggaggctggaagttcaagatcaaggtgtcagcagaagtggttcttcatgaaaccccattccttgctcgcagagggccacrttttgcctgtgccttcacatggtggagagaatgagagagagagacagagtgagctctgttttatcttcctcttcttataaggacaccaatcttgtcagaatggagccccacccttacaaccttatggaaatccgatcatctaaagcccccacctccaaataccatcacactgagggttagggtctcaacctatgaatttggggaggacaaaaacattcagtccataacaacctggctcaagaaatgagacaaatcatctctccctgtttgtccaaattgtttcaggggaaacaatttactttggtttgtataaatttattttcagctgtgaattattccaatcttccttacccaaacaaaaaaggacagatttccatgtgtctgggggttagtaagatgcaaattgggagacccatgtttctgagtcagttcagtccctgcaggcctgaccttggggttcttgttctctgcttacctcagtttgtctatctgcaaaatgataagacagaacaagatgatggcacatggctattttgcctctgatgccttgtgtgtctttcctgaccacttctgggttaacataaaagatttgtgggtactcaccatctgcagggtgacagatgactgtccaccccagccaggggagcttcttcagctaagatggcacctctcagaggctcagtcatacctggagcaggggctgaagccatgcaccccactgtgggcccaaggcagcccaggtcctgtctcctgtctgctatggggctcctcttccactcagttgcactgagtaataagagaagccccgtctgtccgccctcctgtcacggagctctgctgcacagtgcctgagccagtgtgtttctgcttctaatgaaggatttatttaggtcactgctgccttctgtgcacagcaatgcagattaaacatgttgagaagtaacttctcctcttccttcactggggcctgcctcaccactgcacacacctggctgctcatcattcgttcaggagccctttatgaaggacccacagccactgcgtgcccttctacagagagctaaattatttctatgtgtcactgtcctttcttctttgagcttctgtctggttgagtcactgcagtactttgcatcatgaacaaatgtgtttgactaattatcatcccaggatcccatttataccacccaacattttttttttaagggacaaaaatagctaccatgatttgagagcttaccacaggccagtcagtatggcaatgccctaagcatgccacatgtacttttttatttaatcctcacagtaaatatgtagggccaagacattcaatctcaagctctgagtttcagggctgtcttgcagatttcaagttacagagctaagatttgagactgggtttttggctctaaatcctgttaattcccagcatctttcctccatctcccgcctcccaaaatacaaactcagcagacaaaataatccctgtctattttgtctaccacaattgttttcagtcctggaattaaaaatatactaccccaacaacagtaggaaacaaacaaataaaaaacaaaagacattgcccatctctgccccaggccaagagtatcagaatctgaattggcacccacattctaagctcacagggtcctagccatgccaaagactatcgagggttacatcagctcctctgggaatttatgaggaatacagaatcccaggcctctgctcaggcctcttgcattagaatctgcatytgtaactggctttccaagtgacttgcgtgcatatgcatgtttggaaagcactatgcctgatgactgtaacttgcagccacaagtccctcccaggaggaaatctttagttacctctcatgcgaattttttatccagatccttgggccataatccttcacctgatctggacaataatgttgtgtgggttgacttcagaccacctatgggacaggttgcatttatcattctcattttatcaaggagcacttagaggctcacaaataacaccaagatgggaatccttatcccagtgactacaccaagctgcctcccttggcttgccaaagcatctccttccttcaatttcagagaattcaatttattatccagttaaacgtttgtaaatatggcacctctcagacatgcagaggattcaaggaagcacagaaggctagaggaggagatattcgaatagtcctcctctttttcaaggaaaaagtggggccaattactstaacttatcccccactgcatagtaaatgtggtccaaggaagcttattaacattatgtggcctgacttacggtcctttctaccctaaactcttttcaccccatcccacctcacagcaattaccataaggaaatccaaacaaaagtgaatgtcaacatttgttgaagattgacatgtataggcaatttcaagaaaataaatatttatgtaggtcttgaaatatcactgtcctctcataggckgacaggcacaaactaaacgtatttccaatttcattgtttctaaaatgacctgccaaggatgaaaatctgacaccactgtgaggtgctcttccatagctatgcaaagatgaaagtgaagacatgtttcgttcttaacaatgaaaaaataatcttatacttttgattgcccagaagtttggtagattaaaaaaaaaaaagacagttttgttgttcaacctgtgtttctcatgtttcagtacgttccagaaaattaaatcactcaacaccatgggattcttggaaagaagcagttctcgcataacagtataataaatctcacacttctatctcattgtggttttaagtaagctctcccttgcctggaatgcactccccactgcccaaggggaagcatcaccattcaaaggggacaaaagcacaccgtgggctttgaggatggccagtggaatattttagttttgatatttcctggttctgtgaccttgaggaggtcatttaaccttaacagcatgtatccatttctgtcatggcagatatgaatatgaaaggcaggccattaacatttgttgaataactgtgtgccagacactgtgccgtgtatttggcatgggtcatcttatttaattatgatgacacccctatcaagtagatttaagctcatatttgcagaggggaatgtggagacccagagaggttagacatttactgaggtcagttagcagtaagaattctagcttggatttacctgattgcaaaagattctttgctcatctactactccccaccacctttttattgcttaaaaatataaaataaaatgagaacaaccacctcttgtattgttgcaagtattagaagaaataatttatacccaagtgcttaccacctggcacccagtgagtgctcagcaggtaatctctttccttctaacccttttgttaaatcccataagtgaattgtggttgtatgctttgatcatccctgctaccctagaggagattcctgcctgtgacagtgtgtcaccatctctcattgaggggctgtgaaggtgtcctgcagacagacagatggcaggcatcgctgttccagattcattaaatgtacctcttgtgaaatatcctagttatttcatttcatctatgaatatgttccagtagtgggactgagagaatatattacagttaattacatttgaaatctaggtcatgatgtgaattatgtaataaggagacataaggagaaaatgaaaatatttttgaagggttatttcattgcttcccctcttttttaatccaaatattttctaggctctcaggtgatgtcgcccaatcacgattagaaatgctgagtccccctttcaacatctggtttctgcttgactctctagagacagaagtttcaaacccttaaagtttctcttcctactgtgttaaaatatgttcccagtaccttccagctatttgcctgtctactgcatttgacaagttcattcagcaaacaaaatgtctagtatgtgctatataccagaaatcatgccaggcccgaggggacagagtagagcaaggcaagacctccatttgcaggaaaggcctccttggaaaggagtttagatttaattccaagtgcaagggaagcctccatctggaagattctgtggaatctcccttgggtttcccatgcctggcatgtggctactgtcttcacagtgggactcgaggaagcttactgttgctgataggaaggaccttaatcttttcaattcatgaaactcaggccttgggttttcaccataacacccagaaaacagcctccctgataaagggaagtaaatggaggggtagctgggtctccctttgggacctattaacccatcggaggttcattttgcccatcttagcaagtctgggccttcacagaaattctgtccttcatcaaagaattggtgcaaggcacaactattcaacaggaccaaagaagtagagccaagttcattaataacttgctcactaactccagacattgccaagaaaagtgaaagtgacagtgaagttcctggctttgtttagactgagtttgaatcctttcacctcctctaactttctagacacaagacttcatttctctgaacctcactttttaaaataaaaacatcacttaccttgaggacttgcagtgaggattacagcaagccctgtgtggaaagttgccagtctagtgcctgctcagtagcaattgctgcagatgggagctgcaatcattgcttttgccaaggatgtggcctcagctccaggtgctatagagaattctgtatccatgcccacatcagccaagtgcttcaactgtcaaaaggtcccatttgtttacttttacctggtttgtttcttgagggagaagatcgaatttgcctttgtgctgcctgcaggttcaaacctgccttcctggttcttctcctgttcaggaagctcctaatctgtgagtgcgtagagaatcttgctttcaggagagtgtgttccacacttaaagacctctcagattaagaattgcaaacatgcccagtgctatctatctctgtgctctctaactcaattgccaccagccatatgtgtccttgagatgtgctacacaggaaatatatatgcacttggattttgaagactgggtagaaaaaaatgcaaaatatttcattaattttatatagtgattaggccaggtatggtggctcacacctggaatccaagcactttgggagaccgaaacaggtggatcacttgaggtcaggagttcgagaccagtctgaccaacatggcgaaaccccatctctactaaaattataatacaaaaattagccagctgtggtggcacacacctgtggtcccagctacttgggaagctgaggcacaagaactacttgaacccagaatgcagaggtcacagtgagctgagatcatgtcactgcactccagcctgggcgacagaggaagactctgtctcaaaaaagaaaaattatatagtgattataggttagagtgataacactttagatctattaagctatgtagaatatatgttttaaaatgtctgaatgcatatgttatacacaatatatttatattggacagtcctgacacacattgtttcatttcagtctcaaagtaatcatttgaagcaggtggaattattaccattttacagatgaggaaactgaagctaagagaggttaagtcactttgaccaaggtccaaactagagacaggaatcctgactccagggcctgtgcaattcatttggacccttctactgaacagaacaaatgagcaagtttgaccctgtactacacataccctgtgtgtcagctgacactggaagttggtggccagggagttgtcattgctgggtagattttgttgggtttttcttctatggaatcccaaaaatattgtcattattttacattacaaccacttactcggaagacagtagtaacagcaactagactacagaactggacttctggagccaaaagtcctaggaacagatttactatgtgacactgggcaagtcatcttggggtgtgaaaggcagggactaagtgactcccttcttccctgatgtttataacttcattgtcaagatcaaggtggcacacaggaatggcttacaggttcacctgagcttgggaatctttttgtttctgagagtgttacaaaaaggaccagaaatcctttctgtgccactgggaagtccaaattacaaaaccacaagaggaagttggctcccaatgcccacagtgtgtatgtaatataaaacaggttatactatatttagmtatgaatatatgtgtgcatacatttacacacacaaacacatatgtacttatacacatttttacatatacacataaaagatacacatggggtatacacatgatatatatgctatatatagtatgtgtgtatgtatatgtgtgcgtatatacttgcatatgtgtatataagacattagctaatttctttctctattagcctcaaatatttttgaatgaaaaaggtctagacataagtaaatacatttttagaaaggattaaaatacaaacaaggagcttataagctacttaacttcccaatacgttgttgttattttctttcataaaggacaaactatatttagtttcttctctactgtctgctggtaattctccttcaggaaagaaacctcagatgtacactacactaaccaggatgcctcaggttagagttgaaggagcataaacagtcagataatatgaatttcagatctggcctctgcctctacacttaggtatcaaataatatgaatgtgttgttccctgagtctgaacatggaactataagatggtgatagcagtgaccaacacacagtatagctctctaaagggtagtagttagtccctctctcacttgacctacctgttatacctgcacacacacacacacatgcatgcatacacatacagacacactcaagcatgcacatacaattgcatacattctcacatctcaaacatgtaagagccaagcacaattggtacatttggtcgaaccacataggtgacttgagaaggaaatgaaattcagctgaaacaccctgaaaccatcacttgactaaaaaaattggcctgttaaatttagttcaccaatcggtagaaccaacctgaaacctcatcgttcttggctatcctttctaaagcattcttgattttttcttaaagagttacatcactgatctctcaggtcccttctccagtgcactgtggttctctaaaaccttccatctatttgattacttgctctttaatatgtttttcaaagaagataacaatatctgagaaaggtagattagctggttgatcataaaaatggatgtcctggaatttgttcttcctttattcattctggacaagttttaaactaatgaagtaaattttgaaactaccrtacaaaagatgatgagtcctcttgatggagaatatttttactagctttgtaaatccctcagtccccaagccaggcctgtctcttacgcttcccttaatgtgttttaacagagatgactcaagtgaaagcaactaatctcctctttaggggatagcgtgaaacacagactgatgagtatcagctccttgaaaacataaacccttgactggtctgtcttgtggaaccccacagcatctaggccagcagttcctgtgtcctttactgcctaaatgttataaatcttaaataggtaaagaggagaagttttgtggaaaagatgtggtttgtggataaagaacactgagtttagagttttcaatttgggctctaaattttgaaatagactaatagaattgtgtccttagacaagactaccctctataaaatggtggtgacaggccaggcgcagtggctcatgcctgtaatcccagcactttgggaggccgaggcaggcagatcacctgagggtgggatttcgagaccagcctgaccaacatagagaaagcccatctctattaaaaatacaaaattagctgggcgtggtggcacatgcctgtaatctcagctactcgggagactgaggcaggaaaatcacttgaaccggggaggcggaggttgcggtgagctgagatcacaccattgcactccagcctgagcaacaagagcaaaactccataaaaaaaaaaaaaaaatggcggtgacatctgccttgccttcctaccttacagtgtagggttgtagtgacaatagctgartatagtatgagaccacattatcaatagtaaagctttgtacaaatgaaggcttttttgcactttgtagtaatttcacttgtttatccctccaggcctatttcaaatgtttcctccactgtgaaaccatccccaattattttaggcaaaatgaatgaacatgtgtcttcatagtaccctaccaaaattacaatcataacatatatctccctgatgcctacagtcaggctgcgtcaattaacttttgccaatttcccgctgcaatacaaaccactccaaaactcaggggcttaaaaccacaatcatgcatcttcactcatgagctgggatggctctgtgtgtctttcatcctccctctgggaccatgggctagccagggcatattcttctcatggcaaagccaakagtgaaagagggtgagcaaaaacacacaaggcctcttgcagccaggctggggactgatacgttgtcacatctgctcatatgctagtagcaaggccaattcaagagttggacacaaggtgaagaattgggactaatcatgcaatctttcatactaattcacatgctctgttagattaggagcccctggctggaagagtgggggcaggaacaaagcctgcttctatatcacctgcccctttgccagggactggtgagtagtagatattttattgatttttgctgagttccaaagggtcttcccaaccctttcctttatagcaagggttagcatgctctgactagggaggcaaacctggcctggttgtatgcagccagctaaacatataaaatgattgcaaaaaataacaatagtaaraaggaaaataatatttaatgacacgtgaaaattatatgaaattcactcagtgcccataaatagagtgttcttggaacacaaccacacccattcccttgtgtgttgtctatggctgcatttcatctataatagcacggttggagtyggagttggcataaagtatgtcccctaaagcctaaaatacttattctctggacttttgcagaaaatgtttgccatcggctcctgtataggataagaaactgagagtcctggggaggtgaatataggcctcactacagagtggctacagagttgttagttgaattatccctgtatttgttatatgttaatatcttccctttttgttccctagtaattgaaggcctgaaacgcccatgtgccactgactaggaggcttccctgctgcggcacttcatgacccagcggcgcgcggcccagtgaagccaccgtggtgtccagcatggccgcgctgctcctgggcgcggtgctgctggtggcccagccccagctagtgccttcccgccccgccgagctaggccagcaggagcttctgcggaaagcggggaccctccaggatgacgtccgcgatggcgtggccccaaacggctctgcccagcagttgccgcagaccatcatcatcggcgtgcgcaagggcggcacgcgcgcactgctggagatgctcagcctgcaccccgacgtggcggccgcggagaacgaggtccacttcttcgactgggaggagcattacagccacggcttgggctggtacctcagccagatgcccttctcctggccacaccagctcacagtggagaagacccccgcgtatttcacgtcgcccaaagtgcctgagcgagtctacagcatgaacccgtccatccggctgctgctcatcctgcgagacccgtcggagcgcgtgctatctgactacacccaagtgttctacaaccacatgcagaagcacaagccctacccgtccatcgaggagttcctggtgcgcgayggcaggctcaatgtggactacaaggccctcaaccgcagcctctaccacgtgcacatgcagaactggctgcgcttyttcccgctgcgccacatccacattgtggacggcgaccgcctcatcagggaccccttccctgagatccaaaaggtcgagaggttcctaaagctgtcgccgcagatcaatgcttcgaacttctactttaacaaaaccaagggcttttactgcctgcgggacagcggccgggaccgctgcttacatgagtccaaaggccgggcgcacccccaagtcgatcccaaactactcaataaactgcacgaatattttcatgagccaaataagargttcttcgagcttgttggcagaacatttgactggcactgatttgcaataagctaagctcagaaactttcctactgtaagttctggtgtacatctgaggggaaaaagaattttaaaaaagcatttaaggtataatttatttgtaaaatccataaagtacttctgtacagtattagattcacaattgccatatatactagttatatttttctacttgttaaatggagggcattttgtattgtttttcatggttgttaacattgtgtaatatgtctctatatgaaggaactaaactatttcactgaaaaaaaaaaaaagattttttctggagacgctatgtttttttgaatataattaacttgcccccaactcaaaatagctgtctgtgttgcaatcattgcaaaatctaaattcttttgttacttaaaaaaacatgtttttcatggctattacaatcctctctctcccctctcctttctgcattgctctttttaatttttaatgtctcattgtgatcatcagatttatttttacttggattgtaagatttatctcctcggcgattccttgtcatttttggaggtcacagttttactcattcccatgtgtaaacttcaagtaaacaaagcaatattcaggatggagaagcagttagtgactggctagaggtctcttgggatccatcttgacctcaaagaatatttgcacatgcttctgatctcagcagttataataaagaggattaaacccttggccttcagaatgatcttggacctggatactttgccccaggtggcagctggcctccagaaagccaattagaatagaaaagagaaactgcgaaatctatgcgtgtcttcatcctgtcggttctgtgaaaggctgactaaaagggtagtagtcttttgcttagtctgaaagtctgcttacttcctgaaagacacattggcattatagacatatattccatatgcactgagacataaatatgtgtatgtttcaaaatcaactctaaatttggagtcctgaatgtgaaagaaaaagtaagttcccaagtgttgaagttaaaaagagaaaagggcagagttgaaggtagcacctaagagaaccactgtacctgcccccagaggagtggctggagttcagttttacttctgcccctgagcagccagcttgttggagatggtcacataaacccttcttatcctcagttttttcatgcattcttcatgcagtcagccttttacagaattaaacccattggattttaataaaaataaaacattcattacagtaaaagagaaaatacaaacaagcaaaataaaccggcttcctgacatggtttataccgcaggaaaatgacagaaatggacgttattaatcatctcctacacttaagaactcattgaaatttctccaagcaaccccaggatgcagatattattatggaaatttcaaagaggaggaattaggcccagagaacatgagaaacttgcccaaggtcacattgactataaactcaggcttagaggctactcagagccaaagcacaggttatttatgtatttagtttttacccaactctttctgaactcaaaaggaaaagcccagactcagagccagttcttcctgacctgacttaacatttcttcccaggtgccaaatatcttccatcctaagaggtgtgtcccagatacaggaagggcaagaagaagcctgcatttttctcagcagtgttatcagggaagtgagtcaccttggtacgtttcagcagctccagcctgacctgaccttagcatggcctatgccccaccccatatcatgaacagagagcagagaggatgccttcctctttagaatccattaaagttgtcattaagccatcatctcccccagaggaagtagcagaaatatttacagcaggcccctggtggacatggtacttttcaataggcagagagcctccctctgcagcacatcgttggatcttgcttttaccatactccttgaagagctgaagaaataagagggcccagcaaggttaagtcaagtttccaagcctgttcaggaatatggtgactgaaaggaaactgcaatgagagtctctgactgaagaagatgctctttgcaaactgcctgtaaattcctgtcccctgacagggatggtctggtagaagcatgaactgtggatgcaagaggcagcggggaggagtggaggaagacaggaccagcacatggaatataatctagctgctgggactggcatagtcgatggaggcggtggtccagtgtaaaatgatcagtgaatgtaaattcaatatgttttcatttgggggtgcagagtcgtggctaaaggaatgttcaaatgagtctaccatgagcaagggatcagaggtcctagtggcactatctgttcattcatttttggtacaaccccagccagtcattgagaaggtacactgtgtaagaaaccatcactccagacttacccaaggtatttattgctagatctcaccaagcactgtcaaattcaaaggaggccctgtagtagaccctgggctgtccttacagggccaaaatgcagtgactcaggagcctaatagcacccggtccctccaaaacatgccttctaccaattccattaacagagacaggtgtcagtggaaggggtgggtctcctgtccagaccaccccggcccgggagcagcctgggggatctaggtgggtccttccagagaggcaagtgagaacaactgaaccaagcctcagctattagatttggaatattcacacacttgacactccagagtcagaacagccccttccctttcccttcctcctggaatcagatagggttgaaatccttttaacaccatttggttatcagctcacaacctgaaggtttgcaagtttaggaaaagtgacatgcctctgagcacagggtgctttactccttctgtgcttggaggcttacccaactgaaaggagatggagggcaggagaggccgatgcctagcgtgcctgctgcttacaggggtggtgtcacaggtcaccattattcattaaaattttacttttttgatcccctaccacatgctcaacatggtattgagtcctcaagaatataaaaagaaaatacaacaggaaccagtagtcattaactgtttgttctggactttaataaaagtacagagggtcttggagtacaaaggcaaagacatttagctgtgtatagaatgggtgggggaatgtgttccatggtttggcattcagttgagcaacattcctgagagaaatcaactagcccccttatagagaagaggaaactgagatttaaaaagtggtcctggccgggtgtagtggctcacgcctgtaatcccagcactttgggaggccaagacaggtgaatcacgaggtcaggagttcaagaccagcctgaccaacatggtgaaaccccatctctactaaaaatacaaaaatgtgccagggatggtggcgagtgcctgtaatcccagctactcaggacactgaggcaagagaaccacttgaacctggcaggtggaggttgcagggggccgagatgatgccactgcactccagcctgggcaacagagcaagactccatctcaaaaaaaaaaaaaaaaaaaaagataaattaataataaaaaaataaaaaagtaatcctgacttcaagtcatttttttcagaagaaaggattcttgctcactccagggaaatagtccagaaatggaaaatgttgacatcacaaatcacaaaagaaggtgaaaaatatcagagaccctctccagaatgtcatttctcagaaatattaagaaatagagaatcttcccagaggtcgcatgtcagggcaggtcacttaacttgtgggccacagagaccctgaccttccygtgggaaggcttcatggaggaattgccataaagctggggcacgcacgaatggcagtagtgtcaccagagcagggcattctgaacaagggaagcttgagacatgaagacagtggtcacggggagaggctgggggtagagggtagaggtaggcaagagatttgtctgagtggcatgtcaaatgtgttaaactcaatgagaagctactgctttccaaggctggagtgttggaagcttacttagcaggcacccatgtgaatttggctcctgtgcaggtgtatctgttgcataaaaatagctatcatttgttgcacacctgccatgtgcttggtattttaaatatattgcttctaacctatataacaaccctaggaagtagaaaatgggctactaattttacagaaaaataaactcagaaattaaagggcttgcccatgttgatagagccattacttcttacaaatgaaattttgtctccgatgtctctgctccttttcagtccatctatttgtgggtaagtggaggaagatataaagcatatgcatctgtctattaggcagagcctgtaagggaaattatgggcatctaggatttggagttggacagttagggtgatatcaagattaccttcaagcaaagcagtggctgggatttgatgcaacagggacgtgataaaacatgctcctaaccggcagcagctcatttcggaagactgagcctgagttaaaggccagagcaacataacagagttctccaaacagcacacagtgagagaaggccaaagctaaagaggacatcatcggatttagctgcttcactaaagtgttttgatgtagaaaatgaccttggtgctttagttatccctgatgtcaagacctttactctattttgcccaaatttctcagttagataacagcaaagagagagagccagaagacctgggtgtgcatcctagctgtaccaatcactgaccatgggatcttagattcagactctgagaacctccatttccttctccataaaaatgggcagatatgtactgtactctgttgggggaaaactccaactcaatgagataaagtaggtaaaaactataaacccagtgcatatgttacttagtggttaaaaacatttgggactttaggagacagaccaaaactggttttgaaccagtcggcagaaatgcgctgccttttttcctcctctgcttcccagctatgtgactgtagctatttctgttaatgctccatccagagctcatttaccagggaagtgctctcaaccccagctgccacaaagattgtcttctgtactattttctgaaggatttctcttagttggcaggagttttcttacctgaagatgcctgagaaatgttgtccaccccactcccctgctttcctagggttagggcatgactaatgattgactgacccatgtgggatggggcatgggggtagtagggtaacagtccaccctcattgcctccaggcaggacaacctctggtgcaactcatgctcagagctcctcgtgagatcaggctgaggctagacttctcctgaaactgtacttttacttatttcttccgaaacttcatccttttcccacattaccttactcatttcttctgctaccctattctcagtaaatgtgtttcccaagaaaacaggaatcccccctcagactttgcttctagaccatccactctaaagtcttaaccttgcatgcatgttttcttctctctgtattttacatgtataacgtgatcaacccacggagttattagaattcttccaattaaatgagatatagcagagaatgagtctattttattggctagcaaatagcaaagtgttaaattcaataatggctgaaattgttaccaagtagtaggctcttttattagcttatcggactaccaaaatagtataatgcatcaatatcaaacttaaatttcaacttcataaaacaattctgggcccaacaaatatgaaggtattgctccatcttatgtagcaacatcttgtatttctattgtttgataaatattccacttagaactaatacatggatgtctctttcttttgattgcaaccctctggcacttaacacagtgcctggtacatggtaagtaaggagtattaatacttgtttgtggattgaagggtaactctagactagttgtcagttttacgcgaaagccccttctaccacatcgcagcctcatgatctggcccgcctcctggaagtagcctttctggcccagacactggtaggtactttaaaataagctgttttatgtaatcttcacaaacctcaggggaaataatcaattcaagcttcctgtgtttgtttaccattagatccacatcaaatagtaaccatacttgacataggagctataaatatttattaatcgaacagatcaccctaatacccaagctcttttcactatgccttactatatgacctcttcttgaatactgaaccaatgaatagttctccaaggtaacccattatatctccaaactggctattgaaattcatacttactgtacctcgacctacatcccccagctttctctcatgcatctgagttctaccacacagtgccataatgaacaggtctaataccactttctcatgttggcatactgaaaagagcgctgacctcagattctgaagacatgaatttagaagtttatctcagcctttttcacagctatgtgaccttgggcaatttccttaacttctctgaacttccagtacctttctgtaaaatagggataattataccttcttcacagagattctatgaacaatttatggaaaatggacaatggacatataagagatcacaatttcataaactctccaaatatgtaaaagtgagtctttctaattcctagttagctctcatggctggtatcatcttcgacagaaagtaaaggaataacactcatgtgtttattaaaacctaggtattatatcatttaaccttcatatcaacctatgagacaaatgctactgtttcgcttcttttatatatggatggggaaccaaagcacagagacattaagtaatttgcctaaggtcacatggctagtaaatagtagagccagatttatctcctgcgtgttctcttcataaataaaatgctttacctctaggttataatgctgtcaatgcaaaagagaatctcttctacaacatgtttgttcataaaaagagctagaacacaaagaaggcaaag

SEQ ID NO: 95815 - DNA, 82222 bp, Homo sapiens
  misc_feature (1)...(82222): n = A,T,C or G
ttcctagatgggatggcggccgggcagagacgctcctcacttcccagactgggcagccgggcagaggggctcctcacatcccagacgatgggcagccaggcagagacgctcctcacttcccagacggggtggcagtcgggctgaggctacaatctcggcactttgggaggccaaggcgggcggctgggaggtggaggttgtagctagcgagatcacgccactgcactccagcctgggcaccattgagcactgagtgaacaagactccgtctgccatcccggcacctcgggaggccgaggctggcggatcactcgcggttaggagctggagaccagcccggccaacacagcgaaaccccgtctccaccaaaaaaatacgagaaccagtcaggcgtggcggcgcgcgcctgcaatcgcaggcactcggcaggctgaggcgggagaatcaggcagggaggttgcagtgagccgagatggcggcagtacagtccagcttcggctcggcatcagagggagaccgtggaaagagagggagagggagaccgtggggagagggagagggagaccgtgggggggggagggggagggggagggcgagggctttttttgtttgttttttttgaaatggggtctcactatgttgcccaggctggtctcaaactcctgggatcaaaagcaatactctcacatcatcagcctcctgagtagctggaattacatgcatgtgccactgcacctggcagggatagcttctttcctgcctccgttctggaaaataccatggactgctaaggctgggcctgcctgaatctgttttggcctctggaatccagcccccagcacattgccttgacccttcctcttggcttgctgccttctccagggctgagaataggaagcaacatgctctctctgagcttggtacttcttcacaagtccctttagagaggacactgtttgccagacaatggggttttctcacagggcaggctccgcaggcctttgttaggaggacttcctttaagggcagctggagctggaagacaacccgggccaggggctggccggctgttagggtactgagctcagagctgactgctaggagggacctggggcctggggatggagctgtgggtgtgaagggacacggtggattggaacaggagactgactgagatagagaagatgaggctggagcaaagactggagtcaagataggatgaggtcaggagctggggcagtattagaggaacaagcccgggactgggagaaggcttgagggtcagaactggtcctgggggggcatgtcacacactgctcaggagcccaggcatcagacacaggcagcccgggttccatccctccttcttccctggctatctgggtggtcttcatctcagcccctacttccctcatcttcaatcccctcaccttcgctccactgaacaccctatttaatgccacagtctgctccgctttggtgctcctgtcccccttatctgctccaactccttatccatactcttattgtctttttaaatttttttatttatttatttgtttatttttaagacaacagagtctcgctctgtcacccaggctggagtgcagtggcagaatctcagctcactgcaacctccacctcctgagttcaagcaattctcctgcctcagactcccgagtagctgggactacaggggcgcgccaccatgcccagctaatttttttgtatttttagtagagacagggtttcaccatgttagccaggatgatctggatctcttgacctcgtgatccgcccacctcggtctccaaaagtgctgggattacaggcgtgaacaccctcgcccggcctatttatttatttatttatttatttagagacagagtctccctctgttgcccaggctggagtgtagtggcaccatctcggctcactgcaacctctgcctcccaggttcaagtgattctcccgcctcagcctcctgagtagctgggaatataggtgtgcaccaccaaccccagctaatttttttttttttttttggtatttttagtagatacggggtttctctacgttggccaggctggtctcgaactcctgacctcaagtgatctgcgcaccttggcctcccaaagtactgggattacaggcgtgtgccactgtgcccggcccctgttatcttactaacttacttattaatgtttgttgtttattatctaccttcccaactaaagtgtcagttccgtgaggataaacattctgttttgttcactggtatgtccagttcctagaagggtgcctgctgcagagcaggcatccaataaacatttgttgaatgaataaggttgccaagtctgcctgggataacagcctgctcactggaaaggtgacgatgacaacagtgatggtgctttggtgttgcagggaggagcaagttaaatctcacctataaagatctttccatcaggctgcagacacagagggagtccccagcaacaatagctcatatatgcttcagtttcctcatccgtgaagagagaataaaagtccctacttttattagcgtccaattgccctggccacggcagcattgtcggtttaatgatgctgcttcggctgtcgtagtctcttccacctcatgccttttggttcattttttaactgagttaaaggtggggctgtaggtggcactgggaatcaaatggctgaacttgtgctcaggcctgggcttgagataaaatgacccctttagtccaagcatcaaaacagaccaaggtttcaggcccccttgcctttaaatagatttcagggattattttctccagccctagaccacagctgactcctcaccgcctctccacgaacagacctcagagttttgttttctctgtctctctcctttctttctcctttatctctgtctactgaggtcctggctgtccccctgccccaccctaccctatgctcttgggcttctggcctcatctctaacttagcttctaattttttctcttcttttcctttctttttttgaaacagagtctcactctgtcacccaggctggagtgtagtggcgtgatctcagctcactgcaacctctgcctccagggttcaagcgtttctcgtgcctcagcctcccaagtagctgggactacaggtgtgcgtcaccttgctcggctaatttttatgttttcagtagagacggggtttcaccgtgttggccaggctggtctcaaactccggacctcaggtgatccacctgcctagcctcccaaagtgctgggattacaggcatgagccaccacgcccggcctaacttagcttctaattctaatgcctggtgaacctcttaaatttttttttcccaagacaaagtctcactctgttggccaggctggagtgcaggggtgtgatcatagctcactgcagactctaactcctggacacaagagaccctcccatcttggcctcccaaagtgctgggattacaggcgtgagccaccatgcctggcctgcctagtgaacttgaaggtctagcttgcggcacaggctcatggcatgcacttaacagatacggaataaatggatgaatggaaaaagccctggactgggaatagtaaacctggtaaccaaacccagctctgaccctgacctgtaagtaactactatctctggccttggtgtaccccatgtatagtggggattgtaaacacctgccctgcccaccttatgatactgctgtgagactcaaaagacatcattagctcttaggcacagggagcttggaggttaaatccaatttgcttagttttcaacaaggaagtggtgccccagggacaatgatggagagaaatcgaatgtaatgagctgttgccaccagctgagtggtcctgaaatcatggcatctgggttgcacttagagattgtccagttcaaaaggccagaaggaatctgaacctcgatgggaaaagtgacttgctcagctccccagcaagccagggcagagctggaggatggactggagtctcctggttccaggtccaggacttctttccgctgtgttgacagagccaggaggaggggcacccggggagcaggggaggcaagggctgctggatgccccatctcagttgaattctccttgagggacccagcccaggagcagagtaagagggtttgagggtggaaggtggcagggctggccaagcagtatagtccctgctgctgataaccaatccctgaaatcccgaggtggagggacttgagggcaaatcacagacatgggggacctaatgctggccatgtggctcaaccagaagtgcccgtccctcatagctttggggagatcagaagtcagggatagggtcgggtgtggtggctcatgcctgtaatcccatcactttgggataaggaggcagggggatcacttgagcttaggagttcgagaccagcctgagcaacatagcaaaaccctgttctttacaaaaaaatacaaaaattagccgggcgtggtggtgcacacctgtagtcctggctgctggggaggctgaggtgggaagatcacttgagcccgggaggtcgaggctgcagtgagctgacatcatgctactgcattccagcctaggcaatagagtgggaccctgtctcaaaaaaaaaaaaaaaaaaaagtcaggggtgctggccccatgataggtgcaatgggtgcctccaattccctctggctctgcctcccagcctctgtccaagcaacaggcagattttccatgcctggggacttgcccctggctcactgatgatgataccatcttaagtctcctggaatccttaaacccttccttggcatttgtgagcaagtattgagcccctcccatgttttaggcccagtgctgggtgctttcacctgcaatttcttacagaggatggtatttcctaaactccattcatttgctacctccatgatttttgccatatcacccaacccatgaaatacataaataaatagtatttactcaatattttgactcacttttaaaaaacataaacttatctgaaaagggaacctatgtcacgcctctaaataaacagtatcaaccaaaaatacaaaagaaacaaaaataaatacaaagacattcttggtttctggcaccaggccccagttctggctccaaccttactgagaagtcacatgatctctctgggcctcagttttctcctctggaaaatggagcttttggaagttaatgcatgcacagtgcctggccctgagactggcatggagtgagtggaagagaggttgcctgacctggctaaaattggttctctgggcagacattttcccaagggccactgagaagaccctcctgttaggagtcagtgagctctgtcgctggaggcattcaaacagagcctgcggacttctcactgcgaagttgcccagagaattcagtgctcagaggaaagggagtggttattccatcagagctggttccccaggagcgggagcagggcctgtagcacccagcctctgtccctggctcccgtctatccgggattttagcgtttcctctgtagttttcaagcactgtctcatatgactctcgcaccagcgagaggccaggggagatggtgtctgcctgttaaagaggggcaggctggtccacataggtcaagtgacttggccaaggtcaccagagcagagttttgaacttgagctgtctgactcaactgcctgggaagtgcctgcccctcctctggcatccagggagcatgtcctggggctctggctgggacatagccggacacctgcgggccctttacgtctctaaagagagaaagagggaagggcccctgtctagggggtggtttccctccagatgccacccctccgaggtccccttctgcttcttcttgcggtagccagggaggcagcccacgggcagggaagcgggggtgggggtgcagagtcagaggtgcacgtggacagagacagagagacagggacacgtgggcagagacggataaagacagagacccagagaaagccagatatgttgacagacacagagacagacgccagagaggaaggcagacaaagagacgggtggagacaaagactcccaccaagagacgcagaaggaagatgccgacggtaaagacaaaacaggagacgcgcgcaaggagcaggtcagagcccaggctcgctgagagaggaagggctgggctggggcagcccggaggcagagagaccgagagtgcggggcgggcgagggacgccagggccgcgtcaccccagcccgttcctagctccgctcccggcagggggcgccctggcctcgtggcacgaccggcccgcggggcgcggggctcgggccgggggcggggccggggccgggctggggaggggttggggccgggggcgggggagggggcgggctgcccggnnnnnnnnnnnnnnnnnnnnnnnnnnnnnnnnnnnnnnnnnnnnnnnnnnnnnnnnnnnnnnnnnnnnnnnnnnnnnnnnnnnnnnnnnnnnnnnnnnnnnnnnnnnnnnnnnnnnnnnnnnnnnnnnnnnnnnnnnnnnnnnnnnnnnnnnnnnnnnnnnnnnnnnnnnnnnnnnnnnnnnnnnnnnnnnnnnnnnnnnnnnnnnnnnnnnnnnnnnnnnnnnnnnnnnnnnnnnnnnnnnnnnnnnnnnnnnnnnnnnnnnnnnnnnnnnnnnnnnnnnnnnnnnnnnnnnnnnnnnnnnnnnnnnnnnnnnnnnnnnnnnnnnnnnnnnnnnnnnnnnnnnnnnnnnnnnnnnnnnnnnnnnnnnnnnnnnnnnnnnnnnnnnnnnnnnnnnnnnnnnnnnnnnnnnnnnnnnnnnnnnnnnnnnnnnnnnnnnnnnnnnnnnnnnnnnnnnnnnnnnnnnnnnnnnnnnnnnnnnnnnnnnnnnnnnnnnnnnnnnnnnnnnnnnnnnnnnnnnnnnnnnnnnnnnnnnnnnnnnnnnnnnnnnnnnnnnnnnnnnnnnnnnnnnnnnnnnnnnnnnnnnnnnnnnnnngcggcagggggagccccgcgcccccacgcacacccaggcccccggcgcccggagcccggccccggggccgggaaccgcgaccggacgggggaggggtagggcccgggggcggggggggggcgggctgcccgggcctcactcgggccccgcggccgcctttataaggcggcgggggtggtggcccgggccgcgttgcgctcccgccactccgcgcccgctatcctggctccgtgctcccacgcgcttgtgcctggacggaccctcgccagtgctctgcgcaggtaaggattcgacgctgccccgcgccctggttccccagggccccagcggacgtggtccatccccttctgcatcctccgctggccccgtggttgaactttaatggcagggccggggtctccagcgccacgccgcccacagcagcccattcgggacgccctgcaattggtcctgcccctgtcctcccgcgcatcccaagctcccggcgcgcgctctgggcgggacaggagattggacgtggcgcccgcggagccggcgaactcaggggaccgcgctcgggaccgccctgcagtcccagggtctcctacctcccgagccgctgcctgggaccctgcgctctgtctgggcacctgcccttggtgccccgtgactgagcccctcctggtgcctccttagccgtagctctagagacctgggctgccaaccccaaggcctcgtggcctggcgccctcccaggcgtcccacctgacccggtggggtctaaagcagtttggtttgggaggaggagagggcaggaggcgcttggaatggggggcgtggcgggaggagacagaggacacccgcgtgggtgtcaaagtgtgggcacccactgtgggcaccgcagctgtggggcaaagctctggagcccgcgaagccgaaggagcctgccgccccctttaggctttgcgaggtgggcctcccagggctgcttccctgcccagtcttggtaagaaagggttaaacgcaggtctcagcagaaaggcaggaggccgaggaaagcctcccccactccccattgtgccttatgactctttttcaacacataatggggtcgaaggcggggcctttacaaaggcctctgggtggagggtgaaattccttgagatcaaaagagggggcgattcttgggccaggaagggctttgggccctgggaaaaagtcagaccgctcaggtgggcccagctgcccagggaggcaggggttgggtcccagcctcagtgtagatactgcaactgttttttgaaggcctaccgtgcgtagagggacctgctctgacatctcatgtacatcatttcattttacaaatggggaaactgaggcttagacaatttaagtaagtggtgggaccagggtttgaatccagactccaaactctgcagccctagcgtcctgctcccactgtgttgcctaagagatagggggctgagccttggttttgtcttccggctcctcctgggctcagcccgctcttcctccactctccagtcttgctctttccaactgtttagtcctccccacctgtgggtgtccccacgctgtcctgccccagccatcccactccctggccccatgcatcttgttcctgtgtcacctttttctttctttaactgaatacctgtgaattccctcagaagaggcccctggacacagcttctcaacatcccaactggtgaagactaggctgagtgatgatcccggtccatgtgcccatttgtaaaaaggggtgtattcccctttcgggactattgtgaggaataaaactgaactgaggccagaacaagatgctatcttcattcagcaaatacttaagcatccgccgtgtgccaagctctgttctaggtgccgggaatgccacagtaaatcagccaaaagccctcttctggattggatgtttgcataacaaaattctttcaggctttgaaactgtcagaattcacagtgtagacttgaaatcaagctattcataaggaaggagattaagacgcaatcacctgtaaaatggattggccaacctttggccctcactttagcaaaggcagccttgctgtgggacctgggatcagttctgttccctctctgtgcctcggcctcctcccataagctgtggagatcaatagtgcctaccagtggtgaggtctagatatgatgaatgcttgcgaagggtttaagctggtacctgtgcttaagaaaatcctggctatcctcagctctcttctcagcagaaaatgcaatgcggagactggaagttgggttatgtgcctaccctgcctctgaacctgttacccacttctgcccaggcccttcccatcctgttgggctacacatgtggggtggcatggtgccctctttgctcacactcagatgccaccttctgtcgccatcctaaacacagcctgggctgggagcgcagagctccatgatgagatcagccctggagccatcatctctgcagcgcttcctgccctctgcctgttcttgtgcctcaccgtgtcctagctcaggaccaaactcagccctgttctgtcccatgacttacatacccaacattccctgcaagctggatatgatcttggaaaggggaagtgagttgcccagaggcacacagatgctacctgaggagctggggctggagcctgcgtatctagaattccaaatctagcaatctccatgctgtacccatctctgggcatatgaggccttttaatccagggagtaggatccagtagcagagcccgagttctcaccttgaaatcagtctgacttggctttttaatacaaaacccagagctctgagagaacattgctgggagagtgagcaagctgggctgagaaccagcactcagaaatctccatgtggccacaggaatgctgacttggcttcccagcaccatgtcgtcgtccttggcaggctggagctgggctttgtggtatgttagatttgttttttttcttctggagatgtcctcactttcagagggcagttaggggcagtagactgaaggttcattcccagcactgccatgcgaccctggacaagtcaccttccctttcgaagcctcagttttctcatctgcaatatgggttaaaattatatactttgcagggtcgcaagatcataaatggttttccaactttgggctgaaccagcattgatgttattaagacattcatatttcctgtggagcaatttcaaaagcagttaactttatccctaccaggtgatcctgagggcctgagggaagtccacgtttaggtcacaaaagcctacacagcagggaaaacactggtttgggggctggtgtcttggattccaatcgccagctgtgtgacctgaggcaagtcactttacctctctgagtgtcaagctcataggaggcccccaacatcaagatatgatgctcagtgtctgaagaacatagtctccgtatttttctgcctccttgtaccagctcccaacccccccgccaacacttcgttaattgctcccagaaaaactctatgcttaaagttttccatgcttaaattctcagcckcactgtggcatgaaatcaattgtttgcattgaatttgacttctcaaattaaggggtaaaatttgagatgagagtagggggttagggaggagatgaggacgaagttaaaccagatgtgcttttgtttaattgtaggatggtggttaagctgctcaagtattaccatcgttctttctgaattccagtaaccaggagtcaggtttcacaaaaagtcgtagtgttctttcctggctggtgtggactcgccctctctattattattattattattattattactattttgtattcatctgaggccacagagtactggccagagaggagacatagatccccagaatttcagttggaaggcctttagaagctggctcggtcaactgggctcttggygcaccagggagactgaggcccagagaggagaagaggcttrcccagggtcacacaattgcttagggcagagtggactgggaattcagtctcctggccttaagctacatgatctttccaaaggcaaccactctcctgaatttggtgtgtttcatttctacagtatattcttagcatatctgttttttgaaaatcattgtttaagggaggatgcagatgatgtgggttggtggaaaaagatattaagctcaggagagctgagctgaagtccttgaatacctctgtgaccttgggcaagtcacttcccctgtctgagtctcagattcttcatctgtaaaccaatatatctgaggagtaggagtggagagatgagacttccctaagacttggaatgggtctaatgtattcaactggtcctcagatatttatagcctgctgtgtrctgggttatgggagatccatcacaaactgccttcctaaggctgcagggggtgggggattgttgacttttgcggtgattaaacaactttwatttagttgctggtgtttttaaaccaggcaatttcattttatataaagataaggatttctggcttctcttgaaagatcagaagatgtggccatatggggctatgtccctgcctggccacagtggctggagctgattagcagctgctccatccactttaccacagtctccaccacgccccactgcctcacacttgcccacctgcctccctgacattacctacctaccttctgagcttgcggtttctgggctagatgcagtgaggccatgtaagaggggctyaaattccacttgaatgattgtgtggggcttgggccagccctcagggggctcagggtgagaatatgggacacgtggacactagcccctcttccatagcctggcaacatctacaaaacatgtcagctaggcgaaggagcttttttcctgcttyggtggtcctcaggaagagtctgagggctctggaggtttgggggtgatagagcatctacckgtcaaggctcagcgagttgagcccagggtctagctggggacaggcatcgctgggtacttcattctaaagattgcacagcccctgcagggaagagactcccttgacagcttccaccttaccccttgctccccaagagccctgtgcattggtgcgccacttcaccctgtgctccctaayagccctgtgcatcagtgcataaccacttctcagacaggaaacacgatcttgcactctgaacccacagctctctgttccaccccctttgctgggagccagggcctggtgatgacaggcaggtaccatggtggctgcagcaagcatcttagaatcgccatgtctgagccagagggtagcacaggaggctgtgaagcctgatggttacatgcggggggctctggaggcagctgctgtgatgtgagattctaggtctccacgaatcaactgctccaggggttatgagatggacaagggagactgattgattgtcgattgctgatactaacctcacatcccctggtccttacacctgcagacgacttcagaaatgtgccctgtgtgggaagtggcattttgtgagcaccattgggtaccaggcactttcgcacattacctttgatactcacctaccccctacyctccagcattttgcagttmaggagactgaggctcagagggcagacaccttaggattactcctcccctaggtctctatgcctctctgctttgacccagggaagggaggagaggacaggctggaaggtcatttctggaaataaggccgtggagaccctgtagtgaggccctgaccctccagactttctaagccaccccctcctcctccactccagcttgtttcagagatgcttcttcatccttccagagctcagtttgtcattcaggtgcatgaactttacctggccaggtctgcaaactgctgggcagagctcagcaaatattttatgttctttaaaaaagtttttaggtggcygaagcaaattgcttttactggaaaaaccagaagtgtgacctttattttatttttgcagagatggggccctgctatgttgctcagcctgggttcaagaagtctacccaccttggccccygaaagtgctgagattataggcatgaaccattgtgcctggcccacaagtgcaccctttaaaaagatctaccaggtgacccttttttagactgagtatcgctctgttccccaggctggagtgcagtggcgtgatctcggctcactacaacctccgcctccygggttccagagattctcctgcctcagcctcccatgtagctgggattacaggcacatgccaccacacccagctaatttttgtatttttagtagagacatggttttgccatgtcggccaggttgatcttgaactcctgacctcaggtgatccaccctcctcggcctcgcaaagtgctgggattacaggcatgggccaccacacctggccccagtgactttttgttgggtcaacctcttgccttctttagtgcacctttactaggtcagtaaagccacagggtgggtaccacttagctctcaggctgacgttctcaggcctcttgctggctgtcactgaagtgtctcaggcttgttgtttttttgtttgtttgtctgttttgtttgtttgttttgttgttgttgttttttgagacagggtctagtggctctgttgcccaggctggagtgcagtggcacgatcatggctcactacagtgcagccttgacttcctggactcaagcaatcctcctaccccaacctctcaagtagctgggaccacaggcattcgccaccacgccccgctaattttttttattacttgtagtgatgaggtcttgcaatgttgcccaggctggtttcgaactcctgggctcaagtgatcctcccacctcatcctcccaaagtgctgggattacaggtgtgagccactgcatctggccagcctggccttttggaggatctcatccccctccacctgtctccacctgtctccaccttgacttacctgtctctcagcatacaggagttactaactgacccgtctgccgccattctggtgagaaaatgtctcatctgaggcccatttcccctcctccactccttctgagcccttctatagctcctcttctttctctgcctcattcygctggtccctgccatgccactactaactaaaagtccatagactataagcccaacatgcacgtactaggcatggtgctcagtgccttgcctgtaattactatttggtcctacagcagcgctgggtggcaggtgctattatccccacattacagatgaggaaacggaaacacaaactcccccagctgggaagtgagaagtagacatgtttgttccctgyggtgacccatccatccattcaaggctactgctttctccgtaatgcaaatgacataacccatcttcctagaagagtcagttccctatttatcttaaaaccatccaatatagaaattcatattctaggtctgttagcctatcaagatatcagagataagcaggtttcctctcaacagcttgtccaagcccttaatcacctaagtgatttttttgtgtgtgaaaatgctgtttttttgcttttccccatgacctaatccttatacagatgctccttgatttaccaaaggtttttgtcctggaattgtaagttgaaaaatatcataagtagaaaatggttataacacctaacctgtcaaacatggtagcttagcctgacttaccctaaatgtgttcagaacagttacattagcctatagttgggcaaatcatctaacacgaggcctatttcataataaagtgttgactatctcatgtcaatttcttggctatactgtattgaatgtgaaaaacagaatggctggttgggtactcgaggtgtggtttccactgaacactgtagcttttgcatcatcgtaaagaaaaaaatcttaagtgtaagttggggacagtctgtaatgaacatttaagggcttactctgtgtcagaaactgagctaatcactttgaatgaccttattgtattgagctcataattctttccattttgcaaacaaggaaacggaagctcagagagattgagtaatgttctcaaagtttggaaagtgcaggtgagactcaaatccagggttgcccaatcagattggcatctggattcaaatttgcatgtttggagaagagctctcagggcaccttgtggtacacatttgtttttcagtgagtgtttgcaaatgacatgggggtgggaggccccagggggaggagacagaacatagacacacctggtggggcaccagcgtctgttctcccagacagtgtttcttagcctgttcaccccctcataggaaatgacaagcctagaaggaagcatcctgagaaacccagaggggcctgggtttgaatcccagccctgccatttcaagctgtgtgaccttcgccaagtccctttccctctcttagcttctggctaccctccctaccacgcatggtttatttgaatgaggcaaggccttaggatttttcgatttgtggatggcgaatagccagcrtgtctccttcctctctcctgccctgcacccacatcagacatcactagtcaaccactgcttgctttccttcccagattccttctaagtacagtgctccagacagccattagcaactaatatagagttggcacacaagataaaaggacatcccagaaccagattagatttggtcattgtgtgggtgggggtagggaagggataggcccaggtggcacccagttcagtgtcacggtgctccttggtcttcttttccttgtctttggaggaactaagctagactgtaccagggcccaccccaggtgtggggtaggaaccttttatgaggcacagagctgtgcccgtgttcagtcccaagggagaggcaggtttctgggcctcatcactgtctaggcttaaagtaagagtgacgagaaagaggctggtttcaggtcctcctggaaagagttaggcctgcccctctccaccctttgtaataacatccatagtagtaataagagttctcgacactgacggaccacttgttacgcaccaagccactctgcgaaatgctttgtatacatttacacatttaatccttataccagcccatttttcaggtgaggagaatgactcagagtaattagcctgggtttgcccagctggtaagtgtcggagctacgatttgaattcatatctgtcaaaccccgaataaataactcttattactacgatggatattattacaaaggatggggaggggccagcctaactctttccaggaggacctgaaactgagctctttcttttttttatggtattcagaacatcactttataaactgttgtcagattaccatttaaacattaatacccaaatacagaatttagacaattactttaaattgtaactgtaccatccccaagctctcagctatgaatttggtttggggagagggctccgtaataggccactgaagtcccccgtcccaccccttttttctcccctgaaaactagctgcctgactgctctgccagacttgggctagaacttggcttcactgtgacagtgggaccacctgggccctacagtgtggcaaaaccgacccgcccacaaactccatcccaggtgttgagatgctaacacactgaagctgaaagaccccacttggttttgccacagatcaagttgcatctgactagagagcctgtcctctaccctatttcctgcacaagtctttttctttgtaatgcaacaagcgctactcagctcagatycagtgggacacagggaaaggggctgtagtgtagcccagccttgctgagggagacccctgcctcgccaaagcacttcgctcacaaaggctgaaactggcctctttctcgtcactcttactttaagcctaggcagtgatgaggcccagaaacctgcctctcccttgggactgaacatgggcacagctctgtgcctcataaaaggttcctaccccacacctggggygggccctggtacagtctagcttagttcctcctgctttcctccaccgcaggctcagtgcggggcccgcggcctctgcgtctttctctcagcttaccatgatcatttctcattgatgagtgcgatacgtctttgcccgtggaaagtgctttaccatcggcagagccttccacgtttacacatgcgcagcacagcaaagggcatctctttttaaaagggagaaaactgaagctcagaggctgggcacaagggctcacgcatgtaatcccagcactttgggaggccaaggcgggcagatcacttaaggtcaggagttcaagaacagcctggccaacatggtgaaaccctatctgtactaagaatacaaaaactagctgggcgtggtggtgtatgcctgtaattccagctatgtgggaggctgaggcatgagaatcacttgaatccgggaggcggaggttgcagtgagcagagatcgtgccactgcactccaacctgagtgacagagtgagactgcatttcaagaaaacaaaaagaagattgaggctcagggagggagggtggtgggccccggaccacacagcgaataaacggtaaaccctgcaccaaggaattaggtaccccacctgttccctaggccttctggaacaaattgcctaggggaacctgaggtcagtgctgggaacgcaggagtggtggctcagcagaggcaggggttgtgctgccccccgcatcccacccagatacaccctatcctgttttaatcagccattgaccttggacaagtcactttaacactgccaacctcagtttccaggcacttattctatttttcaggttttttttgttgttgttgtttgtttgttttttgagacaaggtcttgccctgtcacccaggctggagttcaggcacgatcatagttgactgcggccttgacttcctgggctcaagtgatctcctgcctcagcctcccgagtagctggaactgcaggcttgtgccaccatgcccagctaattttttttattttttattttgtgagatgaggtcttgcttatgttgatgaggctggtcttgaactcctgggctcaggcaatcctcccacctcagcttcccaaaatgttgggattaacaggcggtgagccaccaggcctggcatatttttcagtttttaaagccatttcttttttctctttttttttttttttttttgagayggagtctcgccctgtcgcccaggatggagtgcagtggcttgatcttggctcactgcagcctcccaggttcaagtgattctcctgcctcagcctctggagtagctgggactacaggggtgtgccaccacgcccggctaattttttgtacttatagtagacacggggtttcaccgtgttagccaggatgttctcgatctcctgaccttgtgatccgcccaccttagccttccaaagtgctgggagccacggtgcccggccgaaagccatttcttattcatgaactcaccgaaccatcaaagcaacccaataaagtattcacatcattttgcaaagtgggagactgaggcttggggaggcaagcaacttgcctgaggtaaaattgatggtaaaaccaggcctcaaactcaggtcaggatcccaggctgaaggtctttccccagctgtgtctccagtctctctcatcgttgcctttgtacctgccatcccctcccctgcagcaacctctccctgtttgtgttgccagttggcatcatggctgtttttctagagcttgctttggatatcytgaaccctttgtaatctgatcatccacatagcatctggctctgagtttcagttcctggagggtaggagccccatctgagtcactcgtgaattcccatgcctaataagatgcctgctttcagcaagcgtttaatgacttttttttttttgagacggagtctgctctgtcgcccaggctgtagtacaacggcgcgatctcggctcactgcaacctgcgcctcccgggttcaagcgattctcctgccttggcctcctgagtagctgggattacaggtgcctgacagcacgcctggctaatttttgtatttttaggagagacagggtttcatcatgttggccaggctggtctcaaactcctgacctcaggtgatccacttgccttggcctcccaaagtgctgggattacaacagcccatttaatgacttttgagttcatgaaaggctgccccactcggcaagggtttccacagctggcctggctttgttaccatggggaagcctgggagggatgccccactgggtgtgactcttgagccactcaatgcgaagcctggccaccctccccagaccttcactggtgtccttgcacgaatgccaccagctcataaatggttagtgattggcagcaggacaagccagtgtctctgggtccagttttcctgttggcagttcaggcctttagtctcactcaggtatgaggtgcccagtgtcatacctctggccaatgtctttgtccattttgttcacagatgtacccccaatcccaaacagccttaatttctttaataataataatagtcatagctgtaaatttgctgaatctgcatgtaccatgcttcctggtgcatagtaggcacttaatacatatttgttgaatgaatgaatactcgcagcgagttaacatttcttagagactgagagtccctaagtgaaaggtcacttgcatgacctctgtgcctcagtttcatgtgtcgactccgtgagaggtactcagaggagtaaccaatacatatgtccatttttttttttttttttgagatggagtctcgctctgtcgcccaggctggagtgcagtggcgcaatctcggctcactacaagctccacctcctgggttcacgccattctcctgcctcaacctccccagtagctgggactacaggcacacaccaccacgcccagctaatttttgttgtattttttagtagagacagggtttcaccatgttagccaggatggtctccatctcctgacttcatgatccgcccgccttggcctcccaaagtgctgggattacaggcgtgagccactgcacccggccaggtttgtttaaaatatatcatgaaccaggctgtgttctaagcagctcacatgtattttttcatttatccttgcacctgaggctcagagagattawgttcatgtctcctaggtcacctggttggtgtcacgtgcaaatattttaatatctcccaggacatgtgtgttccaaataacataatatgggaaccacctcccctaccagcctcctcccataacacacacctcacgccccagatcctaggcttagaacaaacgggaacagtagtaggcgagtcaagcggtcatgttgtccctgactataaaatgcctcatccagtgtcgggcacacaataggtcttctgatcaccatctgtgggataggcgccaatcatgatctgagcagaagctggcaggagggagccccgaatctgctggaggaaactcggtgctggggggactttagagaagaaatgacagcggtcatraatcattgtaacagtaacagctcatattaactgagtggcaggcactgttcaagcaagtcagatacattaatcatttaatcctcatatcagccctaggaggtagatattattgtcattgtccccactcacggatggggagccaggctcagaaataagctcatttgggctgggcgcagtggcccctgcctgtaatcccagcactttgggaggccgaggtgggtggatcacctgaggtcaggagtttgagaccagcatggccaacatgatgaaaccctatctttactaaaaatacaaaacattatagccagatgtggtggcaggtgcctgtaatccctcaagattacaggtactcaggaggatgagacaggagaatcacttgaacccgggaggcggaggttgcagccagctgagattgtcccactgtactccagactgggcgacagagcgagactccatctcaaaaacaaaaaacaaaaacaaaaatggggaataagctcatttgtccagtaaatggctagtaaatgatagctctggagtgtgaacaccagcactcaggctgtggcatcttgctgtcctgcctccttctgtaaagactcgtgaagcttcctgctgggtagttcctggtacctctgctccaggttggccactggcagcaggcctgtgccagggtgcatgctggcgctatatgatccgtggggcggaggggagtatccccatctcctcaggggcctcccctatgtcacaccctgaggctgggcccagaccggtattcaggaaaggaaactgatctgtcacctcacccctgcctggggcagcccagcatgtgtcagccccctaatccccgggtactgcccaggacaarcagtaacagggacaaccaccctccaacatggggaggcctgcaacagctctggggcagaaggaggctcagggaggtagcaacttaccacccagcagctcgtggagctagtgggtggttgagctgggatttggacccagggcttggctctggtgaggggggatgtgtctgccatggggttgtctggtccagagatccaggcctagctcttttatgaaaccttaatttgttcactgataatagcaagagttgtcatttcctgaatctaacctccccaaagggtagatactcaaatctctgcttttttttttttttttttttttgacatggagtctcgctctgtcgcccaggctggagtgcagtggcgtgatctcggctcactgccacctccacctcccaggttcaagcaattctcctgcctcagcctactgagtagctgggattacaggcgcgtgccaccacacctggctaatttttgtatttttagtagagacggggtttcaccatgttgctcaggctggtctcaaactcctgacctcatgatctgcccgcctcagcctcccaaagtgctggaattacaggcatgagctactgcgcccggcccaaatctctgcttttacaggtaaagaatggaagcacaggctgggagtggtggcacatgcctgtgtcctagctacttgggagactgaggcaggaggattgcttgagccaaggacttcaaggctgcagtgagatatcattgcacctgtgaatagctaccgcactccagcctgggcaacatagcaagatcccatctctaaaaataaaaaatataagaaaaaaaaatgaatagaagcacaaaggaagggaagggatcacccaaggtcctatagctcatacatgggttaatccagaattggaaccygggcagccttgctccagagtccggtctcacttaatgagtactagataattctctgcatgtcagatgggtacactcttcttgaacctgctagttcttttggagccagatctggggagggggagcaaggcaggagttgagcaaatagcaggaacagactgtgtgacacttgctgggaggctccgaggctccagctccctgagcttagaagtgcggagtktatctatcccctgcgcgattcctgggggaagggaaggacaggcgaaggggcatggcggggcagtcctggtgtctccaggaccagggtcagggggaggccagagcaattagcctggctgaggcctctgctaactcagaaacgtaagtgggggattggtccaggcctcactccagggctctggcctcgagcctgaccctcctgagtttctatctgaggcttccagagtcttcctggggcagtgaatctcagagtgctggtttgtgtgagaactttgttctgaaatttcccttttcaacaaccaaatccctgggctggcctgcctgccccacttccccctcttggaggaaacggatgctttcctcttgggcggccacatgatttgaataatcaagtgtttcccagctggcctctggccaaacggagctcagctgggcaaggcccccagttggggcactgaggcaagcctgccaacctcctcatcccgccacacgctccagccaccgagggtaaaatacaggaaaaatgcatggcccatagacttggctgggccaggccccagactattcctgtgatggaggcagcgcttgtcttgggctttgtcccatctacctggagaaagctgagtggaggaagaaaaaggctgcccctgctcaggaaattcctgatggagcggcctctcctggcgtgctcacctgggtgctggcgtcttggcacttgtcagggtggagagaggaggaagccagtcaagaaggggaaagacgggtgygggaggacattcactgattcaacaaacatctcattagcccaactgcctgtgaggcccagggttaggtgctggaatcacagatggatctgccctggattttgccttcaaagagtgtgtgtaggctgggctccgcrgctcacgcctgtagtcccagcactttgggaggccaaggccagtggatcacctgaggtcaggagttcgagaccagcctgaccaacatggtgaaacctygtctctactaaaaatacaaaaattagccgggcatggtggcgcgtgcctgtaatcccagctactccggaggctgaggcaggagaattgcttgaacctgggaggcagaggtggcagtgagccaagatggcaccattgcactccagcctgggcaacaagagcaaaactctgtctcaaacaaacgaacaaaaagagtgtgtacagaaatggtcttgtaagcagactcccccacagagccctaggtggtagaggatgagggaaagcatgagaggccacctagctaagccttgggcagaatggccgcaaaggatttctggagacagcagatttcatttatttattttttttgagatggagtctctgtctcccaggctggagtgccatagcgccatctcggctcactgcaacctccgcctcccaggttcaagctattctcctgcatcagcctctggagtagctgggactacaggcatgyaccaccatacctggctaatttttgtatttttagtagaratggggtttcaccatgttggccaggctggtctcaaactcctgacctcaggtgatctgcctgcctcggcctcccaaagtgctgggattacaggtgtgagctaccacgcccggcctactttattaatttttaaccttttttgcygcattatataatttttgatatgtggtgtttttaatcattcagttctaagtaattttaagtttctactatgacttttctttgatccttgaaatttttagggactttttttcatttctaagtgtaggggtaatgatttatacttgtaaacgcttagcttctcacttaattgatggtcacaggatgtggtctatgtgaaaacttattatttgaactgtgagacttactttttggcctggtaggtgatgaattatttaaatgtttgcatgttcctgaaaagaaagtgtgtttatgtattttgtttctaccatcctacatttttatttcaatttgttctgctttttctgttttatcactttaaaaaattatctgtggcttttccctacaaagacaagattagcattttctcatgtcccttgctcccctgcctctcttcagtttccacacccttcactgacatgctcccctcagcccccatgatgtcacatgaaaattgtctagatttttaaaaaattgtctaattctgagttacagatctatgttattcttgttcttttcttttcttttctttcttgagatggagtttcactcttgttgcccaggctggagtgcaatggtgcgatctcagctctccacaacctctgcctcccgggttcaagcgattctcctgtctcagcctcccgagtagctgggattacaggcatgcaccaccacacccagctaattttgtatttttagtagagacggggtttctccgtgttggtcaggctggtctcraactcccgacctcaggtgatctgcctgcctcagccacccaaagtgctgggattacaggtgtgagccaccacgccyggcccttcttgttcttttctttgaacttgaatttgttttgaaaaactaaactttactaaattatttgctcagtcttcagatatcttgaatacaatctgtggaatttgctcctaattaaatcattcctttaaaattatttgattctttttttggagggggcgaggggctgtctttttgtacaaacctgagcccttgatgctgtaacttttattagcctttaactttttttttttttttttgaggtggagttttggctctgttgctcaggctcaagtgtggtggtgtgatcttggctcaccacaagctctgcctcctgggtttaggcgattctcctgcctcagcttcctgaatagctgggattagtggcacctgccaccacacctggctaatttttgtattttcagtagggacaaggttttaccttgttggctaggctggtctcaaactcccaacctgaagtgatccgtccacctcggcctcccaaagtgctaggattataggcatgaccaccacgcccggscagcctttaacatttgaatggctgtttagctggatagaaaattcccagctcaatctttttttccttctgtagtttggtcaattcgacatttattccatttgtaagtgttctgttttttgctaaacctttaggatgttttcattgtgtgtacgtgttttttttytgttttgtttttttgtttttttgktttttttgagacagtcttgctctgtcacccaggctggagtgtagtggcacgatcactgctcatacagcctcaacctccccaaataaagtgatcctcccacctcagccccctaagtagctgggactgcaggtgcacaacaccacacccaggtaatttttgtattttttgtagagatggggtttccttatgttgcccaggctggtctcgaactcctgggcttaagcgatcctcctgccgtggcctcccaaggtgctgagatttacaggagtgacctattcaggcatgagattacatgcctgacctattcagtttytttttttttttttttttttgaggcggaatctcgctctgtcacccaggctggagtgcagtggtgtgatctcagctcaccgcaacctstgcctcctggattcaagcaattctcctgcctcarcctcccaagtagctgggattacgggcatgtgccaccaygcctggctaatttttttttgtatttttagtagagatgagatttcaccatattggccagactggtctcggactcctgaccttgtgatccacccaccttgacctcccaaartgctgggattacagacgtgagcctccgctcccggccgacctattcagtttcttaatggtatsttttgataacaagaggttttcaattttgatgaagtccaatttaccttttttttcttttatggaattagtattctttgcctaacccaaagtcatgaaaatattatsgagtcagggccgggcgtcgtggctcatacatgtaatcccagcactttgggaggccgaggtgggcggatcacctgaggtcaggagttcgagaccagcctggtcaacatggcgaaaccccgtctctactaaaagtacaaaaattagctgggtgtggtggtgggcgcctgtaatcccagctactcaggaggctgaggcagagaattgcttgaacccaggaggtggaggttgcagtgagccaagattatgccactgcactccagcctgggtgacaagagcgagactccatctcaaaaaaaaaaaaaagaaaatattatggagtcagtattctttgcctaccccaaagtcatgaagatatccttttatattttcttctagaagctttgtgattctgacttacaattaggtttatggttaatctcaaattaatgcagtaagattggggttaatgttcttttaacttttctttcaatgttctgtttctttttttttttctgagacagggtcttactttgtcacccaggctggagtgcagtggcatgaacatggctcacttcagtctcaacccctggccttaagcaacgctcccaccccagcctcccaaatagcagggaccacaggtgcacaccacacttggctaattaaaaaataattttttttgtagagatgaggttcttgccatgtttcctggaccttccaaagtgttggaattccagtcatgagccaccaagcctggccaattttctgtttcttaatccttccctgcttcctcctggaagcgtcctcaagctaataacttagctctctcctccatcgttcagcagctggatacactctgtaatttattcyacttatgtgtttgttatttcaactggtttttcacatagagtgtttccactggggtcttttaaccattcctctttctgttttgctaacatctttgctcatttcttttgcatgtttctcacagtttatggagactttttgtttgcttcattttgtttcgtttttttgagacagggtctccwctgttgcccaggctggagtgcagtggcgtgatctctgctcactgcagcctcgacctcccragctcaagtgatcctcccacttcagcctcctgagtaactgggactatagttgtgcaccaccacggccagctaattttttttgtattttttgtagagatggagtttcattgtgttgcccaggctggtctcaaactcttgggctcaagtaatccacccgccttggcttcctagagtgctgggattacaggtgtgagccmccgcatctggtcctgttaatggtttttctttagaattcattgtgctatggctggtagtggygtggggtgggattcggggagccatgcacttcttgcccttaaaactagcagccagggaaaacgtatggctcctggatcctccctctcaaatcagtcccaaatactgaaaagcaaaacatcactaaacctaggcaattacgatttttgcttattttaaattctcagtaaatctgatctaatacggatgattccagcggtatctctaatcagtttgggtttcttttgaagtcattgtgctccttggatactctgttctttaacttgtgagcttactccgtgggggatttcagctattctgtttgatgctgtgtctttggtaagagtctaaggctgaccctagtcgcccagttccaatgagtccaaggagacgacattgccaggacgggaatccctggacatcagaaccacttggtttctcactaggtgtgacatcaccattctccctcccccagtgactcactccacaggattgggcctctctttcagaccccagggagaaacagtgaggagaaggggctatatgcctaggtcagaattcttcagactggggtctggaaaggaaggggtggtggagtgactgtagaggccccctgtagtgactgtcggtcccctcccaattcctgcagttccacattgtttgctggcaagctttgaatttttttttttttttttttttgagacatggtctcactctgtcacccagactggagagcagtggcatgaacatggctcactggagcctcgacatcctgggttcaagcacacctcctgcctcagtctcctaagtagctgggaccacaggygtgcaccaccacatccagatcatttttgatttttttttttttttttttggagacagagtcttgctctgtcacccaggctggagtgcagtggtgcaatcttggctcaacctctgtctctcaggttcaagcaattctcgtgcctcagcctcccgagtagctgggattacaggcacccaccaccacacccggctaatttttgtatttttagtagagatgagatggggtttcaccatgttggccaggctggtctcgaactcctggtctcaagtgatccacccgccttggcctcccaaagtgcgggattacaggtgtgagccacggcgcccggccaattttttgatttttttgtaagagacagggtctcactttgttgcccaggctgtctcaaggtcctgggctcaagcgagcctcctgccttggctcccaaagtgctggaattatggcccagcccatgctttgactttatctcagtagacacttgtgccatcctcctgggctgctttatgcaagatactttttgtgggtttcatgaaaatgtgggcttagtgataagccataagttaattgaggggcagaacaaaggtgggttggacaatttggggctcacatgtcctgggatagagagccaaaggggctctgggaaagggaggaggattctgggaggacacggagtcagcagagaggaggatggagtttcaacaagcccagagctgaagttggagactgaggtctagggtagcagatgtgggctttgccaggaggcaggtccagagggtggctgtggggctgaactccaaccccacacccagctctgaccttagttgttccaggacagtgggtgtgtgtatgggggcctgggcttggaacagagaggcaagaggagaactcaaaccctgttttcttttctgtaatattctctccaccctaaagaccatgccctgccttttctcctggctgcagcaacccctccccgccaccctacacacactagtttaaactctcttccatctcccaggagattctgtttccccattgttgcctaggcttagtggtattttgttctgttgttacttgggattgatgttgagaaggaggacccaggagccatatgtcttctctctctgttggggcaaggagcgtgtggattccccaatcccctgtcccaccaccagccagagcacaatgaattcaaaagtaaaaccataaactgattagagacaacccagagtcagtggtattagaataaaaagaccaagattttttttttaattttttattttttgaaatggagtcttgctttgtcacccaggctggagtgcaatggtgtgatctcagcttgctgcaacctctgcctcccaggttcaagcgattctcccacctgagcctcccgagtagctgggattacaggcacctgccatcatgccctgctaatttttgtatttttgtagagatggggtttcaccatgttggccaggctgatctcgaactcctgacctcatgtgatccgcccgcctcagcctcctgaagtgctgggattacaggcgtgagctactgcgcccagcccaagaccaatattttaaataaacatcagaaacatgagaaataaggaaacaagagaaataaggaaaaacatttgcagcataaagtagaatgagagagtgtaaaaaataaaagagctgaaarcaaatattcaatatgagaaagcagcctcattctctgccccacccaaacctctgcgtgcaccttacagctccctgttctccaggaaagacgttcacggcttctggacyttggcatgggctgttccagcagcttagacttccttccctccacttctgctgaaacacttcagcacatcctcaagactccttccctgaccatgcctcatggtcaaggtgacactcagtgatggcatagggttctggagtcaggacaccagggtgcctgtcctgattcttcaactaattggctgtgtgactttgggcaggtcatgctacctctctggacctcaggcttctcttggagaaaaagatgaaggtgttgggttagagtattcctagagtccctttcagtttgttgtgataccatggtggggagcacaagctttggagtggggctgcccaccagcccttcctgggtcagcacttaacgctatgtatcatggagcagttctttcaacatggaaagccaccgtttacttaccctaatatatgggttaagagcttgtagtttggagttggacaatttgggctcagaatcccagctctgctgcaggtctgctgtgtgacctcaggcaagttacttaaccyttctgtgcttttttcctcttcataaaatgtgaatgatactaagagtacctacctcaaagtgtaggagcacagtgaatgcagctgtcattctgctggtgacagttgtttcaccactatacagacatctcctttcagtttggtagattcttgatgattatctgccgggctctgctttccaaatacactctctgttgaattttaacttttaacggatgctctccactgcattttatctgtaaaacaaccctgcaaggtgaggatgaccaaccttgttttatggataaggaacctgaaaccccaaagttgctttcaaagctacacagccaggacttaaccccaggtccacttcccacaagaccaaggtctttccaccatgccacactattcagaagattagactgggtctgggcacggtggctcacgcctgtaatcccagcactttgggaggctgaggtgggtggattacctgaggtcaggagttcgagatcagcctggccaacatggtgaaaccgcccatctctactaataatacaaaaattagccaggtgtggtcgtgggcgcctgtaatcctggctactcgggaggctgaggcaggagaatcrcctgaacctcggaggtggagtttgcagtgagccgagatcgtgccatttcactctggcctgggtgacaagagtaaaactcttgtctcaaaaaaaaaaaaagaagaagaagaagaagaagaagaagattagactgggacttgggagattaccaaatacaggcagatgggaaagcacagtgagaagtctcccaggctggagtgcagtggcgcaatctcggatcactgcagcctagacctcctgggctgaagcgatcctccagtctcagcctcctgagtggctgggcctacaggtgtgtgccaccatgcctggctaatttttgtagagacaggatttcgccatgttccccaggctggtcttgaaatcctgggctcaagcagtcctcctgccttggcctcccaaagtgctgggattacacgtgtcagccaccacacctggatcctacatgtatattctgactgtccgcccttggccatatgcaagatgccttttgtagtttcatgcaaatgtgggcttagtgataagccagaagttaattgaggaggcagaacaaaggtgggttggacaatttggggctcataagacctgagatagagagccacaggggctctgggaaagggaggaggattctgggaggacacggagtcagcgaagaggaggattgagtttcaacaaacccagagctgaagctksagactgaagcctagggtagtggatgtgggctttgccaagagataggcccagagggcagctctggggctgaactctagccccccaccrctgtccctcaccctggtgtactcttgagggtctgggtttgtggtttcagtttcttcctctgcaaaagggctgctagtaccccttggtagagttaggggagagggcacgagggagacaggaggccctgggcaagaatccagttgcgctggttgtattgacatgcatggacttgagagttatcctgaaaccctatccctccttatctgtgatttgggaatcacgttctggcctgtgtgggatcattgcaaggccacagtgaaatgatttcttggtgagaccttctctgatctttctatttaaaactgcaaacctccctgtcctcctccctgccttctttttccccgctgtacttaccgccacctggcgttctattgcttttacttacttccttgttgtctgcctgccacactgacagggatttgggctgttatgttcagcacctagaacagcccctggcatattgtggctgctcaataaacagtgttccagcgaatgttggttgaataacatatagggaaagccctaggcatagaaggtgtttagtcaaratcagctggatcttagagacatagggcagacgcctgagaaaggctgggacagctcacttggggtgacgaggtctcccatgaaagcatttggggtctggatttcagggcrgtgctggtttcctctctggccacagcctgcaagcagcgagccatataggagaggaaagtttggctgggtgtggggcctcacccgggagtcccagcactttgggaggctgaggcaggaggattgctggagcttaggaggttgagagtctgggcaacatagcgagaccttgtctctactaaaaataaaatcaccagccgaacgtggtgctgtgcgccggtggtcccagctacttggtctcttgctgaggcaagaggatcgtttgagctcgggaggttgaggctgcagtgagctatgatcgtgtcactgcacttcagcctgaatgacagagcaagaccctgtctcaaaaaaaaaagaaaggagagtgaagctggatgggccaaatactggggcttctgaagaagtcaagaccttcaggcagacaggaagctcatgacacttagctttctcgttttctttagctttttaaaccactctgactgctcctgagtggaacaaactctcaaagaaatgatagcctcagcccactccactccaatgactaggagaaaaagcagtagcactgggcccaggcagatctggagacatggcttggccctgcccctgtttagcagagggacctagggcaagtcacttcaccttgctgagtctctactttctcctctgaaatgggtgtagtggtattctccctccgaggccttttgtgtaaaacctactagaaaggtgaattataaccagtcattaccaaactgaagggcctggaaggcagagcttgtacctgcaagtcctgtcacagggctggcacacaatagatgcatggaacctggtggtcaaagggttgtaaacttcaatggacaacaacytgtcagaaagtgaggatctgagtcctgcagggctattagacaagtccagccccaaaactttctgtaattctagaagtttatagattccaagtagaaagtgacttgtaggaagttggactcttacattaccacatacttgaaacttgtcagctttagcttgtttgcaagatttttcctctggcagaaacagctggcagaatatgaatgacctgatttggttgctcacaatctaaagcgctgagaaaaactggctgagctgcagttctgaggtcagactctgtgttccaagtaacagaaaagccaagacgcacaatggggaaattaattggctcatgtagccaggatgttcagaggaaggcttcaggcatggctgcmtctaggagcccaagtgatgctatcaaagactcaaggtctctacctttctctagtccatctctgagaggttgcttcctcttcaggctatacaaagtgcccttccccaccacttcacaccctcataacccagcargcagacagagtcttccagctggagccagtcagggtccacctggagctggaggcgggatcagtcccacccaaaccaggctgaaagggggagggtcacttcccaaggaaacttggtggtattgttaggaaggggaaacagactctgggtggccaaaaatgacagtagatgtccactccactcaccagagggagtgcagtggagagccgtagaaacttctgcattgtaccttttgatttgcaaggttccttccctttttttttttttttttttttttgagacggagtcttgctctgtcacccaggctggagtgcagtggcgcgatcttggctcactacaacctccacctcccaggttcaagcgattctcctgccttagcctcctgagtagctgggattattggcgcccgccaccacgcctggctaattttttgtatttttagtagagacagggtttcactgtgttagccaggatggtcttgatctcctgaccttgtgatcygcccgcctcggcctcccaaaatgctgggattaaaggcgtgagccaccgtgcccggccagkttccttcccttctaagacgctgatactggaggcagaatggagtttattatccctgctctacagccaaggaaacagcccttgaatattcagcgaggactctgacttgtaaccctgggctgcccccactgatctcagcctctctgtgcaaaattataagcccagaggagctgacccaggagggagaggccaacgtgactgaagcccctcmctttgtggagcgggcactctgtctagatacaagaggcccccaggaagctgcgatcaygggaaagtacacagggagctgagagagcagcatgacatgaggaccagccacagggcagcagccaggcatggcttcctgcagctctcattgccagaaccaccccccccaccgccatccccctacaccccagcagagtgagctcatgcagccccactgaggcagggctccctgtgcctgggatggctgaggcacgagctctgccattggtgaccgaggttgtcctggcatgtgactgagatgggggtggcaygtacactggacatggagctggacggacctggcctgaatcccagcgctcccacgtggttgctttgtgaccctgaacctccctcctgttctgagccttggtttttcctcctgagccggagctgatcatttgcacttcactggaattcgaagactgggtgaaaagcccccggcgcgtagtagttgctccatagagtttctccctcttcctctttgggtcctgttagtagctatgtgaccttggcccagttccttgacttttctgtacactgggagcaatgagggcgttggtgtgaggaccagatggctttgcgtgtaaagtgcttagagcagtgcccggcacactcgtgatcactgttacttctggctaacacctattgtttaatgcgtaccaggccctgggtctttctctccttgtttattgtctcactgaattcttgttcctccagtgacgtaggctctcaccaggatggtccccatttgacgggtgaggtggtgtgcccaaggtcaatgggggcctgctgagctgcatgcccttgggtgggacctcacctccataggccccagtttcctgtctggggctctcggcgtcagccctgccctactatgtcccaaggtcgccgcggagatcaaacgcaaaagccaccggagccttctgtggccggctggagcgtcctctgggaatgcgaggaacgctgttatctggagcccagctgccctgagcactgtctctgggaacacccgcgtccttcctcctctgatctgagccctctgcgcccgccacccagggattcggcttgtgctggccgctgcccagcaagctacaagttcattgtcccttttcccacagcccggcgcctcctcagcctcctctcacagggcctgcgtggggccatctgcacaatggacacatcctctgctagggggaggggagtggggagagccgggattggccaatgccctgtcttgaggatgagttgaaggaggggattatgggtgggggtggccagggtgcgcccacctggccrggggcagagccaggtcttgaatgccaggtcttgaatctgggatcctcccctccctgccactgcaagccccaagtgagttgcactgcagggctggctacaagataccgtgcaaagatcagaagagacttggaccctagatgtgacattctcttgctgtgtgacctctggcaagtcacctcacctctcctgtaaagttatgattataggaagccctcccactgggaaccgtggtgcagatacaatgaaataacatttgggaacagartgtagtgagtgtgaatcaaatagcagctgcacgcaatcccttcatctgcaaaagtataatgtgtctgtgtaatgtacatattgcagagagggcaaatggtggtttgtttccagtcttgcctcctgtttgaggagtttatgcttagtcctgggagacagaaacatccccaagtaaggctgaattctggctcgctcacttactggctgtgtgaccttgggcatgctccttaatctctctgtgcttctgttttgtcatctgtaaaatggggataataatagtgcttaccttgaaggttgttgtggggatcaagtgagttaatataggtaaagtgtttagaacaatgcctggcacataataaggtctatgaaaaggtttgttattattaatcttatgaatacgatgacaaaatatgtaaaataggatttttctaaaatagtctcagtttgaaatattttcatcagttgccgcaaatcactaatgtacggaagtccaagacattggcatccaagctgcgccttgaacactgccttgcctttccagtaattgccccccaaatcctcagctggttagtggggagacctatccctgcccctgatgtgctgtgtgacactggggaggttgtgtaccctctctgtgtcttccttttctttttccttttttttttttttttgagatggagtctcactctgtcacccaggctggagtgcagtggcacgatcacagctcattgcaagctccacctcccgagttcacaccattctcctgcctcagcctcccgagtagctgggactacaggtgcccgccacccagcccagctaattttttgtatatttttagtagagacagggtttcaccgtgttagtcaggatggtctcgatctcctgacctcgtgatctgcccacctctgcctcccaaagtgctgggattacaggcttgagccaccgcrcccggcctgtgccttccttttcttgttgtttgtgagagcaaggatgggccggccatgtctcctagtaccagggaggctccccctgcagagggctgagggaagtgctggaggaggtggttggcgaacaccgcagatgtagtgcgtgcgccaccctcccccaccgctttctgtacttggcatctaggcttggcacagagtgaggtggcctggggcagaacatgtcctttccatggcatggcagaaggctgtgtgcctgcaaagcagccatgctccgcccccgacccctgcctgggcactgcaggccccaggcatggtgtctctgggccctgctatctccctcccctgcgatctccctactgcgcctccctgctgcttctctcctgccacyagtcctctggcttcagtcctctgcccacagagttggtttggggcatcatgaccgtcctggagcctcagggacccccagagaagctttggcttctctgaacccagaccctcagggtttctgattccagctctgctgtgtggccttgagtaagtgacagtcagagcctcaccctcctcacctgtaaaatggagctggcaatggggcatgtagtgagatgaggcatgcagagggcctgctctccaccaggccgtgcttggggagcagagccctttgtggtgggtccaggctgcccctctgtcctgaatgcaagccgcctgctcgtgcctttctccctgaaccccaaactccacacattcctgcctccttgcctttaaacactcaggtcctgttgggagtgtcctctctctctctctgctcatctcaaccccatcatccttccagcctggtgctcgacccacccccacggacacttctggcccataccctgtcctagactttctctctctccccttcaagatggaaaggaagtgtcaggctacctggcaggttactcctttcttcccaagtgagtgtgtgagggagagagagatctggttctctttggagatgggagccctttgactgtaagaataggacctctgccgcttaagaacaggccctttgaagggaaagtactcagcaggcaggtgagcttctgggttctagagtctcagagctggaaggactgtctgcagccatccaggtgaacaggtctctgggaaatcccaaagyayatggtggcttgatcgagtgggcggggaagggtccatccgttctctgctccagcccctcatctgccccacttgcccatctctgccccgcagtccatccacctcatttgctccccctccccataaccctagctcctgactgacattcactcagcacctaccacatcccagcctccgttttacacccttgtgtgtatgaaggcatccttacaacaacgcagtggcttctattaggtgtggaggggtgaggtcacctgctctgagctgcccagctggtgaggggcagaggcaggatcagaatccaggcagcctggctccagcatccatcttcactgctgctgagctgtctcttcagccacccaccctctgaccccatcatccttccacctagcgacattccctggccacccggcctgtgccggcctctgccagccacggggctgctgccatcagcagagcaggattccagctccctaggagctcaccacggtgagagggtgacaacctatgattctctaaggctctgattaatttcaccaagggcttcatggcactgggtkctgggagcttggggaggagccgaaactgctgtctgggctggggtagggtagggagagggcagggggagggattcattggttggacagcatgggacattctagtctgggaagcacagagtgcagaggtgttgaggctgggagcgctcaggggacagctgggttctcatcaaagccctaaagatgcagtggcttggcaccaggcctctggggtacttccacgtctgtttcctgccaggatggggtgctgtcaatggctagaagtctgagccttactataatccccagcactggcccactgccctctagggaagtccttccttggatctgacctgcagcccactctgaaaccaccacacattcctgcrcaagcacttcatccagctcttcatgacagccataaataacttcctccagtaatgaatacagtcctggccagcaaggcttgccagagatgctgggcttggcggagagaggaattccatgtcccttccctatgactctgcagctgaaatgttactgggctggtcttcagcagggctccctccctaggcagctatgcaggtgccccccagcccctgcctcattcctcatgcccaccagggacacaagggcaactcagcactcctctctagccacagctccttggaagagcccagaaggcccagctgacaggctaggggatgctggctccaagctgactcagttccctatgtgtgcctctggtggggagcagctgagagatgcagggtctgcttatagtggttcctctcaccgggcaaggctttcctcctctttaggcctcagtcttcccatttggacaatgggatgatctctaagacaaagtttcccaaatgaatctgctcagaaaatgacttgttaaaaatatagcttccagccaggcgcagtggctcacgcctgtaatcccggtgctttgggaggccgaggcgggcggatcacgtgaggccaggagttcaagatcagcctggccaacatggtgaaaccctgtctctactaaaaacaaaaattagccgggcatggtggtgggcctgcaatcccagctactagggaggctaaggcatgagaatcgcttgaactctgaaggcggaggttgcagtgagccgagattgcgctactgcactccagcttgggtgacagagcaagactccatccccccaatccccccaccaaaaaaatacagcttccagctgggcacagcggcttatacctgtaatccaagcattttgggaggctgaggcaggaggatcacttgaacccaggagttcgagactagcctgggcagcatagtgagaccccacctctattttaaaaatgtaaacattaaccaaatgtggtaatgtgtgcctgtagtcccagctacttgggaggctgaggcaggaggatcgcttaaggctgcagtgaactatgatcgtgccactgcactccagcctgggcgacagagtaagaccctgtctcaaaacaaaaaataaaaaaacagcttcccaggccctgacctgggagattctgaccgagtaggtctggaataggagaagtaggaatttatttagggggctgttatgtctttctaatctgtccttttaaacttgcatatagtcacatccctccactaaaccctttttttccccaacactccctttattgaaatctcatcagctcctccccaaaaacctcacgatatagacagggtagggacgattagcccctcgacaacttttcacaaatatacacacgtttaactacttctcaggtcatgataaagaccggccgggcagaaacactgtaatcccagctactcgggagcctgaggcatgagaatcacttgaacctgggaggtggaggttgccatgagccgagatcacgccattgcactacagccttggcgacaagagtgaaactccatctgaaaaaaaacaaaacaaaacatttccattgccccaggaagttccttcatgcaccgcctagtcaatcctcctcccaaggtaaccacttgggaataagactttttccataagcacctcaagtgatttttgtggctcggggcatttgggaaatcgcaaaagaccttcccagcctggacagtctggggctgcgtgctctagaccgggggctccctaagggcaaatacctgaccctgtgagtcctgccaggtacaagctggggcataccagctgatgctccctggaggcacatcagtttattaggctgcttggtagagccttggagggtgtccttggagcaggcctgggagctgggtgggcttggatggggaaggcccccggctgagctgaggtggagagagcttggcacaggggtgtccctgggtaggtcccacatggaggcctgtgcagggcctggcccagtacctgccatcgatgtgacctcttcaccatggccaagtggacctccattttctcacctgtaaagggggacagctctgtctcactctcagggttgttaatgaggacacagcaggtcaggtgtgtcacagtcagcacctggtgcaccgtagttcttgaatgggaaaccaatgttagacgccaaaggaaacagtttcggaggtgcagggactgacccagcaacacacacctgggaagtggtggagcttgggcttggatcagatttgctggctgtgtgacagctcacccagtgacttcattgctaggccttggtttcaaaatgtggtgactgagagtggtgctaaggccctaagtttgggtcacactctcacctaagtgagaacctgaccaaaaagggggaattttaaaacaaaattatgagctgggcgtggtagctcacacctgtaatcctagcactttgggaggccgaggcatgtggattgcctgagctcaggagttcaagaatagcctgggcaacatggtgaaaccccgtctctactaaaaaatacaaaaaaatcagctgggcatggtggcatgcgcctgtagtcccagctactcaggaggctgaggcacgagaattgcttgaacctggaaggcggaggttgcagtgagctaagaccgtgccactgcatgccagcctgggcgacaaagtgaaactgtctcaaaacaaaaacaaaattatgagaggctgttgttttggactaaatgcatacactaggccccaagagaccagacgaaacctaaatagagtcacttgtgctaaatgtgatatcatcaaactaaaactttaaaaagaacacataaatgctaaaaccaggttttgttttgtttttttttcttgtaaacaggacattccaacattaaaaaaaataccctctaacccttaaaaaaaataacctaaagtctttattcccaccttacaaaacccactgtcctactgtttcccagtgggtttcgagaccaaataagtacatttacaatggtgatagtgacatcagtgactcgttttggtcaatgtctcaaaatttaaaaaataactaaaagaagggaattattaaatcaaatctagcctaatgctgccttcttacatattttaagttcagcctagcagtttctctacattgtaaactataagaaatagaggtgtaaacagactatagcctacacttgtgccaatcaccaagttttgggggtttttttgyttttgtttttgtttttgtttttttttaagacagagtctcactctgtcgcccaggctggagtacagcattgtaatctcagctcactacaacctccgccacccgggttcaagcgattctcctgcctcagccacccaagtagctaggattacaggcgcctgccaccatgcccagctaatttttgtatttttagtagagacagggtttcatcatgttggccaggccggtctcgaactcctgacctcaggtgatccaccctcctcagcctcccaaagtgctgggattacaggagtgagccaccatgcccagccaccaattaccaagttttagccaatcaaatgtcgccaactgttcaaaccgtgttcaaatgacaagtgctaagctgtaaccaatctgactgcacctcactttccttttctgttcataaatcttcttctactaagtggctgcgctggttcctactccggctcaggaggctgcctaatttgcagatcgttcattgctcaattaaactcttttaaatttatttttttatattttattttattttattttgagacagagtctcgctctgttgccaggctggagtacagtggcacgatctcagctcactgcaacctctaactctctarttcaagcgattatcctgcctcagcctcccgagtagctgggattataggcacacaccaccatgcccagctaatttttgtatttttagtagacacggggtttcatcatgttggccaggatggtctcgatttcctgacctcgtgatccacccacctcagcctcccaaagtgctgggattgcaggcaattcttttaaatttaattcagctgaagtttttcttttatcaatagggctaataatccccaccctgccagtatcactaggatgttgtgaggatctgacgcaatttgagttacgggaatgttgagaaagaaaagggcgtaatggagtaacgagattagttttcctgttatggtgaggtcagtggcctttctggggtcaagaagaggggactttccttggcaccaagagggtaaaagtgtctcctcctgaccttgggtattttggaccatgggatctgaggtgtaccaggagacaggaagtgtgatcagaaaaggcctggtctaatggtgcacagctgtgcatatccaagtggcttgacctctctgggccgtttctgaatctgtgagatgggaatcataaccactctcctgacttcacaggatgttttaggagagattggatctgggttggggagacaattttggaagcagaaaaggcccctccgtgctggcaacagctcgtccacctccagcctgtgtgtgctgcctcctgggtgactgctggctttaggccagcgcctggcagggcttcactaaagcctccgtaggctgctgctatctcagttctgaggtacgggccgtggagacccccagatttgggcttaaatcccaactccaccattgcacctctgagcctctgtttctctgcaaatggggatactagtccctagcccagatggggcctggtacacagttggtgctcaataagagcagttcgtcttcttctgagcatgggtgcatccctctggctggggtaagcaccaactcagatttctaggcccatagatgggctggaacagctgctgctgttaggggaaaacctactgtgttactagccaaggggttcccttccatgtttttgccccacagggcacctggcacaatgtctagcatacagtaggtgctttgtccacactggctggtcagttacctccaagctgacagaaactctgtcccgttcccgactgtttccatagaacctagcacagagatactcagcaggtgctctgtaggtgtttgggagtgaggaatgaatgaacaaagttgaatgaasaagcatcgggccctcccccggggctcaaatgggagagaggagcttcgtagcctgctccccctcccaccccagcaccccgtttcatcccttctgactaatccacaaagattaacccagggataaagcgggtcacggccactgacccagggctttggagctagtgtgaccgagtgtgtgcagggcgtggtggctgctcccaggggccctctttgccccaagatggccctcctgtcccccatcctggatgtggtcctcacggtggccctcagcctcctcctcctggggctgatcctgggcctcctttgtttcttcacttgccgcctggccaggccgctcaggtaggggaactcagctggcctgactcsccctgcatcccgccaaattcccygccctaagctcgttcagcttccatttgttctcgtgagatggagcaagmggggcactcatttctcttactcttcatggtggggaaaccaaggcccggagaggttgagccctggcgtcagcctrggcttaaatggcgcatagtcgaagactagccaaaccctctgttgggtttcctaagctacaaaacgggggctcttcatccatattgtgagatcagggatgtaaacagcatggggctgagtggaacatgagggcctaagaaatggtagtgacacgtttgtcccattcttctatcatttgccccagatcttctgagacccagcccaaggctggctttttgccccactccaggatgctcccgggccctctgcctgggttgctgaatcagtcctcagagctaaggcctgcctggctcctcagccccctgcactgaactgccaagtagctgctcctctggcgccacagcctagccggggcttctgcactggccatgcgtaatcaggctacggaggagccgggagcctggcagagaagggagggagggggtggcgatggggctgacacacacccggaggccccattttaagctggcagacattggcagagggtggtgggcagccggggcccccacagccccaaactgggcccctccgcttccagggctgccacagagcagccaggagcctctgcgagggggaggggtcctaggggtggggccagcagggaggctctgggttctgaaggctttcccaggtccccaccctctccttgtcctgagyggaggctatgggagaaggcacctgcctccaggccaagcctatctcaatgcctatccctggggccaaaattcagagcatcccagcctgaactggtggcacttatggaactgctaccatgtgcaagggctcgggatgcagagatgggtaagatgwtggtctttacgttcacagagcttcaggctagcagggaggagagacagaccaataaccggaagaataatcatgtggggctggatgagcctttcagtgctccygggtcactacacttttatttttctttattcgctcacctgttttggaccctcagtgcagagagagtgggatacgttatctcacttagcacatgacatacccaaataagctctcagttcttgttttgtttattcattttttcctttgtccctgctccctgcctccccactgccattcccacagctcaccgaagtccctatgctaatgtacttaatatggccttggagttgtaagtgtccttgtacgttacacagcattctgtccgtgggggtggtttgcacttacatacactgcrtttgattctttacattcatcactcagtcctctgcctttagaccccaccacgctgctgtttggacatctagttttaataccactgccacgcagacattgcctccaccactccttactaattcatttccctagttgtggacgagactgccccggctcctcaccatcataagccagtgttaaaaggagtttgccaaagctttctccagcgagtatgatggtttctgcaggttcttggcataaagcctttatcagattaaggaaattcttttcaatacctggtttgctgagggcttctgtcacatcgttttctgtgaccccattccctctccctaggtgagcacgtcaagtttgatcagggtgttaactgccacccctgtgcctatgattcccaaatttatactctaacccagacttctttttcaaatgccagagccaaatattcagctgcctccttagtgtctccacttctaaaagacatctccaactcaacatatccaaaaacaagttcctgattgtctccacctcaygcctcaaaagaccaccccaaacgccgaaaggctgaatgcttttttctttttcttttttttttttttctgagatggagtctcactctgttgcccaggctggactgcagtgatgcgatctcagctcactgcaaactctgcttcctgggttcaagtgattctcctrcctcagcctctcaggtagctgggactacaggtgcacaccaccatgcccagctaatttttgtagagagagtttcaccatgttggccaggctggtctcaaacacctgaccttaagggatccacccgcctcagcctctcaaagtgctgggattacaggtgtgagccatcgcacttggctcggtagtatatggctcagaaacattgccatttacaatagttccccaaaaagcaaaattcttaggtataaatctggattcagagtccagaatgctaaccattacacgatggaacccgtaggtataaatctaagaaaacatatccaagatctacaggctgaagactacagagtgctgataaaaccgaagaactctgactgaatgagtggagagacgtggtgtcttcatgactgggcaaytccatgtggtatagacgtaaaccctcccacattgatctgtggatttaataccatacctatcaaaaacacagtggtggaggacagatcagggatcgccaggtttagggatggggggattgtgtaactataaagaacgcaagagagatttttggggtggcagagctgttctgggtcctgacggtggcggtggtggttacataaatctatccatgtgtcaaacgtcagaacactcattttacacttgggggcaacagaaatccctccctctggagggggtgactgatggtaacctgattgctaattctggaatcaggagccctgtggtcaggtttctgctctgcaacttcctgttggtaaccttgggcaagtctccgtccagagccttggttttctcatctgtaaaaggagatgataggtccttttctgtccactgcatagctgattagtgaaacatcatggtgaaattctttatgaactatggagtgcagcacatagacttgctttcattttgtcagtatcctttatagattgttcatgtaagctcccaaagagtagtatttattttattgaaataaaatgcaygtagagaaaaatgtgtgtatcatacattgacagctgaacccaccgtgtaaccagcacccacccacccagatcaatcataaaccgaaccgcaccagcaccccagcagcccgttcccgtttccgtaccctccacgtggagcctccgttctgtctcccaacgccctgggttagtttttatactttctgtcatcggaatcacactgtaagtgctcttgggtttagcttcctttgctcaagcttaccttgtgcgattcattcatgttgttgtgaggagctgtggatcatccattctccttgctgtctgtggtggtttctgtgttgtgaacacacacaatgtattatccagcctgccgtagatggaggcagttttgaagccattataaacagggctgatgtgcacattctgctggagagaaacgggtcccagggtacaggtaggatgatcagcttcggtagatcctgccggttttcccatgcgctgtgcctgtctgcactccaccaacggcgagcggaccttccggtagttaaacatcttcacgaactcttggactttcctgcacacacagagaagataattttggatggctcttcccttccccccacaaccttccttagggcactggctttcaactgatgtaaatatttactatgccaagcactaggagggcagagacaaacaagacaaagtcctcacacttagaaactcccggtgtggcagctgagatggcccaggaaagaactatattaccttcaaaaagagaggtacatgcgatgtttgaggtggcatgaagctcagtggtgttatattggaatgagtgagtgaccatcctggagccttcctgaaagaggtgacttcatttttaagtgattttaaataatagtttaatgaattagtatttcgtattcagttaataacatttttctgattttaggatttgctatagaaatatttggaaaccgtaaagtagaacaaaaaaaaaatgtaggaatcatctgaaattccaaattctaccactcacagttaagtgttgttagatgttagatgtgggatattgccttttaatttccactctgcgccgctacccccagcccctaccccagagccgtcacttctggcactggagcgcagcttgcgtggttttttttttttttttttttttttttgagacagagtctcgctgtcgcccaggctggagtgcagtggcgcgatctcggctcactgcaagctccgcctcccgggttcacgccattctcctgcctcagcctcctgagtagctgggactacaggcgcccgctacctctcccggctaattttttgtatttttagtagagacggggtttcactgtgttagccaggatggtctcgatctcctgacttcgtgatccgcccgcctcggcctcccaaagtgctgggattacaggcgtgagccaccgcgcccggccatttgcgtgtttttaaggttgaatcaagatccttcttctggtggtagtggtttctttttctcccttcccttcccttccctttcctcccctcccctcccctccgctgcctcttccctccccgcccggcccggcgcgggcgggggcgttgccttccctcccctcccctcccctccctccttccttttctccttttctttttctctatttttaaattaaaaaaaaaaatcttggatgggcgcggcagctcacacctgtaatcccagcactttgggaggccaaggtgggcagatcacctgaggtcgggagttcgagaccagcctgaccaacatggaccccatctctactaaaaatacaaaattggccgggcatggtggcgcaagcctgtaatcccagccactcgggaggctgaggcaggaaaattgcttgaacccggggggcggaggttgcagtgagccgaggttgtgccattgcactccagcctgggcaacaagaacaaaactccgtctcaaaaaaaaaaaaaagaaaaagaaaaaatctttttcctttgagctggagctgcaaagagaagaatttttaaaaagaaaagaaacttttaaaaaattaaaatacaaaaatttttcttagagacagggtctcgctgtgttgcccaggctggtctccaactccaggcctgaagcgaacttcctccagcctcagcttcccaagtagctgggattacaggcatgttaccaccatgcctggctttttttctttaaacaacttttaaaaaatgttttattttgtttttacttaacatataataattggactagagtggtgtcttatctgtcacaacacttttctaacggtagagtgtgtattactgctgtttcccacaacaaatggtgtcatatcttggttttggctgaagcaataacatttcccagtgaaactcttgccacttaaaattctttgtcttgtaactcatgtgcaacagggttagtacatttctcagctgccagtggggttgttctttgtgatttaacaggaagaccacagtgtaaaaacattcttatgccattaatacatgcttgttttaggctacttggaaaattcaaaaaaataaaaaaaagaggaaataatcattcatagtcctaccacccagagaaaaccacagttaatgttttggtgtatttccttccagttttttttttccacctaaactcttcaattacatccgactttaaatatatatatattttttaaaaattgtaaagataatactgtatctcagcacaaaagaaaattttggaaatgcagaaaagacaatggaaaagaaaaatcagttgtctgtgatgtcaccacccagaaatggccacacttaccagccagttttttcacatatgtgactcctaccatttttatatctcttaccataaacgacaagctctagaagagaatgtagcaaatgtaggggtcctgaaagaaggggtgcactctgttttgtccctgatgttcctgggacacaggtaattaaaaggctgaagaccgagtgctgtagaacagggcttctcaaggtgtggtccgcaaagcagcaaagcagcagcttctcctgggagcttattagaartacaatcggagcctcaccagtgggccgggaatctgttgtaacaagcccttgggggattcagatgcttgctctccttacagtttgagaaacactgcaccaaaagattggactctgggaggtagggggcttcagatgaattgaaagtggaaattcacttaggaaatgggacggaactgctttgcagcatggaactcattgacactgacacagctgtttgtgtggttaagcttcctgagacagggaccagctgggtttggcatcccaatgttgagccccatgcctggtctgtaataggtgctcaccgaatacttgttgaatgaatcaaggaatgaataagtgagtgaaaaaggatctctagagctgtgccccacatgcctctttttctctttttttaatttctaggattggaacatcagttaacatctgaccactgccagcccaccccctcccacccacgtcgattgcatctctgggctccagggataaagcaggtcttggggtgcaccatgatttcaccattcttagtactggccattggcacctgccttactaactccttagtgccaggtatgcttggggacacaggtggaggcataaaaaggtggtgcagatggggtatgatgagggcagtgtctatgttttaaggtcccagaaccatccaaagtatttaagagctgaaaacagtgtwcagagcaggaaacctcagccctgctacttgcatgtgttagttggataggtcactcttttcccatatatatatatatatatacacacatacacatatatgaaatatatatatacaaggaaaatatatatatacaaggaaatatatattttccacatatatatttttccatatatatatttcatatatatatttttccatatatatatttcatatatattatatatattctttcttaatttttttttttttgagacagggtttcgctctgttgcccaagctagagtgcagtggcgccatcttggctcactgcaagctctgcctcctgggttcacgccattctcctgcctcagcctcccaagtagctgggactacaggtgcccgccaccgcgccaggctaattttttgtatttttagtagagatggggtttcaccgtgttagccaggatggtctcgatctcctgacctcatgatccgcctgcctcggcctcccaaagtgctgggattacaggcgtgagccaccgcbcctggcctttctttctttctttctttctttctttctttctttctttctttctttctttctttctttctctctttctttctttttctttctttctttctttctcttttctttctttctttctttcttttctttttctttcctttctttcctttcttttctctcgcatccgagtgaagagaccaccaaacaggctttgagtgagcaacaaggctgtttatttcacctgggtgcaggcgggctaagtccaaaaagagagtcagccaagggagatatgggtggggccgttttataagataggggtaggtaaaggaaaaattacagtcaaaggggggttctctggcgggcaggagtgggggtcacaaggtgctcagtgggggagctttttgagccaggatgagccaggagaaggaatttcacaaggtaatgtcgtcagttaaggcaaggaccggccattttcacttcttttgtggtggaatgtcatcagttaaggtaggaacagaccatttaaatttcacttcttttgtgattcttcagttacttcaggccgtctggatgtatatgtgcaggtcacaggggatatgatggcttagcttgggctcagacgcctgacactttctttttgagacagagacagactctcactctgtttgcccaggatggagtgcagtgacgtgatctcagctcactgcaaccttcgccacccaggttcaagtgatcctcctgcctcagcctcctgagtagctgggattacaggcrtgcgccgcaacaccyggctaattttttgtattcttattagagacggggtttcatcatgttggccaggctgatctcgaactcctgacctcaagtgatccacccgccttggcctcccaaagtgctgggattacaggtgtgagccactgtgcccagcctttttcttgtcatttgtagttctcactagtgaactcatcttcaacaggagttttttgtttttcttttttttgagacagtgtctctctctgtcgcccaggctggagtgcagtggcgcaatcttggctcactgcaagctccatctcccgggttcacgccattctcctgcctcagcctcccaagtagctgggactacaggtgcccgccaccacgcgcagctaatttttttgtacttttagtagagacggggtttcaccatgttagccaggatggtctcgatctcctgacctcaggtgatccgcctgccttggcctcctaaagtgctgggattacaggcatgagccaccgcacccggccgagttttttgtttttctgttggagattcacgcggaagtgtttccacagcatggcatggtgttttcaggacactaggggttcaactaattctaggccagtttttatgttgatttcttggtttacaattcttatactataaattcagatccccacttagacctggctcagatttgacttgaattcacatttcttatgaatgactgtctttctctatcccttccatagctccaaggcaaaatgtgtaccttaaaacarcttcagcagacctggtgtggtggctttagcaggcctggtatggtggctcacgcctgtaatcccagtgcgttgggaggctgaggtgggaggatcgcttgagtccaggagtttgaggacagcctgggcaacatagtgagacctccatctctagaaacaaacaaacaattagctgggcatagtgctgcatgcttgtagtcctagctacttgggaggctaaggtgggagaatcacttgagcccaggatttcaagattacggtgagctataatcaaaccactccagtctgggtgacagagtaagactctgtctcataaaaagaaaccagcttctggccgggaatggtggctcacgcctgtaatcccagcactttgggaggccgaggtaggtggatcacttgaggtcaggagtttgagaccagcctatccaacatggcaaaaactcctctctactaaaaatacaaaaattagctgggcatggtggcgcactcctgtaatgccagctacttgggaggctgaggcaggagaatcacttgaacccaggaggcggaggttgcagtgagctgagattgcgccactgtacttcagcctgggcaacagagcaagactccatctcaaaaaagaaaagaaaccagcttcagcctgaacctgtacctggcttgccgtcgcaggcgttcctctctgcatcagctcctgtgggcccctctggttttagattccctcatcaatgctgcctcctgaggattttccttcccccttttcttcctttttcaagctatgtgctatttttttttccccagcatttctgtatctggagctggagaagagagccttcctcggctcagtccattatgtggctagaagtccccacttgccttccccacactccagtgtctccatctgtccagtggggatgagttcctcccgcttagggtcatcatgggaatcacatgggatagtcacagtgtctggcaaggagtggatgctcagtgaatgttggtctcttctcttaggacggctgtatttcagcagatgaggagatggggtgcagtggggcactgagcctgagctgctgagctctcaggccattgctgcgtctgagacctcgtggtgccatttgcatccctgggggaccaaggtcactctgggacggggtccctgccttctcagcacttacagcccacctgggtgaaagatgaactaatggatgaaaagggaaaaggtgaaaaagtgacaacatgaaaaatcttcaaacgttcagcagttcaactttttgtatctgctgttgccaggctggagtgcagtggcacaatcatggcttactgtagcctcaaactcctggcctcaagcagtcctcccaccatggcctccaaaagtgctgggattacaggatgagccacttcttcagccttcttttttttcttcaattagatataacttacagaaaagggcaccgatcttaaatacatagcctgaaaaaattttgacatatatttatacccatgtaaccgccacccagatcaagacagaacatttctggttgtgaggcatctgtgggcttccctgtgccaaccccctcccaaagccagaggagatgcccaggcttacattggccaccagagacttgctttgcctgttttgagcctcatataaatggaatcatatagtatgtaccgatcagtgccctttcccyggcattctatcgtgagcattagcacatatcatttagtagtctccaaaaacaatagcctcttggaatccagttgtccagagccattgttgcttaaaccagactccaaacccttctcagggacaggccctgggtggctctggtgaaaaagacaaggactctgcccttgtgggactccagtctagagagaacaagcactcaacggagcaggggacccggtggcagaggctgggctgaacaagggcaacaggtgtggggcgggctgatgtcagcccagccctgggacctccaagctgttaagtcaggtacaggttgtagcgggtcagggtgggtagaaggtcttcaccacccagtggcacccaactggccaaagaggctctatgaccaacagcaccgtggtgtgttttgaggaaggcaggagggaggctggaaccagcctgggcctgggggacctctgaggaaaacctctggccccggccttgcccagactttatctcatgtcatcctagaactgcctgtggatagctacgggtgtcccatttcctggggcagaaactcttgtccaaaggcaccctgtcgggcagaagggccaaggtgctcccaattcccagtgggkactgcgtggggacatctgaaattgatgccctcagcagacacttccagaagagagagggtggacctggggctgtygggatgagggtagtgggctgagggattggggtggtggtgacgtaaggggaggcctcttggggaggggcgtggggtgtgcttgggtccaaagctagaggtgcactgcagcaccctggcggctcctcgcctgtgctctgcgcctatgctaggctggggcagagccacggcgacgcgtgagtttccggttctcccacttggggccctaatctcaggctctccatttcctaatgtggaggagacactggtgcccacctgccaaggcagttgagaggaataagagaagctgtgtggggggtccctggcatctcgcccagagccagtgcgtgtgtgaggaaggagggctgttctttacccacggccactccgagagccaggcacgcgtcggagctgggccaaaagatgagaattgtgtccccagcccacgaacatgctacacggccttggacaagaccctcccattcctgatctctcctcccgttctgtgcagtgggaggccttgaaagaggaaaccgctagggagcctcctctctaggcttctgagcagatctgatagggccctgggacagaggggagccccgcagactctgggagggactccagctcccatagccagggtcctggtccagccctggagacgggataatggggatgggaggcaacttttgagcctctcctgtgggtcaggtgtgtcacttgccttatccggcccagtccttagagcgaccctgaggggatgatgccagcaatgtcatttaacaggggaagagactgaggctgagggaggtgrcagagctagtacttggagcagctgggggttttttgtttgtttgtttttgagayggagtctagctctgtcacccaggctggagtgcagtggtatgatctcagctcactgcaacctccgcctcccgggttcaagcagttctcctgcctcagcctcctgagtagctgggactacaggtgcacactgccacgcccagctaatttttcatatttcagtagagacgggatatcaccgtgttgcccaagttggtcgcgaactcctgagctcaggtgatctgcctgcctcggccttccaaagtgctgggattacaggcatgagccaccatgcccagcagctggggttttaattgaggtctgtctggcactaaagctgtggattggttgctggacacacacacacatgagaaagagggagagagaaagaagtgttcttagttctcattttatctcaaaaccataaagccccagccagaagtcactatcagccaagagggatggagggggcgatgagagatgcagaatgtcgtccttgataactaatcctaacaagagtgagatcacctggctcctttaaatttgacatattaagcaaaaggcaagcttcgctttccagcactgctattaaaccaagtcaggttcctgctgagcctactttaatgaataagctaagcagagttgataattgatggctggctatatcaggggaccccttctgctggaaggagtttgttgaataggttaaacattactctcttaattgtgctagcacaattcatttgctgccttagcagctcatctccctactgggtagaaggaatgagcatgggctttggagcgaaayccagccctgccagtgtctgcctgtgctgtgtggccttaggcaagttgctcgttgtctctgagccttggtttcttcattctgagatgtgaggagaagaccccagggtccacaggcttttctggaggatctggatggcacatatttataaaccacagatgtgttgtctgggtgggcaactattgcacccacctccaagttcaggcattccagcctgagcaatcagaagtggggggatctgtacgtctggagataggaggctatccttaccccgccaagtaactgcctctctctgtgtttagagaaagagaaagaccccaagtactggcgagaccaagcgcaagagacactgaaatatgycctggagcttyagaagctcaacaccaacgtggctaagaatgtcatcatgttcctgggagatggtgaggcccaggggcctgtgggaggggtggaacaggacacctagctaggagmcccgggagccaggctgagttgaaggggkctgtgttgaaggggctagggctctggaggaagggtgtttaaaaggatgaggggccaggctgtggattcaagaggcctgctctgccagacagccccctgaggatctgggggtgaagggagagaggggcygctcactgacatttacagagccatgcccagtgccaactgcccgagcctgccttggtaccgaactagagagcttctgggtacccaagcaggctgattggagaggcaggagcacgagagactgaggcccccactccccactgcagggwtggktgtctccacagtgayggctgcccgcatcctcaagrgtcrgctccaccacaaccctggggaggagaccaggctggagatggacaagttccccttcgtggccctctccaaggtgagccccatccccaagcccagttcaggtctgtatatccagtatccaggtcgagcatctgaacatgacagcagccagaggtcccctgaccccctgagccccctccatgcccaagcccactccccacctggagcagccactgccctgacttctgacaccatagcatcactgtacctgcttgcgggtgtgtgtttagagagagggtcttgctctgttgcccaggctgcagtgcagtggtgcagtcatagctcactgcagcctccaactcctgggctcaagccatcctcccacgttagcctcccgagtagctgggactacaggtgtgtaccaccacatatggataattagagacccccccaaggtctctaattcttgggcttaagcgatcctacagccttggcctcccagtcttgggattacaggcgtgagccaccatgcacggcctatatatgcctttttttttttttttttttgagacagtcttactctgtcttccaggctggagtacagtagcatgacatcagctcactgcaacctctgcctcccgagttcaagtgattcttctgcctcagcctcccaagtagctgggattacaggcatgcgccaccatgcccagctaatttttttatttttagtagagacaaggtttcaccctgttggccaggctggtctcgaactcctgaccccaggtgatctgcccaccttggcctcccaaagtgctaggattacaggcatgagccaccgtgcctggcctgtatacacttttgcatgaagttccagttcattcattctttcccgaggcagttcgtgaagttaattagactataggcatacctcagctatacttcgggtttggttccaggccactgtaataaagcaaatattgcaatgaagcaagtcacacattttttggtttcccagtgcatataaaagttatgtttgcaccctacagtagtcttttaagtgtgggatagcattatgtctaaaraaatgtatataccttaatttaaaaatatgctattgctaaaaaacgctaatgaagtgagctcatgtttttggaaaaaatgatgctgatagacttgcttgacacagggttgccacagatcttcaatttgtaacaaacacagtgtctgtggagtacactaaaatgaggtgtgcctgtactgacctaggttgttcaaggcagtgtrcactgccgggtagctattgctattggtggtggtgatagtggtgttatgtaataacctccagaccctgggtcaggccccaggctcacttctgggggagtagtggggactatggtrccttcygtgccttcaaggtgctctcaggctggtggggaagggagacaggcaaatagttttggggtctctgctaaacatccggatgtagggcaaccctgtgatggtggccgcagggcaggtggcagagaagtcrgcgctggtcttggccccacccttsccttccccagtccccttccccctcactttcactaccctatccccagamcccccactccttcaagaaggcccctccctctcccttctccaggactcccctgctccccaacccctygctggctcctgcagccccaggcccggagagaggcctccgctgaccccacctgagccccratcttccgccggacacttctctgtactttggagagmtaagrtcctgccccagtgctgccagggtgcagggaatgatggcaggaagcaggcagctaggtagtcctgtggctctggggggcttcagtgggcagtgggcctggtcaaggctatggggtcctctctggtncctcacgccccagtccccatggtgtgagtgtaggcggggtgggtgccactggggmgaaggcctggccatctcctgaccctcctctcccacctgcagaygtacaacaccaatgcccaggtccctgacagygccggcaccgscaccrcctacctgtgtrgggtgaaggccartgagggcaccrtgrgggtaagcgyagccamtgagcrttcccggtgcaacaccacccaggggaacgaggtcacctccatcctgcrctgggccaaggacgctggtgagtcgggggagcagtggggagcagggccagcttcgtggcctgtccaggcctcagtctttctgactgtgtcatgggaaggggctagaaaaggcttctctgtggggctcccagctctgatrtgctgggagtctgtaatatccatgggattccttccgtgacaggggaagctgagggtttggggttcactcagtggtgggttctggtcccagttcatttctctgagtcgattcttcatttgactataaaacgggtgggaacgtagccccctcatagggttggtgtgaggagggagaagtcagcccagggctagcctgtggggtgcagtccatggccacgccccttccctcctcagaattgggaggcccagcctgtgcccccagaagctttagtcaggggccaaggccaaaacacaggtgacaaggccaacatacaggtgacagagccacagtccacttgagatccctcaggggtcctgtgggcgccttgatgaaggggaggactccagcccaggtgctcacatctcaagggccttcggggtgaggggagagggttccagaggcagtgttctggctgctcggctacttggaagccactgccagacacctrctgctgtggatggggagactgagacccgggcaatcctcagaactgaagcgggggcctgtctttagcggggagggggargggagggaggaggcctctgggacaccccgatctgtggataaagccaaacccgcccctcctgcaccccagggaaatctgtggkcattgtgaccaccacgagagtgaaccrtgccacccccagcrccrcctacrcccactyggctgacygggactggtactcagacaacrrgatgccccctgaggccttgagccagggctrtaaggacatcgcctaccagctcatgcatracwtcagggacattgacgtgagtgctcgggggcagccgggcagggacggggtgaggcggggcctctggtgggcaggaggcctcaggcccaggctggcccggagaaagcagcctggcctggctccccacacacctgggaggctcccagcccattaggggatttgcggttgggcaggcaggcactgtgggatttctctgcggtggggctgcggggtgaaccctcatgtgaccgccaccacaccccaagaaccaggcatccagggatgattccataaattgaaacctggtgctgtgccctcctctgccccccactacaygggaggtggtgatggccaagtgtcgtctgcctgccctgcgtattcacatggtcacagatgggtacatatctgtacactcaaccaccagcatgcccggcaaagagctggtgtgtacagtggttggctagtgccagctctcgtgtttaaacttccgagttccagaccttgccctgcgtgttgctagctgtgtgaccttgggtcagttacttaacctctctgaggcttccctttcacaactcctttgtgaactgtacctgcctcataagcttatgccaagaactgattaagataatccctgtggagctcagcacaggacccgaggcctagcgagtgcccagaaggtggtggcacttacgcaggagccacatgtccttgccctgaaacacacttcaacaaactgagctgactcatggagacagaagtcatccatgtgacgcttactctctgttcttaagtgagaatgcccggctcgttccttttcaggcttttattgcctactgtgggggactgctgaggcgatctggggacttctgccccttgagcctggaatggggattcggtgaggggcagagaaagcccccctgcccagctacacctcacctctttctctccaccaccagacaaactcacctgccttcagccctccatgcactgccccccacaaatttctgggggctacttggcccctccacagtagagacccacgtctgcccttttcccagcatrgtggattaagtacccgctttcaggacacacagtgctgttggcccctttcactgaacagacatctgaggccaagccactcatcctggcttgccttcacccgacatgtggcctggggcgagttccttcmcctccctatgcctcagtttccccacctgtgcagcagaaacagagagccacacttgcttgctcccagggccgtgggaggccgtgatgaggtcatggatgtgagaacatttgttgtacaggcacagggtataattacatggggactgctcctcagaggggtttgtcagggacagcctgagcaggggacaggaacttgaaggaaattcgaggggagggaagatgtttcaggtgagggggtgggagatgaggagggggggccrcaggggccacgtcaaggggcacaagccagggagtgagtgaggacggaggacctgtgtgaggatccctttctttcctcctcttcctttctctcccagccccacctgcctctccgtcaccacccccccaaaagcctcccagtccccagactgtacatgaaacaaaaatcctggtgtccaccctgaaaataaatactgttgcttaaaaaaaaaaaagaaagaagagaaagaaagaaagaaagacacaaacctaaaccccaaagccaaacagcaagtctgttatttgggagtttaatgagcccgtgtgaagtcgctgccgggctggaaacgatgaggctccctgcaggaagattgggggcttygttttccactctgaagatgccaagaggtcaggttctgtgggaacagttgtggggggcggggcaagggacccgtgacctggggtccccttctccttcttctcccagcccaccctgccccctgagctcctggctgcagctgagagcaaggactctgcctctctgaaccacttgtttccccactccttctggcaatagaaatgccttccagtggcagccaccccctgggtgctggggacttccctgggtgactgcctttcctcctgtgatgggtctgtggatggatgttagttgcattttatttattattattattttgagacggagtctcattctgtctctaaggctggagtgtagtggtgcgatcttggctcactgcagccttcacctcccgggttcaagcgattgtcctgcctcagcctcctgagtagctgggattataggcgcacatcaccacgcccggctaattttttttttttaaatttttagtagagacggggtttcrccatgttggccaggctggtctcaaactctggacctcaggtgatccgcccgttttggcctcccaaagtgctggcattataggcgtgagccatcgcgcccggcctattttattttatttttgagacagggtctcactctgttgcccaggctggagtgcagtggcgtgatcatggctcacttcagtctcagcctcctgggctcaagtgctcctcctggctcagtcccttgaatagctaggagcacaagcctgtaccaccatgcccggctaagtttcgaaacaaattttatttgtatagacagggtcttgccatgttgtccaggctggtctcaaactcctggcatcaagtgatcctcccgcctcagmctcccaaagtgctgggattacaggcatgagccaccgcgcctggccagtcgcattttatggataggaaaactgggctcacagagtttaggtggcaggcccttggtcagtagtcgatagagtcagggttcaaacccaagtctgacttcaaagctcacggccatgaccatggcctggacccaggctggtcctggggcacctttcccacctctccagccatcctgtgttcctggccccctgtgcattccacaaaacctaggatctaaggtgggagacagagtggaggatagagcaagggacctatgagatgcaggcctggaatggtggatctggggccagtgtcagccaggctctgcactcccaaggtgtcagccaggggcagtggcccgggctggcacccgcggtgacaagagaacactagtgtggtggtcaccgcaggcggctgctgttatgctcttggccctactttaaaaatagtcagaacttcaaacatggactcccaaggaaaacaaacagtcccgcgtccgtctgcccgcacacaccagctggtgggtaaaattagcctggtggtgactacagagccgtgaggcccggccccgctgtttgcccaggctgcggtgggctggctcccagctgtgggctgccccaaagacctccctggctggagcctctccctgcacgcattcagccttccaccgtgggagaggaggctctgggagtccctgccctyagctgcacgaatacagcagggccctagtgccayagccggaaaagccctgggtttgaatcctgatgctgccacttcctggctctgtggccttcgggggaaaaaaccaatttctgtgcccatttttttagttggaaaacaggtggccagggtttattgcagccttggtatgaagttgagtcagaatgtatcttaaatgcttagtgcctgacacacagggaacgctctgtaaatggtcygattcttattcgagtgggagttctgtggattccgggaagccaagtaaggtaagttatcagctcctccaatatccctagaagcgccaaaccaccgtcccaatagactcgtgatttcatctccccacgctggacaagtaaggcccagagatgactgaggcctggctcaccaggctgggaaagtgtccacaccatctccagggactccaggagtccaggttccaagccgaggtcactggggcttctgggcatcttggaaccctgcagaagtgatggctcctgtctcttttaggtgatcatggkgggtggcyrgraatacatgtaccccaagaataaaactgatgtggrgtatgagagtgacgagaaagccaggggcacgagkctggacgkcctggacctcgttgacacctggaagagcttcaaaccgagayacaaggtagcctgtgctggggccatgtggctgcagaggtggcctgtgatngggagaggctgtgtgacccctgctctgaagntctgttgtcctctgtagaaagggcatcggaaatctttcctccatgggctcaaatggcctaagagatatacaagcagtagatagtcagtgactaatcatttccttcccttggaggggataccagagagaggnrgatggtgaggaggaggctgggccagggaataacctgcgtggacattsagtcaccctgagnacctattgtatgtaggcacctggcggggcatgcgtgaggcacagaggctgagycagatggccaaggaaacatggaatgctgtgtgcctgcatgggggacgcctggctctgcaggcgccctggggggacagatgacagggaggagccaagaagctctgggcaagtaggaggatggagggaggaggcagcgctggatggatcaggggaggacatggttggccccagtgtgcaagccatggagggagcggagaagccctccacagtgagtcccccttggctgggggatggaatagattggggaagggaggctggaggamggaatagattggggaagggaggctggagggacctctggaaggaccccaagctccagctccttggagtggcctctggccctttaaatctgagctgctggcctgcgggcctggggcagctggggtctggaaatgactgtggtcasggctgaagacagtggggagtagcctggcagccactttgatgtcactctggggttgggtttctgcaagttccaggactggcccctggggaggcctcgtgggatgaggctgggccaagaacraggtgggggtagggactagggaagggcccccgtggggwtggtgggggtgyggaactgagtggctttgaaccctttccatcccttctgagtcagctcaggctgggccagagccccctccaagctcaagccagagagacaccagcctcagtttctctacgtggcacatggggccagagcttcatcctccttgcccaggcagggtgcttacccaggarctcggtctagacctctaagacggggagagagcgtctacaccatggccccgagcctggccacattgggtatcaggtcccgtgtaggccccacatccctagaaaatcatgccttaagagtgggttttagagtcagtttcacctttaccattcagtggctacgtggtctgtgtgcctyggtgccctcatctgtaaagagggaataacaggaacaaccctggagggagagagcacaggagagccacctccaggaagcaggggctgggagggggggtgcggagccccactttctgagcctctctgccctcctccccacaacagcccctgaggcttgcaaagccactgatcccactgtcattgctaagagaaggcagggggtcttctaagggcacacagcagatccttggtagtgctgggacccctggtccaggcccacatggtgccctctccaggcctggcctagctggcttctttctgtggactttattccctggggaaacagccacgcctttatctcccctcccagatggggtccccaaagcagagctggggctttgcttcctccctggccctccacggcctccagaaaacagcccacacctgtcagcactcaaggcccctggagacctgtgcctggctcttctttgccccatgatccctcctccctggaatagccttcctgaccctaggctgttcaattcccacttgtcctccagggacccattagaacatcacctccaccaggaagccctccctggtcctgtgtctgggctcacggcctccctgggctctatcagaattctcatccccttgcattatacattataatgggctattgattcatcatttcttgaggtcagggatggtgggtcctcagggagagatttttaagtgagggaaggaaacaagtaaaggcctcagactctgatagctgctggggtcagtccttccgactctccctagccccnggcatgtgctgacacagcccttcctcctagcactcccacttcatctrgaaccgcacggaactcctgacccttgacccccacaatgtggactacctattgggtaagtggagggggtggagnggaggatgcatggctcggagcctggtggccngagctgngtgtggccagcacctggggacaaggccctagcctgacgcccacttaggggcctctgctcttgggcttcaggacctgggagaggcaaggaagggggttctggttcctggaattaggcctgaaatctgctggctgtgcagggggattagcctcattgggcacaagaagaaactgaagctcagagaggggagtggcccgcggcatgyggcacaastgacagcggtacggcccaggcaagtttgagccctggctgggaactgggacttaacagctcctgggctatggagcctgggacctggagtcagctctactgtgtgcatggccagggcagaagccagccaagttatctctgcccatcctgacgattgccctcctccccaggcagtggggagcatgtggtgagggcccaggggcagcttcaggtctggtgggatgcagccctgagcaccaccatgcagctatccgggttttcttttccagctgtctgtagtgccaagcaagtggtggcaaaatctcctgcagacatttcccaaggaacacagctccgcgtcctgggtgtcattagaggttatgggctcagagctgtgcacctggtgggtcctccagacacatgcacacagcctcttgcttgcctgggtcacatggcacacacccagtaccacatgggctgtgcatgcacccgtgtatcatgctggttttgctcatggatcttagagccagagtgctgggttcaaatccagctctaccacctctaagctgtgtgaccttgggcaagtgatttctcctctttctgcctcagtttcctcttctataaagtagggataatgatgctcccataaaatggagatagtgrtggggctggagacaacccctgggttgtcatgagcatgacatgaacttgtgttgtataagttatctgttgctgtataacaaattatctcaaaacttaggccaggtgcaggccgggtgyrgtggctcaygcctgtaatcccagcactttgggaggccgaggtgggcggagcacaaggtcaggagatcgagaccatcctggctaacgaggtgaaaccccatctctactaaaaatacaaaaaattagcctggcgtggtggcgggcgcctgtagtcccagctactcaggaggctgaggcaggagaatggtatgaacccgggaggcggaggttacagtgagccaagatcgcaccactgcactccagcctgggtgacagagcaagactccgtctaaaaacaaaaaacaaagaacaaacacgaaaaaacttaggccrggtgcaatggctcgcgcctgtaatcctagcactttgggaggccaaggcaggttgatcacttgagcccaggagtttgagaccagcctgggaaacatagcgagacctcaattctacaaaaattttttaaaaactggccaggtgtggtggcgcacacctttagtcccagctactcaggaggctgaggtaggaggatccacctgagcccaggaggttgaggctgcagtgagttgtgattatgccactgcactccagcctgggtgacagagcaagaccctatcttaaaaaaaagaaagaaagaaaacattagccaggtgtggtggtgccagccactcaggaagctgacgtgggaggcttgcttgagcccaagagtttgaggctgcagtgagctatgatcatgccactgcaccagtttgggcaacagagtgagaccctgtcacaaaacaaaacttaacagtttaaaacaagagtaaacatttattgcctcactcaatttctttgggtcaggaatctggggacagcttagctgggtctcccatgaggtcacagtcatctgaaggcttgactggggctggtgcttccaggatggttcactcacatggctggcgagttggtcttggctgttggcaggaggcctcagttccttggcacattgctctctatagagcagcttgagtgtcctcattacatggtggctggcttcccacagagatccaagagtatataaacagaagctacaacattttatgccccagccttcgaaatcacacaccatcatttcggtggcattctatggcatacaaaggctagtgtgggaggagaccacacaagcgcgtgaattccagggggcaggggttattgggcaccatcttggaggctggcttttgcctgcttccaaagcgctaacagcatgtggcaccaagtgaaccctgtgtgcatgggagctattgttcggctgtgtacccactcacagaggggcagggtgttctggaaggacaccagaattggaaggacaccagaatcagaagcaccagcatgggacacatggaactttgtgccatgggcaaggaatggatcattctccttatgtcacaagtgagaaaacggagcccagtgagcaggagggacaatgattccaaaccttctgctgtttcgctgcacaggccaccgtgcccttcaaatccaacatgtaaatgcacacacactctagcggccccatcgagtccaggctgtgaccctctgccttggggccacagtgctgtgtgctgagccctgcaggctggaggcaractgactgatggatttgaaccccagatctgccacttctcagctgacaatagcaagttatggaacacctctgggcctcagtgctcctcatctgtgaaacgggcatggtgatcccaccgcgccatagtggtgggaatgaaaatgaaaggaattggggctgggtgcggaggctcacgcctgtaatcccaacactttgggaggccgaggtgggcggatgacctgaggtcaggagttcgagaccagcctggctaacatggtgaaaccctgtctctacttaaaatacaacaaaaattagctgggtgtggtgatgcatgtctgtaatcccagctattcaggaggctaaggcaggagaatcacttgaacccgggaggcagaggttgcagggagccgagatcgcaccactgcactccagcctggacaacagagtgagactctgtstcaaaaaaaaaaaagaaaagaaaagaaaaagaaaaaagaaaaaaaaaggaattgggggcctaattctgggcccacaaaaatcacccagataaggatcctcccagccaccatactctaccccaagctggctgtggggagcctgcattccctgagacaccccagcttccttggagtcctcctagccgggtcacagcctctcagcatccacatcctcctggcgtcctcctcaggtytcttcdagccagggkmcrtgcagtacgagctgaacaggaacaacgtgacggwcccgtcactctccgagatggtggtggtggccatccagatcctgcggaagaaccccaaasgcykcttcttgctggtggaaggtagggaccccgggtctgctgagagggggctgctggaaacacggccctggtgtcaggatggagaagtccagctcttaaagggaactgactggtttgggggtgamkggagaggtccctttaggagaatrggttgtggaaggagacgggtggcrctgtagacactcccagcccagcaagctgctctcctttgggcatggagatgcaagttaggttcagcaatccaggaaggcttcctgggagaggaggcagatttctcccctttggtagtctttcttggggacctggccctgraggggyaagcagcccctcagcctcactgcccagaaaagcaaatccgcaggccccggctttcccacgctgtgtgctgatgttcccaggctctttcagcgccggccaggggccttgcagacagacctgaattcttggcctggcgctgccatctgctggcggtgtgacctctacctgtgcacttctgttatgtgaagccaaaaatagcatctgtctcctggagagtgattcgcctccattgtgttcagagacataaagtacttggaacggggcccagtaaagaataaaccgtgtttctattattagccttrttatggctacacaatagttaaggcgggaacaataggaagtgtgaggaagtgataaagattccagaaaccttccagtgctaacagcccttgcccaccgcagttcctcatgttgccctgctaacatcggtatgtatmcacacacatgcacacacgtgaacatgtttgcacatatgctccccacgcatacacacatgctcagcgcctccgccttccagaggtgagcgtccgccagcccagcttggctgctttcttgccaaaccccggggttcccactcgagcacagcggtcttggcctggccccgaacaggcctctgacgccaaggagccagccagaaaccagcggtggtgagcacgggctcccccgggagcggtttcctttgtgagcraggccaggatgggccgcccaggctagctgctcccagagccacaacaaagggaggacacgccctgccagcctgccgggccaccgcgaggctcagactggtgggaacagagggctgcctggcgcccaggaccctccaagctgggagtgtccaccaggcagcgccctcctgttagcaagggargtgttcctttaaggtcacagagccctcggctgctgggccaagcctccagccaggcccctgcactcacccggaggtgggaagcgggggcggaggctgcgagrgttcaggcttcggcagggctttgtggaacctgccacaggcactgcccaggcactggggactttcactacctctgggagctccgtgctttctttttagaggggatgatttgaggtagagatgaaaaacggggttaggacgagtcacacctgaattcacatcctggcaaatcccaccgtgggcttccccacactaggcctcagttgctccatctgtaaacaggactgatcatattcctctctgcccagcattgctgttcaggggaaaagagacatgggtgtgtcgtgcctggcacattgtagggattccagcgtgcccccttccctacctcccaaaggcttcagtgcctccttcaagcagctagagacagtgctgggaggggcggtgggaggagtacagcttcccggcctggtgaatttgattacacatctggactttgcagcccccatgcatgtgcctttggcaccggggctgtccctctctggcctccgtcaggttgaatggctgcgtaaaatgcctaggctgtggtgctagctcagagtggtgcccggcgaaggttcctgtccttccctagctaacaaaggttaatccascagcagtgttgtggggctggggagcagatcttcctcccctcctccctcaccgaggcctttgccttggtgtcccaaggagrcagaattgaccacrggcaccatgaaggaaaagccaagcagrccctgcatgaggcggtggasatggaccgggccatcgggcaggcaggcagcttgacctcctcggaagacactctgaccgtggtcactgyggwccattcccrcrtcttcacatttggtggatacacccccyrtggcaactctatctttggtaggtgggccttctttggggtggacactcctggggtctcctgtctacccacctgggagcaggagtgggtgggagagccagcaagcccagagcatggtggggactcaatgacaactgggtggggaggaagagttactggggatggggagaaaatgcagggtgaggcaggggagtgagttgagtggtggtcgggtagacaggcaggtgggtggatggatggccacgttgaccatggctgggcgagaacgtggatagatgaatgagagaggatggctggctggatgatggatggatgatggatggatggatggatggatggatggatggatgatggatggatggatgggtggatggatggatggatgggtggatggatgratgggagggacatgggtacaatgaaaactggggaatggttagttggaaataataaggtttagaaggtggcttcttggaggcattgcagggcccttcaaagaagatcccaggggttaccaagccaccaaggagcctaatmtgggggctggggactgtactcctggggccccagcatgacccctgaacaccccctccctgtgcaggtctgkcccccatgctgagtgacacagacaagaagcccttcactgccatcmtgtatggcartgggcctggctacaaggyggtgggcggtgaacgagagaatgtctccatggtggacyatggtgagacctccaggacccagggctgggaggggacagggcacccctyggggatgggcttgggaatagggtgtcagcttgtggtcaaggtcaggggtctcagaatgactggggcttgagtcccagtttgattgttgagtcccaggttgtttgattcaaacaacctcagtttgaatcgccttctacaatctagcagctctgagactttgggcatgtgacttcatctttctctgcttcagtttcctctctaaaagggttctacctttgacggttgtctgaatgaccaaatgggtctgatgagcttagcatagtgcctggcacaagtaggtgctcaatattttatactcatttttcttggccctataatattccagtatacgagactttgcagttagttcatcccatcccatatcattcattcgttcttgatactcccagtggttctagggggtctaaagatgcagcaatggtaagagtctccccgtcaactctccctgctaatccaagcagcccaaatgaggttaattttctctgttgggggttgagaatgcagactcctgtgtcagaacaggctcaggttcaaatcccgtggccttaggcaaaatgactttcccacattgagcctccttttcctcttctgtgaaatgggagcrttcaagscagcctggaagggagatggaaaagctgcgtgcgcagcgccaggcccctggcaggctctcagcaggtgtttcccctggcccacagctcacaacaactaccaggcgcagtctgctgtgcccctgcgccacgagacccacggcrgggaggacrtggccrtcttctccaagggccccatggcgcacctgctgcacrgcgtccacrrgcagawctacgtcccccacgtgatggcgtatgcagcctscwtcrgggccaacctcggccactgtgctcctgccagctcggcaggcagccttgctgcaggccccctgctgctcgckctggccctctaccccctgagcgycctgttctgagggcccagggcccgggcacccacaagcccgtgacagatgccaacttcccacacggcagccccccyctcaaggggcagggaggtgggggcctcctcagcctctgcaactgcaagaaaggggacccargaaaccaaagtctgccgcccacctcgctcccctctggaatcttccccaagggccaaacccacttctggcctccagcctttgctccctccccgctgccctttggccamcagggtagatttctcttgggcaggcagagagtacagactgcagacattctcaaagcctcttatttttctagcgaacgtatttctccagacccagaggccctgaagcctccgtggaacattctggatctgaccctcccagtctcatctcctgaccytcccactcccatctccttacctctggaaccccccaggccctacartgctcatgtccctgtccccaggcccagccctccttcaggggagttgaggtctttctcctcaggacaaggccttgctcactcactcactccaagaccaccagggtcccaggaagccggtgcctgggtggccatcctacccagcgtggcccaggccgggaagagccacctggcagggctcacactcctgggctctgaacacacacgccagctcctctctgaagcgactctcctgtttggaacggcaaaaaaaaatttttttttctctttttggtggtggttaaaagggaacacaaaacatttaaataaaactttccaaatatttccgaggacagagctgagtctttgtggtcagtgagaaaaagactgaaagaagcttatttctctgggaagaactggcctcagggcccggggtacaggtgggttggacagggtggaaaggccttctgctgtcctgggggcttcacactccctacctgtgccactttggacacataggtttgtgtctcagttttcttgtctgtgaaatgggagacaacccccttctgggttgttgtgaggattaaagaggaggctgggtgcaatggctcacacctgtaatcccagcactttgggaggctggggcaggtggatcatttgaggtcagcagttcaagaccatcctggccaacatggtgaaaccctgtctctacaaaaaatacagaaattagccaggcatggtggcgcgcacacctgtagtcccagctcctctggacactgaggcaggagaatcgcttgaacccaagaagcagaggttgtagtgagccgagacagcgccactgcactccagcctgggtgatggagtgagactctgtctcagaaaaacaaaacaaaacaaaaccaaacaaacaaaaaaaaacaagataaaagaggagtgcctgtatgcccagaaacccacagcaaggaggacttcaggggcccagtggcagcccggctgcatgatacccacaaacagcactacataccttggcccatttcattcattcaacaaatacagactacgtgctaggcatggtattaagtcttaagaattgttggccgggtgctgtggctcatgcctgtaatcccagaacttcgggaagctgaggcgggtggatcatctgaggttgggagttcgagaccagcctgggcaacatggagaaaccccgtctctactaaaaatacaaaattaggtgtgcctgtaatcccagctactcgggaggctgaggcaggagaatcgattgaacctgggaggcagaggttgcggtgagccgagattgtgccattgcactccagcctgggcaacaagagtgaaattccatctcagaaaaaaaaaaaaaaaaaaaaagaatttagtggtgaacatgacagacagaaggctgaacagacagagggctccttgccctcacagagcgtcagcccagcttagcaactgtgatctttccatttctcatattcacaccttggtactacactcaggcctgcagccgaccttgttgggatacagacttgtccaagtttgctcctcttgcttcattgaaatgaaaattcctttaataaggataacaatcatgacaattaacactgatcatttacaacatgccaggtctgtgcttgacgctttatgtggattcattgcatttaatcctcattaggaaataggcccccatcatccacatgtataggtgaggaccctgagggtttgggaagtgaggtgattgcccaaatgcccccaagctgtggagctggtatttgaagccaggtgtgtcctattccaaagctcctgtacttaataccatcctttatttggttataacacacttcaaacctcttgtcaaccaggtcctgaagcagacaatactaatgactcatgacatacaccagttaaatataaactcaggaagatgagaaaccgtatgtcagaagtggacttcttcaggattgaaaatgcaaactaagcagatttgtctctgagcttcctagcagtcctgacaaaaaaaagggaagcacagccaagctgacactgggataaaagatgaaactataggccaggcacaacggtgcatacctgtaatcccagcacttcgaaaagctgaggtgggaggattgcttgagggcaggagttcaataccaacctgggcaacatagcgagaccctgtctctacaaaaaataaaaaaattagccaggtatggtgatatgtgcctgtaatctagctacttgggaggctgaggcgggaggatcactagagcccaggagttagaggctgcagtgagctatgatcatgccactgcactccaggctgggtgaaggagcaagaccttgtctctagttaaaaagaaaataaacagggctgggcgtggtggctcatgcctgtaatcccagcactttgggaggctgaggcgggtggatcacgaggtcaggagatcgagaccatcctgggtaacactgtgaaaccccgtctctactaaaaatacaaaaaaaaattagccgggcttggtagcaggcgcctgtagtcccagctactcgggaggctgaggcaggagaatggcgtgaacctgggaggtggagcttgcagtgagccaaggtcgtgccactgcactcactccagcctgggtgacagagcgagactccgtctcaaaaaaaaaaaaagaaagaaaagaaaagaaactgccaggagtggtagctcacacctgtaatcaaactactttgggaggctgaggccggaggatcccttgagcccaagagtttgagaccagcctgagcaacatggcaaaacccatctttatgaaaaatacaataattacgggggcatggtggcaggcacctatagtcccagctacttggagggctgagggggaggatcacttgagcctgggagacaggggtcgcaatgagtcgagatggtgccactgcactccagcctgggcaacaaagtgagaccctgtctcaaaaaataatacatagaaaaagaaaagaaactatatgcatacattctggccaggaccaagaggaaacgcctcatcttgaactgtacaatgcagtgttttccaggtgttattttcacaccaccttcacaattgttgccgtatccatactattatttccttttttttttcttttgagacagagtctcgctctttcgcccaggctggactgcagtggcgcgatctcggctcactgcaagctctgcctcccgggttcatgccattctcctgcctcagcctcccaagtagctgggaccgcaggcaccaccaccgtgcccggctaattttttgcatttttagtagagacggggtttcaccgtgttagccaggatggtctcgatctcctgacctcatgatccacccacctcggcctcccaaagtgctgggattacaggcgtgagccaccgtgcccggccatatactattatttcctaaacactcctttaaattgacatttaagcagtcagtttttaaatgttcccagtaccacctgaagtcaatttacatgtctccagggtgtgcaaaccacactttgttttgttttgtttttatttccataggttttgggggaacaggtggtgtttggttacattagtaagttctttagtggtgagttgtgagattttggtgtatccatcacctgagcagtatacactgaatctaatttgtaatcttttatctctcattcccttgccaccctttcccccagagtccccaaagtccattgtatcatttctatgcctttgcatcctcatagcttagctcccaattatgagtgagaacatacgatgtttgattttccattcctgagttacttcacttagaatagtagtctctaatcccattgctgcaaatgccattaattcattccttctgaatgagtagtattccatcatattcatatatatatatatacacatacacatatacatgtatacacacatacacacagtatatacacatacaccacagtttctttatccactcattgattgatggagatttggactggttccatatttttgtaattgcgaattgtgccgccataaacatgcgtgtgcaagaatcttttccgttgaatgacttcttttcctctgggtagatacccagtagcaggattgctggatcaaatggtagttctactttcagttctttaaggaatctccacactgttttccatagtggttgtactagtttacattcccaacagcagtgcagaagtgttccctgttcactgcatccatgcaacatctattatttttttgattttttgattatggccattcttgcgggagtaaggtggtatcgcattgtgataccaccttgatttgcatttccctgatcattagtgatgttgagcattttttcatatgtctgttggccatttgtgtatcttcttttgagaattgtctgttcatgtccttagcccactttttgacgggattttattttattttttttgagacggagtcttgctctgtcacccaggctggagtgcagtggcgcgatctcggctcactgcaagctccgcctcctgggttcacaccattctcctgcctcagcctccagagtagctgggactacaggcgcccgccaccacgcccagctaattttttgtatttttagtagagacgggatttcaccgtgttagccaggatggtctcgatctcctgaccttgtgatctgcccaccttggcctcccaaagtgctgggattataggcgtgagccaccgcgcctggccgtttgtttttttattgctaatttgtttgagttccttgtagattctgtgtatttatcctttgttggatgtatagattgtgaagattttctccctgtgggttgtctgacaaaccacactttgttatcttgcattgggtttccacggagacagaacctgagacagaactcagcacaagcagtttgtttattagaagaacccagaaagctgcacaaattggggaatgaggaagcaagacaggaaagggaaggatgttgagaaagatgtgtttttaaacaggttgccactgaggctggccagggctcaaccccacgaaggacctctgggagatggtgtgggagcgacacttcagagatatctcacccaaggggcgagggagcaggggtatttattcttcaactctcacctctcattggccgagggctgctcctggggaaattaacactggcactcctgaccttccccatgaagttctgagagaaagcctccaggcctggtgctggaacatcaactgctcaaaggacacaaaccagcagcttctgttgaactttgggatacactgctggggtagaaagcgcaggctgtgagtccgagagatggaggtccacatctctgctccatcactttctcagttctacgaacttgggcaagggattcagcttctctgacgccctgtgcctagcgatgcccagcacgtagtgaggactgagtaccccattaggagccaggagttcctcctgcccacactccaggctgtgggatgacgtgtccttcaagaagcagagattgaggtgctcaggcacccatggcttcagggtctccccacgctcaggctgggccctgggtcactcatcaccttatattttaactgctgtgggccctgagtcctaattggagccggggttcaggcataggtcccagctccattcacaactagggccggtagccatggacctagaccctaaggatgacagtccagacccacagcacagggatttcttttgccctcagatgccttctcccggaggaagaacaaagatgagctgacatgccctcttgtattcactgagataaccctgccttctgttaaaggtaaattcagaaagctcaataacttgacacctgaggatgtattcttacctccaacatcagcgcccctgctcaggtgactgggacccaggatctttccaggggtggctctgccaccccctgtaagttctggatgtccttcctatctggccagcaccttgatggtgggaaccacgcctgctttttaaccacttaatcctggaagtgacatacatcacttccgcccttagtgcattggcaagaaccrgtcctgtgatccttcctggatgcgaggaaagctaggaaatgccgtcttcgcttgggctaccgctgccaccaacaccaacacagcaggttctcatcctgggggcagaatcacccccacatcagttgaaaacctctgctctgtaggaaggaagaggcgtgggagactgggatggtcaacttggctcaggctggagacatcctccaactcacacactccccagccattgctgagcacgggtgccgtgttttaaaacactga

SEQ ID NO: 95816 - DNA, 24544 bp, Homo sapiens
  misc_feature (1)...(24544): n = A,T,C or G
gggtggggggtctgatagtttcgggatgattcaagtgcattacatttaatgtggacttcatttctattagtattacattgtaatatataatgaaataattatataactcaccatcatgtagaatcagtgggagccgtgagcatgttttcctgcaactagacggtcccatgtgggggtaatgggagacagtgacagatcttcaggcattagattctcataagaaccacaacctggatccctcacacgtgcagttcacaatagggtttgccctcctatgagaatctaatgccaccactgatctgacaagaggtgcagctcaggcaataattcaagtgatggggagcagctgcaaatacagatgaagcttcacttgctcacctgccgctcacttcctgctgtgcagcccagttcctaacaggccagggactggtaccagtccatggcctgggggttggaaacccttgtcttaaagcatcctgaaactagagcttggggagagattctgattggctctgcctgggtcatgtgtctactcttgaaccaattactgtgtttaggaggatgtggttctgtgattggtgcagtctgggtcacatgtccagctgtgtaacaacaggatgggagtcagatgtagtatagggcactatgaatgctcaccccactgggatgtcaagtggaagaaggacaattccctgaaaagggagatttagattgaagaaaacaagtccataatagtggggaaaaataatagctcttggtgataagaaggtttggattccagttctaatgatcacaaatgtacctgtgagctgaggatagcaacgcattgcctattctatgaacatgtcgtgatagatttggggcttgtgtatcaccccggcccccctgttggagctggcaggacaccctgttttgagctttgtaggacagaataaggcacttcccatctcaaggaaggggaggccgggtgcaggcttggctggagactgacttcctggccccgagctgcctgggatcccacccccgagtccaggatctacggtgtagggtacaccagagtgggcagtgcctgctccagccctgtgacaacttgggggaagctcggggcggcccccactgccccaggataccagaggctgtggagccctgtgccaggggcacaaacaaggggacgtgaccacgggcatctgcatctcggcaggaggasgaccgctacaggctcatgctcagtcggagcaacagtgaaaacattgccagcaactacttccgatctaagcgggccagccagatcctcagcacagacgccaggaagagcctcagtgagtgtccctcccctgtccccaccctctccacacaactgggagaggcgtgaaggggatagttttgaagtcagacaggcctgggttcaaaaactcctttacctctcggagcctcagtttccttagctacaaaatgaggggggtaacaccaacttcttaggattaggtgatacgaggtgaggaaacggcccagcccgggcgctggtgctcagtacagagtctcctctttgctccagtcttgtctcccctggcccctagtaggcactcagtgcatggctcaggggcctggctggggatgcacgggtttaggcctcactagttacgcgccagcttcctggcgagtcacacgccagcattgtgacttcctccaaatgcagattgacttcacttatcaagggccacaaatgcaacacacgcttttaagaattaagcatcacttcattttatctgcttttaaaactgaaagcaaagcccgcagagcttccaataaaatagcaataaaaagcaaatcttggccaggtgcagtggctcacccttgtaatcccagcacattggcaggctgaggcgggtggatcacttgaggccaggagttcaagacaagcctggccaacatggtgaaaccccgtctctactaaaaatacaaaaattagccgggcggtagtggcgtgtgcctgtaatcccaactactcagggggctgaggcaggagaatcgcttgagcttgggaggtggaggctgcagtgattcgagatcctgccactgcattccggtctaggcgacagagtgagaccctgtctcaaaaaaaaaaaaaaaaaaaaaaaattagctgggtatggtgatgcatgcctgtaattacagctacttgggaggctgaggcatgagaattgcttgaactcgggaggcagaggttgcagtgagctgacacagtgccactgcactccagcctgggtgacagagtaagactttttctaaaaaaaaaaaaaaaaaaaaaaaaaaagagcaaatttgagttctatatattgaggttatttaagagacagaatgggtggggsggggggaataggattaattgagtgcctggcattgtgcccatgttgcagatgaggaaactgaggctcagagacgaagcagcttctctaaggttgtaggaagcagtggagctgggctttgaacccagacttgtctggcttgagatcccaggctgcctcagtctgatgctttaaaaccccaactccccagcccagcctctttggatgcagacatagttgctgggtctgagacctcagccagagcagcctcgcagagcctggggtcccagctgcagggccagggcctctggctgggcaggggggcgggagtggggtgggccaggctctccatcctacccacttggggcattttctctccatccctgcgctcctggcttaccagcacctctgccctcttccccacagcacatcacaactcgccaccaggcctcagctgcccactcagcaacaactctgccatcccacccacccaggcccctgaaatgccccagccccggcccttccgcctcgagtccctcgacatccctttcaccaaggccaagcgtaagaaaagcaaaagcaactttggcagtgagcctctgtgagcacagctgcttgccattgcctgccttataggcatgtagagactgccaggccctcccagggcagccccaaccaggtctcctcccacctgccacacagcgctccggggcctgagggctccctcagccctgggaagacacattcccttccctgttccccagagagcccacctccgccctgggcaggagcccctcggaggctgtatagtcctccttagagaggcctgctccagctgttcataccacatcagtgtttccgtctgctcacctgccacagagcccacacccatgcccaccagtgttggtctttgcctcaaagcctgagacctgcttcacggccttcaccagccctgatggagagggcagcagctgccacgtggaggaagctcaatatcagctgggaaggaactgtgcctctgtctgactggccccacttcctaagcactgccctgccccatggggtggcacaggggtcccacagcaggtcttcctgcactgcccacccctggctggtctgtggcccaaggaaggccactccacattaagctgcccaataaactgcttttaagataagctccccttctctgaccctctgacagtgtcacttggggcccctccctgccattgtggcctggctattccagggaagttctttctggaaaaagggttcttttgcctgggacctccagggtttctgcagctccctataatagtgagtacattcttctgggaagagcgtctgaattttcattagattctcgaaggacctgtgacccaggaaagcaagaccccttgttgtggaaaatagggccatgtctcactgaggccagaaaagggcccagcttttgacagtcctgggggctgtgctgggactgggtgtcctgatatagccagaaatgaatccaggccaccctgtttgtgcccacataggggggtacctaggacacagccttccccttgcacactctatcccaggccagtcctgtggggggctccacaatctaagggaaaaggcttggcctttggcacagtcctggaacctcatttcactctgagcctcatctgtgaaatggggataacgcccacctcacagggttaatgtgaagattaaatgagatagtatgtaaagctcctggggcatagcaggtgctctgtgttagtcctcctcctccctattttgtatcaatttctatggcaggccccacaagccacatgcctgggccaaggagcacacactcttgagaagctggggtgggggtgtttagacaactacagagatatccagccagaggcaggcagcagtacgtcctgagtcagagccggtgagatcaggtcttttaaaaattatttttattttctttgagactgagtctcgctctgtcacccaggctggagtgcagcagcgggtaatctcagctcactgaagcctccacctcctgggttcaagcgattctcctgtctcagactcatgagtagctgggattacaggcgcccaccaccacgcccggctaaattttttgtattagagatgcggtttcaccatgttggccaggctggtcacgaactcctgacctcaagtgatctgcccacctcggcctgccaaagtgctgggattacaggtgtgagccaccgcgcctggtcgatatcaggtctttatggggaacaaagagtgcctttctgaagggagcagtgctgggtggggctcccagaaaggatggagaagatcccaggaggtttaagatgggggtgtaaggagggcgctcctggcggagagcgctgcaaagcaaaaggcaggaggtgtggaactcagggtgttaaaggctgggccattcctgttccatggaagccctgagcaaggactgagaggggacgaggctgctgagatgagtgtaggtggagacctgagagcaaagagccttggggtgtccctgtgccgtggccgactcttaacagtttaacactgttggctctgaattagaggcgggcggatgtggtactgtgtgtcgagggtggaagggcaggagttagggtgcaggagccaggagctctgcagaggcttaacttggggcagagccagtgggaatggagaggaagtagagtccgttaagaagatgtatggagggaggttttgatttttgctccattcttgggttggtggacaagtgtccgaaaggaactgctaccttctgtctctacagttgccgtcaccattggcctcaggattgtggttgggacccagaggacggtggaagtcttgctgcttgtggtagtttttacttaaacccctggtggacaaaggcaggtctgagatgaaccgggtggcctctgtattaacctagaagaggtgggagccacattattgaatggatgttcactctagcccggcgctaagtgcttcaaaacctgccatgttcctcccaagagcccagagatgaggtaattaaatggctgttcctaaggcacacagataaacagcggagctggacctcgtccttagtcctatttacagccagggaaactgtcctggagagaagtgcaatgcccgggtaacggctagtgagagatgcaacttggaaatggaaccatcgctaggccagtctactgcccatccacagtctccagcgtgggccaccgagctgggcagcacaggcccgtccatgccatggcccctggagccgtgagcggcaggaaggaggctccaagtgccctgaccctgatcttattcttccaacycctcctccctagaratggtggaggtggggcctagttcctggtcccgagccttcccaggcccagtgaagaccccgccagcaagaaggtggccaaacaccctgtccaggacgcgacggtcaagcccggggaggaccccgcaagctccagagggaagtgggctccagactagggggcgggaggccggcctgggcggagcaaagggcgctcggcctcgttgattggccgcggctgcagagctgtctctctaggatwgagccttttctttagggggacggggccttgattcactcccaccaatagggttcaaggaatccacctcccaccagggcacttccggcggcgctctccgcgccttatcgccaaagctgcggctctggacgcccakccgcggcgtatcccgatcacttccgggtagtgctccacgggcacgagccgcgattgggctaccgtagatggggtacttccggtgtgcasgtgctgggtccttcggcmggaggaggaagatggagcccagcaccgcggcccgggcttgggccctcttttggttgctgctgcccttgcttggcgcrgtttgcgccagcggaccccgcaccttagtgctgctggacaacctcaacgtgcgggagactcattcgcttttcttccggagcctgaagggtgagagcggggtccgagggggtagcgtgtgggggcctggggttggtacagcatcgagggcattgaccactctccttccctctccctttcctggagcaggccgcccgggtctggcctgccgcttggcgtgcgggtccgcgatgtctgcagcaggggtttcccttcgcgtcccgtcttcctcaactacctgttttttcttgtccagaccggggctttgagctcacattcaagaccgctgatgaccccagcctgtmtctcataaagtatggggaattcctctatgacaatctcatcattttctccccttcggtagaaggtaagggttccgcgtcgcccctagcactggaattcgagacccgggacttgatggattgctttcttctggttcttgggcatgtcctgggtcacaggatgggttgccagtcctggatggtgctaccacggagataaggaaaatgctcatttctgacctgaccctaggagggtacatctttctaaaagaaacagctaaggattgtggagtcaagtgttgctgcagaccgtggaacccagggccctgctgctctgctgagaagggagtttactctgtaaagggcctgataaaaagatggaaagctcctgggttgggtttgcctgggtggaaagaggaaatggcctgttattaatatggattgctataaagaggcattgtgcattgtggcagttgatcttaagaattcagatagattcatagtctcgggctgaaaaaagagccttagcaattatctaccaccccacccctcctcccatttgaggctggataaatatgtccagcagccttgcagtgggctagtcgtttaacagaatgaatatcttggccagattatccagttgatacttgagtattcttgttttacgaggcaatccactccaccactgaacaattctgttaagaagttcttatattaagaaatattgtctcctgctttattttgttcttatgctccccagcaccttagagaatagatagaatgcttatcttgtttgcaggcatagccttcacataatcacagcttattcggttgtttctcctccagactgaacatccccagctccttagctatttctcttttgccatacttttttggtgagcrtgttagtcattctcttctttatttgcttcagtttatctttttcttaaaagactcaagttgtccctgtctgggtaagacaggactgccttcctcccttcagttaatgaagcttaggaagttcttcattggtgccttttttgtttgtttgtttttttgagacagggtcttgctttgtcccccaggctgagtgcagtggtgctatcatggcttactgcagcctcgacctcccaggttcaagtgatcctccctcctcagcctcctgaataactgggacatggcttctttattctctgtagttcatgcgagattcagttccaccgaatccctcaagtactttccctaggcttctgttacttactgtgtcactcccaactcccttgcaacatgtgcttttggaattggctttttggaggcaagattagttaggcggatgtcaccccaaattggtagaagttgaaatcttctgatgactgggcttyggtgcagtaactggtgtttgccaagtttttgctgtgtttgaaactttgaaataggtaccttacagtggactgggtgagatcttaaggatagggagtctgccctggaggagttttttcagtctgtttttgaggaaataaagacctgaaatgagttaccaaaccctgtgtcaggatgtaagatgaagcggaggcactgtcagcttgtataggtcagaaggaaaaaagcagtgaatgagactgctcgggagagggctgagagaggatactgttggtgggagaaaygacagagagtgtaaaacagtgtttcccaaactttagtcatttgcacacgtccttcatggtttttaccatgttacgtatctcctgtgctaataactacctaatatttttcttcaaattgacctgcttaaaaaaaaaaaaagaaaaggctaggtatgatagcttatccctgtaatcccatcactttgggaggccgaggcagaaggattgcttgagtccaggagtttgagactagcctgggcaacatagtgagacctcatctctacaaaaaaatgaacaaaattagccgggcgtggtggtgcatgcctgtagtcccagctactggggaagctgaggtgggaggattgctgaccctcggtggtcaaggctgcagtgagctgagatcatgccaactgcactccagcctaagcgacagagcaagaccctgtctcaaaaaaaaaaaaaaaaagaaaagagaaaaaaaactaaaacaacattttaaaagggaaacaatagcgagcccagaattaccaccgaaaatggaaatccagtgtcatcacttgatgtacgtagaaggtaactataaatagaataaaaacaacacccgtaagttctagccagatgctgctgcctgccgaaggctttgaacctgaggttccctcttgaaaaaggagattagcaagcattagaagctctaacaactagtatcaaactaagacattctctttgatggagaaagcttgaaaaataaggaaagggagtaactttctgtctctgagattcaaggttatttaaagcccggttcccgcattcgcgttgctgccttttctgcctctggtggagtgggttccacactttggaaggtgctgctgtgggaaatcctcaggcgttccttgggaggaagctgcagggcagggttcggggtaggggtttggtgtctgctcccagggccctgccctcgtcccatgactactgtcactgtcaccctctcaggtgagtgagtgctggcctggcttccctgtctgtgccccagtggcttctttgccctctggcatcggaaggctcccaggtcactggcaatcatgtctacaagggaagaaattttcagcacatcctctatacccgggaaaaaccggatccctgttatagatggggaagtgggttcagaagggtgaagggatttgcctagttttaactccaggtggtctcgatttcaaagcccgtgttctgtcagctttacaagagtttctcaacaggtgcattcktgacgtttcagactggataattttatagtgaggctgtcctgtgtactgtagggtgtttaacagcaccccgggcctctgcccattaatgccagtggccacttccctgttatgtgacggcgaagaaatgtctccagacattgctctgaggggcaaaatcggccaagattgcaaaccactgcactgtgccaataggctgcttttggaatgtccaagactgcctggcctctccaaaggagagtagatagatggctttttgaatgtagcatgagaggcagaggtagagaatataggagcttctgcrtatgcctgaaagtcagtcaggtaaggcgcttttagttttctgctgaagattacccctcaaaaaacagggctcttatattcagatctttacaaagtcatttccacctgctactgagggtctaatggacacacttctctgtccagtctcagaaattggcatgtccgtccttccggttgctcagccagactccttggagcttttctaatgcccctgtcgaagcatcagcaggccctgcggctgtgccatcagaaggcgtggaggcctgcygcgcctccctctgttgctgctccaaggtcggctcagcactcttcactgcctagattttcacagtggccttctaacccatcaccatggccactttcaccctcgtaccctagtctctaccccgctkccaggatcgtccttcaaaaataggaatgagatcctgccaggcccctgctcagaatcgtccagcggctccccacggcaggtccctcgtgtggggtgcagagccctgcgcagcctgggccctcacttcacccggccttacctcctgctgctcactcctttctctccagctaagccacactgggccccttgctggtgaccgtgcccacccccctcggggactttgcacctggtgttcactrtgctgggaatcctctgaccccacagactgcctggctcacgcttacatcttttcagatgccacttgcaggtcttccttaaacaaccttggcacaagagctcccctcccacattgtccactttgtttttcttctcggctcacaagaattactcatttaatgaataartggattactgagcactgtcttcattaccttaggttgaatatcagagtacactttggggagactctggagcctcaaatagccccacccagtgctagttttagatgcttatggcagtagtcacatgatccaattaattgaccagaaaaggataggatctcacagttacagatgttggaaattaatgagcccttttggtgatcactttttaaaaagcagtgtactgggtagctctgttgtggatgtcatggatagaatctgtaggattaatagggaaaaatggattaatgccagaccagggagtactattgtcaagtgatggcatcactggagatgcagaagtgctcttcctcagaccatttagacagggtggaattgacaggctctggaaactggctccagtgatcagcatcactagcgtgaaaggtgcaggtgatgagatgaaatatgggcagtacggcatttccaaatgcatatttcctatgtgagttgaaatgtgtacagcttacttgaccagtgcaattagtggatgtttgactgtttcctccaaacctccagaagtttctaattctgagccataattttgagtcttcacgctgcgaggatggggccttgcccgttctgggatgtggtgtgggaagcctctccctcattgtggcccccagagggtgctgctctgtgagtgatcgtggctgctctgcccttcatgtcccctccctgccagtgtcagaggagcagggagaggagacctctgggtcactgtgtctggtgcctgctttcagattttggaggcaacatcaacgtggagaccatcagtgcctttattgacggyggaggcagtgtgctggtagctgccagctccgacattggtgagtccracctgggaggttctggtgctttccacttctccagggagttggagagmattacaaacagaagctgccaaattagcattcactgggtgggccttagctggggagtcagtgagggaaccgttttctcagttcagaatctgactcctggaggcagaataccacactgctgtccaggggtccatytggggctgagcccagctggatgaagctgcagggcactggggctgacagagagggagtcacaaggaagccaaggacacttggcccaaggcccccctgtaagggctcagctaggtgtctcttcggtctgtgcaggtgaccctcttcgagagctgggcagtgagtgcgggattgagtttgacgaggagaaaacggctgtcattgaccatcacaactatgacatctcagaccttggccaggtaatcaggcctgtcacyttccaggtttcaggggcatatggcaaagctctgcttagccaaaagccaagagggtgtgaggaggttctccctggcttggggaaccttttcctgaccacccacctttccatctactctttgcagcatacgctcatcgtggctgacactgagaacctgctgaaggccccaaccatcgttgggaaatcatctctaaatcccatcctctttcgaggtgttgggtgagtgagtgagcagggagaggacagcagaaacctgggggaagaaggggtcacttaatttttttgggaaatcaaggcaaaattgtaattctttaagggtacgtagatgggattaatttgttatatyaaggccgagtatagtggctcaacctgtaatcccagcgctttgggaaggcctaggcaggaggatcgcttgaggccaggagtttgagagcagcctgggcaacacagaactcctctctttaaaaaaaaamaaaaaaamaaaaaaaaaaagttggccgagcgcagtggctcacacctgtaatcccagcactttgggaggctgaggtgggcagatcacccgaggtcaggcgtttgagaccagcctggccaacatggtgaaaccccgtctctgctaaaaatacaaaaattagacaggtatggtggtgtgtgcctgtagtcccagctacttgggaggctgatgcaagagaattgcttgaacccaggaggcrgaggttgcagtgagccaaggttgtgccactgcactccagcccaggtggcagagcgaggtctgtctgaaaaacaaaaacaaaaacaagtcagactccattgttatatcaagacaagagctaagtggttggcaattaagaaaaaaggattcattcctgggaagaactggctctcggggatcccatgtccttgggctcagttcctggggccagtgctgggctgctctcgtcctgctgcaggatggtggccgatcctgataaccctttggtgctggacatcctgacgggctcttccacctcttactccttcttcccggacaagcctatcacccaggtaagggcttcacaaccttgaggcttcgaaataaaaatgaagcagaacagcacatttggctgaggygaaggaaatgactagttggtggggtggggcatgggcagaagcggtgtggtctcaggctccccyttcaggtagggccagggtcgttttggtctggcctgctgtcctcttgttcgggaggygtggcagcttttcccttacttggaactgcttgggtcacagcytcgttttgttcccagtatccacatgcggtggggaagaacaccctcctcattgctgggctccaggccaggaacaatgcccgygtcatcttcagcggctccctcgacttcttcagcgactcmttcttcaactcagcagtgcagaaggcggcgcccggctcccagaggtagctgccaggaggcttaggggccggggatccgggtggtgcagtgtgtgtatatggggaggactcagaaggggaagaaggmggcttttagctaaaagtgtcagaggctgagtgtttcaggtgctgtcagattatttcagggctttattgctatattgctggtattggcacttccaattttttaaggtagtagtgacttatctagagatccctaacctccaccrttccttttagaaatttgtgtatttgttgtgcagatgacaagmaaccagccatatcttttcgtttgtttcctgcgttccctttaaccatgagtccctaggtgcccaaggcctacaggcagaacttcgctagggtactgtcatggtggacatgagtggtcctgcccatcaggcaccactggaaaggtggctctggtgcccaagctgctcctgtttccctcctgcaggtattcccagacaggcaactatgaactagctgtggcyctctcccgctgggtgttcaaggaggagggtgtcctccgtgtggggcctgtgtcccatcatcgggtgggcgagacagccccacccaatgcctacactgtcactgacctagtggtaagagatgtttggggtgggagggcccaaaggktttgccaagctgactgagctcagctcagaagcacttattgaacacttctttgctggcctaaagggcataaataaagatgaataagttaatccctacacctaagcatgccaggtgagatgcagagcctggcgtgaaaactgatgtcctaataggagcacttcttttgaagaggtgtgtgtatttgctatggggggcagcagtgggaggggcttcactgattaactctgcccaggaagttggacttaataagagaaataggtcattaggwtgaatttgttaggcaagagaaagcgaatatggaagcatgaatacttgaaagtgcctggcacatgtcggggcaggagggtggtttgggtccagactttgatgggccatgaatactgtgtgaaggaatctaggccttcagagaagaggcagagatgctgtgttgggggattaaccttgctgaggagagagactggttactgatcagggccgggtggcaggggcatctgcaggtcttctgaactcctgggcattcctgccatgttcgtcgggtgggaattaagtgcagctctgcctgcaggtggtggaaggcctccagtcatggccagccctggctaacctggccttttatctcaggagtatagcatcgtgatccagcagctctcaaatggcaaatgggtcccctttgatggcgatgacattcagctggagtttgtccgcattgatccttttgtgaggaccttcctgaagaagaaaggtgagtgtagttcctgcacgaggatgctgccagaaaacggccccaggcctcacttgctctcgaggcccaaccaggaaaagctctgggaaacccctcccggttattcttgttggttcttccgcaggtggcaaatacagtgttcagttcaagttgcccgacgtgtatggtgtattccagtttaaagtggattacaaccggctaggctacacacacctgtactcttccactcaggtaagcacaggtgacagcttctgttttcagctagcatgtgccctgcctgggctctgcagtggccaggtcctgccacctctgtcctcctgcaggtatccgtgcggccactccagcacacgcagtatgagcgcttcatcccctcggcctacccctactacgccagcgccttytccatgatgctggggctcttcatcttcagcatcgtcttcttgcacatgaaggagaaggagaagtccgactgaggggctagagccctctccgcacagcgtggagacggggcarggaggggggttattaggattggtggttttgttttgctttgtttaaagccgtgggaaaatggcacaactttacctctgtgggagatgcaacactgagagccaaggggtgggagttgggataatttttatataaaagaagtttttccactttgaattgctaaaagtggcatttttcctatgtgcagtcactcctctcatttctaaaatagggacgtggccaggcacggtggctcatgcctgtaatcccagcactttgggaggccgaggcaggcggctcacgaggtcaggagatcgagactatcctggctaacacggtaaaaccctgtctctactaaaagtacaaaaaattagctgggcgtggtggtgggcacctgtagtcccagctactcgggaggctgaggcaggagaaaggcatgaatccargaggcagagcttgcagtgagctgagatcacgccattgcactccagcctgggcaacagtgttaagactctgtctcaaatataaataaataaataaataaataaataaataaataaaaataaagcgagatgttgccctcaaacttcacctggccccggtcctggtttgctaatggctgtgggtgggggttrctgtgggtgatgactgactggatacaaaatcctaagtggcttcatgaaattttgcctaggactggactgtctttcttttaactrtgaaatgatggttctccctaacgtctcctcaaaggatacaagaaagttgttgttgctagtagaccgaggggtgggaatyactgaaatggaaaatctagatgacagtgctggggaagagaaaactagaacagctcagttgaagacaacctttactgcatgttgacgctgatttaggcaatagcttcctaaaaatcatgtataaagttagttagttagacatgaaatctcttccccaatgttgatacctgcccacaaaatattctcaccttcagagtataagaatcattcttaaagccaaatattcagttcaaggcacatacgtcatctgcagttgtaaatttgcatttaatatttcacaattcctgtaagagaggctagtcaggagggaaaccctcaagtttaaatccccacacttacttacttactgctcatccgtcactttcgctaagtgagattaataattcagtagctggtcnnnnnnnnnnnnnnnnnnnnnnnnnnnnnnnnnnnnnnnnnnnnnnnnnnnnnnnnnnnnnnnnnnnnnnnnnnnnnnnnnnnnnnnnnnnnnnnnnnnnnnnnnnnnnnnnnnnnnnnnnnnnnnnnnnnnnnnnnnnnnnnnnnnnnnnnnnnnnnnnnnnnnnnnnnnnnnnnnnnnnnnnnnnnnnnnnnnnnnnnnnnnnnnnnnnnnnnnnnnnnnnnnnnnnnnnnnnnnnnnnnnnnnnnnnnnnnnnnnnnnnnnnnnnnnnnnnnnnnnnnnnnnnnnnnnnnnnnnnnnnnnnnnnnnnnnnnnnnnnnnnnnnnnnnnnnnnnnnnnnnttcagcatcgtcttcttgcacatgaaggagaaggagaagtccgactgaggggctagagccctctccgcacagcgtggagacggggcagggaggggggttattaggattggtggttttgttttgctttgtttaaagccgtgggaaaatggcacaactttacctctgtgggagatgcaacactgagagccaaggggtgggagttgggataatttttatataaaagaagtttttccactttgaattgctaaaagtggcatttttcctatgtgcagtcactcctctcatttctaaaatagggacgtggccaggcacggtggctcatgcctgtaatcccagcactttgggaggccgaggcrggcggctcacgaggtcaggagatcgagactatcctggctarcacggtraaaccctgtctctactaaaagtacaaaaaattagctgggcgtggtggtgggcacctgtagtcccrgctactcgggaggctgaggcaggagaaaggcatgaatccargaggcagagcttgcagtgagctgagatcacgccattgcactccagcctgggcaacagtgttaagactctgtctcaaatataaataaataaataaataaataaaaataaagcgagatgttgccctcaaacttcacctggccccggtcctggtttgctaatggctgtgggtgggggttrctgtgggtgatgactgactggatacaaaatcctaagtaagtggcttcatgaaattttgcctaggactggactgtctttcttttaactgtgaaatgatgatggttctccctaacgtctcctcaaaggatacaagaaagttgttgttgctagtagaccgaggggtgggaatyactgaaatggaaaatctagatgacagtgctggggaagagaaaactagaacagctcagttgaagacaacctttactgcatgttgacgctgatttaggcaatagcttcctaaaaatcatgtataaagttagttagttagacatgaaatctcttccccaatgttgatacctgcccacaaaatattctcaccttcagagtataagratcattcttaaagccaaatattcagttcaaggcacatacgtcatctgcagttgtaaatttgcatttaatatttcacaattcctgtaagagaggctagtcaggagggamaccctcaagtttaaatccccacacttacttacttactgctcatccgtcactttcgctaagtgagattaataattcagtagctggtccagaacgcacagcttgggaacgcagaggcccaggcctcatgtaatttcccactcccgtaactsaacgtgctgacccatgttgatgtctgccttcatccaggtggcaaatcagacatgctacgctgcccccttcaaacgagttcctcgtgttaggggcaaaggtcacagccaaactctgccactgacagccagtgccttggcctggatccwctmtgtggatgcaggcctacccctcctcagtccagcctcatctactagaccagcttggccattcacttttcrgatgtctgtgagcasaggactgcagactgaactctcactcaagttcttccatttgccaagcccgaggccttttccggctaaccagccctctctgcgctgtsttgtctcctgactcccaccctcaccattcacagaccatcacgacacagaggatgycawgttcttttagtaattcaccagctccatgcagggacatcacagggctgccctccatgagcagaggaggagggctgcctggcagagcgtttcacactccaggttagccagaaagagcatcttcatttttgtttccacacaacacttctctgtgagcctgttggccaacaaagtggcggccgattgttggaggagccagccaaccatcttgtctaacttcagattcttcagggctagaatatgttcaccccagaggcttagatgaagcacatttgcggctactcgggcagatggtctctgcaacaggaagggaagctgtagctagaacatctgttaacacagtctcaacccaaagcctgctttgttagtgagggtcttcccttctctggtcccaacccaattcttcctctaccctatctcctactgatgcccttcactcaggtgacaaatactgcctgtcccctacccgtgctccaagcttttccatgtgtacacctctgcatggggcagcatgcattgttgaaatagcctttccccctgggtggaaagcctagtgcctcttgtgcacagctatctggtcccttgaaccaggtaagtagtctcctctatcatttcataactggttgcagctgttattctaaccttcactgcgcaccaagatagcaggccacgtacagagagcagttaacggagtggcagaacagtgctgggatgcaggtatggctcagctctttgcactaagcctgcccctgagccagctgccactccaattatggcttcggataggtctgcctttgcattcctttatattaatttcacaatgtccagatctgctctcaggagatgttttccatctctctctgatcagttctcagctgcttccatgagctacatctccattaaacatttctcaaaaatgcctccttttctctctctgaatagccttttttttttttttttttttttgagacaaagacttgcactgtcacctaggccagagtgcagtggtgcgatcttggctcactgcaacctctgcctccagggttcaaacgattctcctgcttcagcctcccgagtacctggaattacaggcgtgtgccacgacactcagctaatttttgtatttttagtacagacggggttttaccatgttggccaggctggactggaactcctggtcccaagtgatccacccgcctcagcctcccaaagtgctgtgattataggtgtaagccaccgtgtctggcctctgaacaactttttcagcaactaaaaaagccacaggagttgaactgctaggattctgactatgctgtggtggctagtgctcctactcctacctacattaaaatctgttttttgttctcttgtaactagcctttaccttcctaacacagaggatctgtcactgtggctctggcccaaacctgaccttcactctggaacgagaacagaggtttctacccacaccgtcccctcgaagccggggacagcctcaccttgctggcctctcgctggagcagtgccctcaccaactgtctcacgtctggaggcactgactcgggcagtgcaggtagctgagcctcttggtagctgcggctttcaaggtgggccttgccctggccgtagaagggattgacaagcccgaagatttcataggcgatggctcccactgcccaggcatcagccttgctgtagtcaatcactgccctggggccaggacgggccgtggacacctgctcagaagcagtgggtgagacatcacgctgcccgcccatctaaccttttcatgtcctgcacatcacctgatccatgggctaatctgaactctgtcccaaggaacccagagcttgagtgagctgtggctcagacccagaaggggtctgcttagaccacctggtttatgtgacaggacttgcattctcctggaacatgagggaacgccggaggaaagcaaagtggcagggaaggaacttgtgccaaattatgggtcagaaaagatggaggtgttgggttatcacaaggcatcgagtctcctgcattcagtggacatgtgggggaagggctgccgatggcgcatgacacactcgggactcacctctggggccatcagacagccgtttccgccccgatccacgtaccagctgctgaagggcaactgcaggccgatgctctcatcagccaggcagcagccaaaatctgcgatcaccagccaggggcagccgtctgggaaggagcaagcaaagtgaccatttctcctcccctccttccctctgagaggccctcctatgtccctactaaagccaccagcaagacatagctgacaggggctaatggctcagtgttggcccaggaggtcagcaaggcctgagagctgatcagaagggcctgctgtgcgaacacggaaatgcctccagtaagtacaggctgcaaaatccccaggcaaaggactgtgtggctcaatttaaatcatgttctagtaattggagctgtccccaagaccaaaggagctagagcttggttcaaatgatctccaagggcccttataccccaggagactttgatttgaatttgaaaccccaaatccaaacctaagaaccaggtgcattaagaatcagttattgccgggtgtggtggcctgtaatgccaacattttgggaggccgaggcgggtagatcacctgaggtcaggagttcaagaccagcctggccaacatggtgaaacccctgtctctactaaaaatacaaaaaaactagccaggcatggtggtgtgtgcctgtatcccagctactcgggaggctgagacaggagaattacttgaacctgggaggtgaaggaggctgagacaggagaatcacttcagcctgagcaacacagcgagactctgtctcagaaaaaataaaaaaagaattggttatttgtaaaagggtccacacaaaattcctttaaaaagccagttcctggctgggcgcagtggctcacgcctgtaatcccagaactttgggaggccgaggcaggcggatcacgaagtcaggagttccagatcagcctgaccaacatggtgaaaccccgtctctactaaaaatacaaaaatcagccaggtgtagtggcgtgtgcctgtaatcccagctactcaggaggctgaggcgggagaattgcttgaacccgataggcaggggttgcagtgagccaagatcatgccactgcactccagcctgggcgacagagtgagactccgtctcaaaaaaaaaaaaaaaaaaaaaagccaactcccagctgggcgtggtggctcatacctgtaatcccaacattttggaggctgaggtgggtggatcacttgaggccaggagtttgagaccagcctggccaacagtgaaaccccatctccactaaaaataataatcccagcgctttgggaggccgaagcaggtggatcacgaagtcaggagatagagaccatcctggctaacatggtgaaaccccgtctgtactaaaaatacaaaaaaattagccgggcgtggtggtgggcgcctgtagtcccagctactcgggaggctgaagcaggagaatggtgtgaacctgggaggtagagcttgcagtgagccgagatcatgccattgcactccagcctgggtgacagagcgagactcagtctcaaaaaaaaaaaaaaaaaaaaatcaaaaattagctaggcctggtggcacctgcctgtaatcctagctactcaggaggcggaggcacgagaattgcttgaacctgggaagcagaggttgcagtgagctgagatggcgccactgcactccagcctgggcaacaaagcaagattctgtctcaaataaataaataaataaataagtaaataaataaagaaataataaaagccagttcctctagtcaattattttaaatcttctagttcaaaaatttatcagatgtatgaatctccttacaattttcctaggcaagtggccattcagcttctacttgaatgcttccagtggtaggcaactcatttccagaggcaactgggcttacatttggacagctttcattgtttgaaaaatttaattaattaattaatttatttattttgagatggactctcactctgtcgccaggctggaatgcagtggcacaatctcggctcactacaacctccgcctcccgggttcaagcaattctcctgcctcagcttcccaagtagctgagattacaggcgcccgccaccatgcccagctaatttttgtatttttagtagagatggggtttcaccatgttggccaggatggtctcgatctcttgacctcatgatccgcccgcctcagcctctcaaagtgctgggattacaggcgtgagccactacccccggccgaaagttattttttataatgagctaaagtctacttctcttttactttattattttttattatttttttgagataggatctcactctgctgcccaggctggagtacagtggcacattcatagctcattgcagactcttaactcctaggctcaagtgatcctccgacctcagcctcccaagtagctggggctacaggtgcatgccaccatgcctggctaactttttttccggctaatttaaaacatattttttttttgtagagaagggatctcactctgtttcccaggctggtctcaaactgctggcctcaagcaatcctcaagcaagcctcccaaagtgttgggattacaggtgtcagccactgtgccgggcctctttatttacctaggaaaacttgcagcactgaggtccttgttctttaagtgggctagagaaaggaacttgggaagtgctgtctctctgcaaagagagaaaaaaaaaccccgttctaagggagagattgctaacctcttgtgtgcggagctaaataaagacatgacttagaacacaaaaccagagaggacctgaagagtcagtcctaaatgctcctgacccaccctctagtgcccctggagagctctgatggtgcagcaggttcctacctgggtccagctccacaaggatgttgtcggatttcaggtctctgtgcgcgatgccctgttgaaccagatggtccacgccttccagcagctgcagcagcatcatggcggcgaggcgggggctgggtgtgttcacacaaaggtactggcgcagggtacagggatagctggtggagaggggagagggcctctggctaccacacatcgacgactcccaatacgttttttttttttttttttgagatggagtctcactctgtcgccaagctggagtgcagtagcacgatcttggctcactgcaacctccaccttccaggttcaagcaattctcctacctcagcctcccgagtagctgggattataggtgcccgccaccacaccaggctaatttttgtatgtttagtagatacagggtttcatcatgttggccaggctggtctcaaactcctgacctcaagtgatctacccacctccgccttccaaagtgctgggattacaggcgtcagccaccattcccggcctcctaataaccttaatcactgttagggttaggccgttcctcttccccttccaggagcactttgattcccacttttccccagcatcctttctgttccctcccactcaccatcctcaaattaggaagtaagagttggggctccctatattcaaagtaatggtgcagataattatttccttaaaataaaatacccactatagcaaagttaggggatacagagggtgaggaaggagaacggtttttatgttaaaaacagataagtccagccacagaaaaggttaacagtcaaatggaccaaaaggactaggtgacaagtatgttctggatgaagatgagagtttgtttccatgaaaaatcgtcctacagggaaaatgctctccagggcagatatgttccctttgcatggctttcttctccggaagggtgatgaccctgttctccaaaaccccctgatcaaggtgcacatggagggcaggaaccagctccccttgggagatgtatcagctccaggccctgccgcgctgctgtcacttacttcttcataacgaggaacagcgtccggccatggcccaggccttcagggtggaggcgtgagggcagcacatcagggtagtcgaccagg

SEQ ID NO: 95817 - DNA, 30063 bp, Homo sapiens
  misc_feature (1)...(30063): n = A,T,C or G
tggtcttcttctaacctccaaaaactaccgcccaggagtttcaagtagcaggattttgatctggctgcacctttgctctgtcaacagttttagcaaaaccgccttccacctctgcagacaatttagagatagcacttctgaaatggtctgtggataaaggatgttgctgctctgggaaaatgtgtctgcctcctgccagcaggagacaaagagcactgaaactgtgccaaaggatgctgtccagaaagggaaggtcaaacagccctcaacattctctttgttgaagtcttgcctttttccatttttacattcaaatcagcttccccacccccatgtcctttgggtgggagggaggttaaataatgcttcttaagaagattatgtactttcccaaaactccacagtccttgcccaccaggagggaaaaggtagtgaaatataaaccaaaaataaaattctaaaccccccaaccatctgaatggactccccctctcagtcaagggcattccaaagttaacctgaaaaagtagttcaggccatgataggaagggggattcagatatgcctcattattccttccttccttttgaaattcaggtccagctgaccagcattaacatcaacacagaccttaagactgataggctctaagtctgatgagaaatatttacaacgtattctctctgaagcctgctacctggaggcttcatccgcatgataaaaccttggtctccacaaccccttatctaaccagacatttctttccactgatgccacgtttttagataatcactctttcaaccaattgccaatcagaaaatctctgaatctacctatgacctggaagcccccaattccagttgtcccacctttctggacccaactaatgtatatcttacatgtattgattgatgtcttatgtctccctaaaatgtataaaaccaagctgtagtctgaccaccttgggcacatattctcagaatctcctgagggccatgtcacaggccatttgtcactcatatttggctcagaataaacctcttcaaatattttacagagtttgattcttttcattgacagaagatacaaggatgcctacggaatggaatgtagaccaaaaaaaaataataatagtaatgtggccgctccatcaagtcccccactccattctcctctaattctgtggctgggcatatcaaagcctacctggtaaagagttgatgttctgtgaatgaatgagactttcatacagaatattaaatctgcaatataaacagatattcatcagaaaaccatatactatcatgtactccataaatatatacacatactatgtattcataaaaattttttaaaaaccaaccaaacatggccaggcatggtggctcatgcctgtaatcccagcactttgggaggctgaggtgggcagatcacccgaggttgggagttcaagaccaacctgaccaacatggagaaaccccatctctactaaaaatacaaaaattagccaggtgtggtggcacatgcctgtaatcccccctactcaggaggctaaggcagaagaattacttgaacccaggagggggaggttgcggtgagccaagatcacgccattgcactccagcctgggcaacaagagcgaaactccatctcaaaaaaaacaaaaacaaaaaaaaccaaccaaacaaaaactatttatcattgtattagtctgttttcatgctgctgataaagacatacctgagactggtaagaaaaagaggtttaattggacttacagttccacatggctggggaggcctcagaatcatggcgggaggcaaaaggcacttcttacatggtggcggcaagagaaaatgaggaagatacaaaagtggaaacccctgataaaactatcagatctcataagacttattcactaccacaagaatattatgggggaaaccacccccatgattaaaattatctcccactgggtccctcccacaacatgtgggaattatgggagtacaattcaagatgagatttgggtggggacacagagccaaaacatatcaatcatatatccaatttcacctttttgggataccattaaagagatgagaggccaggggcagtggctcattcctgtaaccccagagatgtggtgggagtatcacttaatgccaggagttcgagaccagcctgggcaaatagcaagaccccatctctacaaaatattttttaaattagctggacatagtggtgtgagctgtagtcccaactatttgggaagctgagggaggaaggttgcttgagcccaggaattcaagactgcaatgacccatgatcataccactgcactctagcctgggtgacagaacaagaccctgtctcataaataaataaataaataaataaataaaaagatgggagatgttatgggagaatctcaagatgattccttgagacctgagacccatggcaccaccataaaaagaatttttccttctcaggaggatagacagggatgaatggagtcaggaccattgtccctgggaaatgcatgcctgtgcccctggcacagtaaggctgtatctctgacctgagaggtgagaatgcagaacccctgaaatccttgctggaaacctctctcttccaaaatccacttacttgtccattccatacagatgtctgccaaagaatcaagcttcatgctgtgcttgattcagacctgtcagacttcagatttttctacagatggagaagtgagtaagtccagcctacaatggaaggttaattaacatcagtctggagatttcatttccagctgatggattacgtatcgcaggtccagtgagttcatttgcagctcaggggaacaaatgcaaaggcttaagacaaacgtactctttaactcaagacaaccaatacaatgtcttataagctgtgtggtcatcataagcctcatactaaaaggttatgttcctgggagattaaagaaaatctttgtagttgaaacattaaatatctcagagaacctctttttccttctctataaacattaaagagaggagctataatggtaatgttgaccaaaaaaaaaaaaagccaaattctgtaaaatatttaaagaggtttattctgagccagtatgagtgatcatggctcagagtacagtctcaggaggtcctgagaaaggatgcccaaggtggctgggttacagcttggttttatacattttagggagacagaagtgacaggcaaaaatataaatcaatacatggaaggcatatacattggttcagcctggaaaggtggaacatcttgaagcagtggatgctcataggttctacgtggagtcaaagattttctgactggcaattggttgaaagagttaagctttgtctgaagaattgaactcagtagaaagaaacgcttgagttaagataaggggggttgcagaagccaaggttttgtgctgactcagcacacgaggacggcgtcaactccctatgacttcatctctgacccaaccaatcagcactccccactttctgaccccctactcaccaaattatccataaaaaccaccatccttgagttttcagggagattgatttgagtaataataaaactctggtttcccatacaggtggctctgtatgaattaaacccattctctattgcaattcccctgtcttgataaatcagctctgtctaggcaatgaacaaggggaacccaatggacagctatgataccagcgtcaggctggaatttggtatcttattgtcagtcttatgtgcactattgaatattaatgctggtcagtcgtggctaaactccaaaagggagggggtataaggaggcgtgtccaacctcccttcctttcatggcctgaaatttagttttttaggttttctttggcccagagggggtccatttagtcagttggggagcttagaacctcatttttagtttacagtaatgagacacagcagatgagtagattgattttattttaagacagagtctcactctgtcacccaggctggagtggagagtggagtggcacaatcacagcccactgcagcctcaaccccctggactcaagcaatcctcctgcctcagactcccaagtagctgggacctcaggcacttgccaccatgcctcgctggggtcttttaaattattattatctgtagtgacagggtctccctatgttgcccaggctggtcttgaactcctggcctcaagcgatcctcccacctcagcctccccacgtgctggagtgaaccactgcaaacctggcttcagacgagtggatttaaactttaaatccactcatctgtgccccaactaagtttccatgagtgagcctgtggttactggaatgtgagatttctccaactttctttcccttatcattcttcaaattacaacttcagtggagcatttaaaattataattaaaaattccctgaggttgatccaaaaaattaaatatctgatattcatgtgcctctatacaaatgggaaattcatctatgcctctcccaaataaatatgattggatatcacaagaaccataaaattcctcccttaaggaagattatgagagagaccagcacacacacacacagtgcaagctaaagcaaccccgtcttggatgctaatccaccaagttgatgtgttttgttggttttttggttttgttttgagacagagtctcactctgtcgcccaggatagagtgcagtggtgtgatctttgctcactacaacttccacctcctgggttcaagcgattctcctgccttagccacctgagtagctgggattacaggcgtgtgccaccacgcccagctagtttttgtatttttagtagagatggtgttttgttggccaggctggtcatgaacttccggactcaagtgatccacctgcctcagtctcccaaaatgctgggattacaggctgtgagctaccacacccggccaaccaagttgacttctgattaaccagcttttagggaaggcctctaagatttccagtttatctattgttccttgtgtaaaagtatgtacttaccataaatcctgcccttaggcagattcacacagcattcttgcctttccctgggggactgacttcaaatgtccgtcacattcctttcctatagcatataggccctgggtcttgggggtaatggcatggggatccaccatcttgtctccctgccgctgaagccagagactatggcttctgttcataaatccctttctccttaaatatgaagtcaaaggtcatgtagataggagctgctgctgaagaagggattttttgtctgaagagttctgtcccctgggcttacttggctatggggtggacccctggccaggagacagcaaactgtttcagtaatgtgcgtgtcgtgcgtgtgtgtgttctgtggtgagcaggcctatgccattaaacaaacggtgtggctttgggcaagctgctatcttgggacctcagcacactcattcataaattgtgtcttttgggtgagatttgtcttggggtcttcaaaacccctgagactgtggacacatacagcagcctaacggcattgaggagggcaagcattcaacagttaggacaatgtgaactgtagctcagctctgctaggtaccttcacaagacctcgaatgctgccccttactatgcctcggttttcttatctataaaaacggcatttttatcttgttggtggagctgttaaataaattaaaagacgtaaagggtctggcaccatggttggcaaaaaatatcagtttcccttctcgacttctcgattttgcccaggaccagtgatgttcacattcaggacctgcctgaaccggcaagccctccacgtgggtccaaagtgcaaagggaaagtcactgctagaggcgccagtaccagcatagcgcccccacgcgccgagtcggggaactgccgcgggggccggccccgcccaccagcgcctgcgcctgcgcagaggcaccgccccaagtttgttgtgaccggcgggggacgccggtggtggcggcagcggcggctgcgggggcaccgggccgcggcgccaccatggcggtgcgacaggcgctgggccgcggcctgcagctgggtcgagcgctgctgctgcgcttcacgggcaagcccggccgggcctacggcttggggcggccgggcccggcggcgggctgtgtccgcggggagcgtccaggctgggccgcaggaccgggcgcggagcctcgcagggtcgggctcgggctccctaaccgtctccgcttcttccgccagtcggtggccgggctggcggcgcggttgcagcggcagttcgtggtgcgggcctggggctgcgcgggcccttgcggccgggcagtctttctggccttcgggctagggctgggcctcatcgaggaaaaacaggcggagagccggcgggcggtctcggcctgtcaggagatccaggtgagcggggccgggtcctaagccgagcggaggacggagctaagcgcgggggcgggtcctcagctgggtgggggcggggctaggtgtggaggcggggctctgagcagatcgagggccgaggcgagggtccttaaagctcatctatttcaccattactgatcggctgctataaataaagccagcacctcccatttgttttaatgtttcccttcctcaaatgaagacatgttgccgattacagctcctgtcgcagcacagcaaaaggctttgtgtaaattttctaaaatgtacggacaactaaatcataacattcctatccctttgaggtagttgccgtccctaatttatggagaaggaaagtcctcaggtgaagggacttgctcgaagtcacacagctaataaaatgcagtgcccttaaccactgagccaggctgcctccgccgtttaaccaaaggattagtagtgacagagctgaaaccgcagtaaaaactatgaacggcgagaaaaacagtcctaacattttagttacctgtgtagagttatccctgctgactggatacacaagggttcttaggsttttttaatgcttaaaatagcacaagacttctctttttgcccaaccaaagtctgtattagggttctccaaatggaatcaataggatgtgtctatatagaggcaggtttattttgaggacctggctccctatggggattggcaaagtcttaaaagccgcagagtaggcgggcaggctggagagccagggaggagccagcggtgcagttcaggtttgaagcctggccgctggcagaattccatcttcttccagggaggtcactcttcttcctgggggtgtagaaccactcactaaattagcatagcccctgcattttacaggttagggctgaggtggtggaagagggagtgacttgcccaaggacacagctgttagggccaagcagtggctcctgggtttcctggtttccatcccagttcttattgctcatcaccactgtctcatgtttgagctctggccagtttggggtgacaggtgacatctggcctagtccccagcccctgaccttgtcttttgccacagcttaactggcagaagctaaggatgggaaatttgactaatcctgcttaaaactaaagaggcttttttaactgaggagattgatcctcctaaacttaccattcacacacaccttcttcgcacacttcaccctcctatgcctgaaaatgttattagttatcaattaatttcacattaaaaaaattttttttggtcaggcactgtggctcatgcctgtaatcccagcactttgggaggctgaggcgggcggatcacgaggtcaggagtttgagaccagcctggccaacatggtggaaccctgtctctactaaaaatacaaaaattacccgggcgcagtggtgggcgcctgtaatcccagctacttgggagactgaggcaggagaattccttgaacccgggaggcggaggttgcagtgagctgagatcacgccactgcactccagcctgggtgacagagcaagactctgactggggggagaaaaagttgttttcactggctacttttgctggaattaatttcacatttaaaaaattctgggccgggcggggtggctcaygcctgtaatctcagcactttgggaggccraggcgggcggatcatgaggtcaggagatcgagaccatcctggctaacatggtgaaaccccgcctctactaaaaatacaaaaaaattagccaggcatggtggcaggcgcctgtagtcccagctactcgggaggctgaggcaggagaatggcgtgaacycgggaggcagggcttgcagtgagccaagatcgcgccactgcactccagcctagaggacagagtgagactccgtctcaaaaaaaataaaaaataaaaaaataaaaaattctgaagccaggcatggtgactcatgcctrtaatcctggtgctttgggaggccaaggtgagagaatctcttgagcccaggagttgaagaccagctgggacaacatagtgagaccttgttcccacaaaatattaaaaagttagctaggcatggtggcacatgccgatagtcccagctacttaggaggctgaggtgggtggattgcttgagcccaggagtttgaggctgcagtgagctgtagttgcaacactgcaccccatcctgggcaactagcaggagtgtgctagtagcaagctctaaaaatttatattataaaaatatatatataatgtgwatatatatgtatatgtgtatatatgttgtgtatactataatatgtatgttccatataatagtatatagtatattttatatatatacacacacacgttgcttctgctccatgaagtttataarggaagttggattttccttttttttttttgatacggagtctcacaccgtcgcccaggctgtgcaatggcacgatctcagctcactgcaacctccacctcccagattcacgcaattcttctgcctcagcctcctgagtagctgggattacatgtgcacaccaccacacccggctaattttttgtattttttagtagagacggggtttcactatgttggccaggctggtcttgaactcctgacttcatgatccgcctccctcggcctcccaaagtgctgggattacaggcatgagccaccacgcccggcctggactttcatttttttaaaaggttcaaagttatagtgcaaggttaagttgcttacagatagcaggtgctttaggaaccctctagaaggaaagttgccatgggctgggtcatcagggctggtcacagaggaaggaggagcttgagttgggcttgatggctgagcagggatgagccagacagagcaatactatagaaacaggggctggaaggatgctgtgagcagctttcagagggaggcgtccaaaggatgagtgcaggcagcgtgcagaccagcctggcagcagccagaacacagataacctcctgggcagtctgatggacagccgagtgacacatgaaagcaacatattttgatgtggctcagagcagggaaggcacggcactgagagtggggtagtctagagatggtgcctggtaggctatggccaaggggcatatgcagagctgtgcctggcacccaggggtgactaaccttggaaaggaagagctcagcagatcagaccatttgagagggaaagcggagcctgggtgactggaagagtgacgtcaccgctgcctgaagcaggggaagacccaccagatttttgtcacatggcctctttcccagtgcagcactgcccccagcacctgcacctccatctatttctgtctgaactcttgyactcttgctacctttctggacagagtagcctcatcggggccctaagaggcagagagagaaagacagtactgaatccctctgctctggggatgcgcctgatgtcacccacttgcctgagagaccctctgagatcactgtggatcacacactcctgctagttgcccaggagccgtcagccaaggtctttgcagagcgagctgtctccataatcagacacctccagaactctgctggagagtgaaggcagcaaggagaggtgcactggctgcrggacgtggggtttctgacctctcagatcattgagtattgtgatcccagtgaagcaacagagtttgagaaaaatcattctgaataatgagaaagaagatggcctggacccaggctgagcagtagaacctggttgggttgtgtttttctggtttattgatctggtcgacgtggaccangccttgctgcacctctctctgcctcccstgtttcccttttcttgggccttcctaggctccctggctcacggtgcattcttttctcntcacaggcaatttttacccagaaaagcaagccggggcctgacccgttggacacgagacgcttgcagggctttcggctggaggagtatctgatagggcagtccattggtaagggctgcagtgctgctgtgtatgaagccaccatgcctacattgccccagaacctggaggtgacaaagagcaccgggttgcttccagggagaggcccaggtaccagtgcaccaggagaagggcaggagcgagctccgggggcccctgccttccccttggccatcaagatgatgtggaacatctcggtaagcaccaggcctttcatctttaaaggagatgttctcaaaatgcccatcttagtgggcctggtgaggattttttccaggaagtaggtaggaaaagacagattatccacaggaaaggtgcctgtatagtcaggttacctccccctgttacacagaagtctaaaccwgaatgtttgaaattgtattctgcccacagatcacccagagatcaggttcaaaggtagattttggccaggcctggtggaccatgcctgtaatcccagcactttgggaggccaatcacttgagctcaggagtttgagaccagcctgggcaacatgatgaaaccccatctctatgaaaaatacaaaaattagccgggtgtgacagcttgcacctgtatgtagtcttagctacttgggtggctggtggctgaagtgggaggatcacttgagtgcaagaggcagaggctgcagtgatccaagattgtggcactgcactccagcctgggtaacagagtaagaccctgtctcaaaacaaaaaacaaacaaacaaaaaaaacccaaaggtagattctgattcagcaggtcagggatggggcctaagattgtgccttcccaataagctcccacgtgataccaatgccactgctctgtcaaccacactttgagtaacaagtgcctaaaccactgatttctaccttgattggttagttcaccatcccctccttcctgcaacctgcctcactggagagggggaactggatctctttcctytaagctcactctgcaagcccacctccagctcmgaggcttgcatgtcaactccctactctcaactctyggaaggactcaagactttgggaaattgaagagtatttttcccccacgaaaacaatttctgtccacttaatttatttaccttgccattgctaggtaggttttaaaaatgtattaagacccgatgctctgtctcctgcccatccctgggcccatccattcaaggccgcagtgggaagtggccacagccgttcatggtgggccctagaggatgcagtttcttgttctgatttggggaatgaaggttattagactgttgcactccaagctgggttaatagctaacaagtagccaaatcctttgcctgtgaaacatccagtcttagcatcaaarcatgccctggttggggcatgacagctgttgcattcacagcagctacaagattgttgattcttaccagatcttcttgatacaggtttcatatgtcctgagagcccttcccaatacaatgaggacaataaggtgctttccccactctttggtttttgtctgtttgtcgtgggrgatggaggaaggctgttctgtgattcagtacaacttcacccagggtggagcatgtcaggctctggcctggctgctgaagggagcctgcagaatgagttagtgatccagtggtcaattttgaactggtggggaccagaggcaccgatggcaggaagcagcaccccatatcctgatcaccttggcatctcctccagccctggcatctaggctgcaagagtttgaggagtgtgaagaatcctctgagttggcatggatggtacctctgtctgcctcccaggagtaactagtctcagcctgccrgttaagacaggtcatcttatctcgaaggtcagagccaattctaggcagtagctgccctgctccagnttayaggcagggcttacaaggaacttaccattmtgctccggcctgtgtaaccctgggttccttgtgggtgttccaggcaggttcctccagcgaagccatcttgaacacaatgagccaggagctggtcccagcgagccgagtggccttggctggggagtatggagcagtcacttacaggtaagtgccctctgcctgccagactgactgggacttctttgagagcaacttcatccatcacttatgtcctcagcacctggtacagtgtctgatatgacagtagataataaaggcttaatgttggtgatggattttcagttagtggataatttcacttgggaaagattgcaggtaatctgaccccaaatgatgatgcacttgcgtaattcacattggagcaggggagaggaggccccccaaaaatgcccagttcacagtgttgcatgattgactggggttctcagattcctcctaagaaatgcacgggtagagcgccacctatcggaataaactgaactctgtccccaccagagggaacactcatttcactaatagttatgtgcactgatggtgcyaagagattttaaaaaaaacaaaaagtggtctgttggcccagaggtctcagtgtggcagcagagagcccagggtgtaagtgctagaatcgagtatgcttgggctgagggagcccaggggaggcgtgtgctgcagaggaggggctgctcagaaagccttctcaaagggacagtttgtgccaccttgtgaaggatgaattggcattacttgggcagaggagtagggaagtggcattcccagcagagggaagagcaagtgaacagcagctacgctttcagctcagaaaagcccatgtccaccaccagcctcaccacaggtggtgaggactgacgcgcaggctatgacagaggagatacttgtgcccacctcaatatttacagcctggctcatgcctgtaatcccagcactttgggaggctgaggtaggcagatcacttgagcccaggagttcaagagcagcctgggcaacatggtgaaaccccgcctttacaaaaaataaattttagccgggcatgggggcaaatgcctgtgatcccagctactcaggaggctgaggcgggaggatcatttgagtccagggaggttgaggctgcagtgagccaagatcatgccactgcactccagcctgggcgaccctggagtgagaccctgtctctcatttgtagacccaccaagaagaggtgggtctgctgcatttttggtgatttactggagggctggtttatagatcttcattctgtcagaagcagggaggcaaaagtatgaaattaagggagtggttgtggaaaaccccttccatggtttggaggtttccaatgtgactgggagtccctgcaggccggtggaggtagctgctcaagtggctgctgcttctcctgaggcctttttggagaaagtggacacctgaatgtcagctgctttggggctaacatgatccttgatgcctccttttgtggcatgagtggcagccggccgacgtggtgctgtcctgctgccggagcaccatgatgtctgctgctgagacctcccatctgacatagtccctgtccctcttcagggactttgttcctttagcagttctcactgtctggcctcaaataacacgtctttttctgttggttcctttttgctccrgctgtactgtaaacactctttgtttactgcataccctcagtaaatacctgttgaatgaccggatagatgtggcagcaggtacattacctcaacttctggtacaccttgggagaagctttcccaagaacaccctgggttcatttcctcctagcctctgctctcctggggcccagagattgaaggcgcttaacctgctcatctcaccacgtctcccgccttatctctcacccttctcatcagcaccctacactccaccacgctggcttcatagctccttccccgaatgtgccaggcttctctgtgaccatctcttgagcgtacagctggctatacctgggctgccctcctcccacatttcaggtctcagttcagacaccckcaaccccaccatgtatctccccagtacagccatactcctctgcccctgagctcccatgacacctgctggggccctgacagcctggggctgtgatcatgacttgcccaggggcccgagggtggaaaygatgctctggctcctttgattgcatagaacaggggccactcaggttgactcaagagcaggagcagcgcgtgggcacacgtggactgcagccacacagcctggggaccatgcagtgctgggagaggccggtgccctgctctctccccagcaccgtctaggctctgccccattcgcttccctccaccattgttatgcagcaaagggggctctagcctgatgtgctagaagcagtcacactggatttttgagaaaagccaagctttctattgtgagtcgactcatatggagacaggagttgaattcaaccctgtctccctgtgctagctttaaggcggtaattttattagaggaggtttaaggggtggattctaagattagcaggtgattgatggaaggaaaggagaagtctggacagtccttggacatgcacagttatctgttcatgccaactcatgggtcccctgtgcagatttgggaggagtgagtatgaaacgtgcagtggcaattcaggctttgacatcagcaaacttgttctgtgcaagctgcaattggccttattggttccaaccaatttcagccagttcttttatctcataagcagagggagtttcagcctttcagaaagtggtttctgcaaactcaaattttcttttatttttctgagacagggtcttactctgttgcccaggctggagagcagtggcgtgatcttggctcactgcagcctcaacctccctgggctcaagtgatcctcccacctcagcctcccaagtagctgggwctgcaggcacatgccaccatgcccagctaatttttgtagtttttgtagagacagagtttctccatgttgcccgggctggcctcgaactcctgggctcaagcaattgcctgcctcagcctcccaaattgctgggattacaggagwgagccacgggaatttccatcagttactgattcttgaacttgtaggaacgtggttccactgtccacatgctgttctttcctcgcatctcctgttcctgcttccctttggcytgctcacctctggctcctcatggccccagtgaagtatcgtggcttcctctccactgcagactggcagatttcttcactcacactcccaaaaagagaatctacttccctcccttcccttcgtccaaccayctgggtctcragtgtcactgtaggttcactgccgttggggcaggtgactccttgggccagtcagctttggctgaagggcagggctggcacacagctggcagagccaccccatccaaaatccagccactgtgcctcagcagggctgtggkttgggggtcggggggcgctccccacaggataaggagcagccagggcaggcagatgacactaccactactagctgcatctggatctattcacttattcaacaaaggtttattacacccatattctatgccaactactgtactagacttggaataatggagaaaattcaggcacagtccttgctcttagggagctcacatgattactcattgatgaatatctctctcccctgatagactgcaaatccatgaggacagggactctgtcttgttctgtgccatagttccacagcattccagcatgatgtctggtactcagcatgcaaacagtgcrtattggttgaatgaataatagtacagctaatagcagctgagagcttcctctgtgctagacacgattctaggtgccttccacactttgacaaccttatgcagcgtgttaacactgcattccccttgcaccctggagattgagcccagagaagataaggacagaggggacacattccaagatagaycccccagtggatgcctgaagccacagatagtaacaaaccctatatatactgtgttttttcctatacacacatacctatggtaaagtttaatttataaattaggcacagtaaaaaattaaagataactaataaaatagaataattatgacaatatactgtaataaaagttatgtgaatgtggyctctctctctctcctctctctaaatatcttcttgtactcacctattctcaaactgtagataactgaaaytgcagaaagcaaaactgtggataaggttggggctactgcaactcagccaaggacttacagtggcagacctggaatgcaaacccaggcagtctgataccagggtttctccacctgtgttctgccacatgggatggataggatggatgggtgtacggatggacggacggacagacggatggacaaatggattgaaggatgggtaggggagtcatcagatgtgttctccaacaccatgtacagtacctggcacatagcaaatctatgataaacatttgatagtaagtgaataatgaatgtcagtgccagtgttggtgtggccttaggttattctttccaggtgttgtatctgatgctggcctcatatgtttgtctcacttggctgactagaaaatccaagagaggtcccaagcaactagcccctcaccccaacatcatccgggttctcygcgccttcacctcttccgtgccgctgctgccaggggccctggtcgactaccctgatgtgctgccctcacgcctccaccctgaaggcctgggccatggccggacgctgttcctcgttatgaagaagtaagtgacagcagcgcggcagggcctggagctgatacatctcccaaggggagctggttcctgccctccatstgcaccttgatcagggggttttggagaacagggtcatcacccttccggagaagaaagccatgcaaagggaacatatctgccctggagagcattttccctgtaggacgatttttcatggaaacaaactctcatcttcatccagaacatacttgtcacctagtccttttggtccatttgactgttaaccttttctgtggctggacttatctgtttttaacataaaaacygttctccttcctcaccctctgtatcccctaactttgctatagtgggtattttattttaaggaaataattatctgcaccattactttgaatatagggagccccaactcttacttcctaatttgaggatggtgagtgggagggaacagaaaggatgctggggaaaartgggaatcaaagtgctcctggaaggggaagaggaacggcctaaccctaacagtgattaaggttattaggaggccgggaatggtggctgacgcctgtaatcccagcactttggaaggcggaggtgggtagatcacttgaggtcaggagtttgagaccagcctggccaacatgatgaaaccctgtatctactaaacatacaaaaattagcctggtgtggtggcgggcacctataatcccagctactcrggaggctgaggtaggagaattgcttgaacctggaaggtggaggttgcagtgagccaagatcgtgctactgcactccagcttggcgacagagtgagactccatctcaaaaaaaaaaaaaaaaaacrtattgggagtcgtcgatgkgtggtagccagaggccctctcccctctccrccagctatccctgtaccctgcgccagtacctttgtgtgaacacacccagcccccgcctcgccrccatgatgctgctgcagctgctggaaggcgtggaccatctggttcaacagggcatcgcgcacagagacctgaaatccgacaacatccttgtggagctggacccaggtaggaacctgctgcaccatcagagctctccaggggcactagagggtgggtcaggagcatttaggactgactcttcaggtcctctctggttttgtgttctaagtcatgtctttatttagctccrcacacaagaggttagcaatctctcccttagaacggggtttttttttctctctttgcagagagacagcacttcccaagttcctttctctagcccacttaaagaacaaggacctcagtgctgcaagttttcctaggtaaataaagaggcccggcacagtggctgacacctgtaatcccaacactttgggaggcttgcttgaggattgcttgaggccagcagtttgagaccagcctgggaaacagagtgagatcccttctctacaaaaaaaaaatatgttttaaattagccggaaaaaaagttagccaggcatggtggcatgcacctgtagccccagctacttgggaggctgaggtyggrggatcacttgagcctaggagttaagagtctgcaatgagctatgaatgtgccactgtactccagcctgggcagcagagtgagatcctatctcaaaaaaataataaaaaataataaagtaaaagagaagtagactttagctcattataaaaaataactttcggccgggggtagtggctcacgcctgtaatcccagcactttgagaggctgaggcgggcggatcatgaggtcaagagatcgagaccatcctggccaacatggtgaaaccccatctctactaaaaatacaaaaattagctgggcatggtggcgggcgcctgtaatctcagctacttgggaagctgaggcaggagaattgcttgaacccgggaggcggaggttgtagtgagccgagattgtgccactgcattccagcctggcgacagagtgagagtccatctcaaaataaataaattaattaattaattaaatttttcaaacaatgaaagctgtccaaatgtaagcccagttgcctctggaaatgagttgcctaccactggaagcattcaagtagaagctgaatggccacttgcctaggaaaattgtaaggagattcatacatctgataaatttttgaactagaagatttaaaataattgactagaggaactggcttttattatttctttatttatttacttatttatttatttatttatttgagacagaatcttgctttgttgcccaggctggagtgcagtggcgccatctcagctcactgcaacctctgcttcccaggttcaagcaattctcgtgcctccgcctcctgagtagctaggattacaggcaggtgccaccaggcctagctaatttttgatttttttttttttttttttttgagactgagtctcgctctgtcacccaggctggagtgcaatggcatgatctcggctcactgcaagctctacctcccaggttcacaccattctcctgcttcagcctcccgagtagctgggactacaggcgcccaccaccacgcccggctaatttttttgtatttttagtacagacggggtttcaccatgttagccaggatggtctctatctcctgacttcgtgatccacctgcttcggcctcccaaagcgctgggattattatttttagtggagatggggtttcactgttggccaggctggtctcaaactcctggcctcaagtgatycacccacctcagcctccaaaatgttgggattacaggtatgagccaccaygcccagctgggagttggcttttttttttttttttttttttgagacggagtctcactctgtcgcccaggctggagtgcagtggcatgatcttggctcactgcaacccctgcctatcgggttcaagcaattctcccgcctcagcctcctgagtagctgggattacaggcacacgccactacacctggctgatttttgtatttttagtagagacggggtttcaccatgttggtcaggctgatctggaactcctgacttcgtgatccgcctgcctcggcctcccaaagttctgggattacaggcgtgagccactgcgcccagccaggaactggctttttaaaggaattttgtgtggacccttttacaaataaccwattctttttttattttttctgagacagagtctcgctgtgttgctcaggctgaagtgattctcctgtctcagcctccttcacctcccaggttcaagtaattctcctgtctcagcctcccgagtagctgggatacaggcacacaccaccatgcctggctagtttttttgtatttttagtagagacaggggtttcaccatgttggccaggctggtctygaactcctgacctcaggtgatctacccgcctcggcctcccaaaatgttggcattacaggccaccacacccggcaataactgattcttaatgcacctggttcttaggtttggatttggggtttcaaattcaaatcaaagtctcctggggtataagggcccttggagatcatttgaaccaagctctagctcctttggtcttggggacagctccaattactagaacatgatttaaattgagccacacagtcctttgcctggggattttgcagcctgtrcttactggaggcatttccgtgttcgcacagcaggcccttctgatcagctctcaggccttgctgacctcctgggccaacactgagccattagcccctgtcagctatgtcttgctggtggctttagtagggacataggagggcctctcagagggaaggaggggaggagaaatggtcactttgcttgctccttcccagacggctgcccctggctggtgatcgcagattttggctgctgcctggctgatgagagcatcggcctgcagttgcccttcagcagctggtacgtggatcggggcggaaacggctgtctgatggccccagaggtgagtcccgagtgtgtcatgcgccatcggcagcccttcccccacatgtccactgaatgcaggagactcgatgccttgtgataacccaacacctccatcttttctgacccataatttggcacaagttccttccctgccactttgctttcctcyggcgttccctcatgttccaggagaatgcaagtcctgtcacataaaccaggtggtctaagcagaccccttctgggtctgagccacagctcactcaagctctgggttccttgggacagagttcagattagcccatggatcaggtgatgtgcaggacatgaaaaggttagatgggcgggcagcgtgangtctcacccactgcttctgagcaggtgtccacggcccgtcctggccccagggcagtgattgactacagcaaggctgatgcctgggcagtgggagccatcgcctatgaaatcttcgggcttgtcaatcccttctacggccagggcaaggcccaccttgaaagccgcagctaccaagaggctcagctacctgcactgcccgagtcagtgcctccagacgtgagacagttggtgagggcactgctccagcgagaggccagcaaggtgaggctgtccccggcttcgaggggacggtgtgggtagaaacctctgttctygttccagagtgaaggtcaggtttgggccagagccacagtgacagatcctctgtgttaggaaggtaaaggctagttacaagagaacaaaaaacagattttaatgtaggtaggagtaggagcactagccaccacagcatagtcagaatcctagcagttcaactcctgtggcttttttagttgctgaaaaagttgttcagaggccagacacggtggcttacacctataatcacagcactttgggargctgaggcgggtggatcacttgggaccaggagttccagtccagcctggccaacatggtaaaaccccgtctgtactaaaaatacaaaaattagctgagtgtcgtggcacacgcctgtaattccaggtactcgggaggctgaagyaggagaatcgtttgaaccctggaggcagaggttgcagtgagccaagatygcrccactgcactctggcctaggtgacagtgcaagtctttgtctcaaaaaaaaaaaaaaaaaaaaaaggctattcagagagagaaaaggaggcatttttgagaaatgtttaatggagatgtagctcatggaagcagctgagaactgatcagagagagatggaaaacatctcctgagagcagatctggacattgtgaaattaatataaaggaatgcaaaggcagacctatccgaagccataattggagtggcagctggctcaggggcaggcttagtgcaaagagctgagccatacctgcaycccagcactgttctgccactccgttaactgctctctgtacgtggcctgctatcttggtgcgcagtgaaggttagaayaacagctgcaaccagttatgaaatgatagaggagactacttacctggttcaagggaccagatagctgtgcacaagaggcactaggctttccacccagggggaaaggctatttcaacaatgcatgctgccccatgcagaggtgtacacatggaaaagcttggagcacgggyaggggacaggcagtatttgtcacctgagtgaagggcatcagtaggagatagggtagaggaagaattgggttgggaccagagaagggaagaccctcactaacaaagcaggctttgggttgagactgtgttaacagatgttctagctacagcttcccttcctgttgcagagaccatctgcccragtagccgcaaatgtgcttcatctaagcctctggggtgaacatattctagccctgaagamtctgaagttagacaagatggttggctggctcctccaacaatcggccgccactttgttgkccaacaggctcacagagaagtgttgtgtggaaacaaaaatgaagatgctctttctggctaacctggagtgtgaaacgctctgccaggcagccctcctcctctgctcatggagggcagccctgtgatgtccctgcatggagctggtgaattactaaaagaacwtgrcatcctctgtgtcgtgatggtctgtgaatggtgagggtgggagtcaggagacaasacagcgcagagagggctggttagccggaaaaggcctcgggcttggcaaatggaagaacttgagtgagagttcagtctgcagtcctstgctcacagacatcygaaaagtgaatggccaagctggtctagtagatgaggctggactgaggaggggtaggcctgcatccacakagwggatccaggccaaggcactggctgtcagtggcagagtttggctgtgacctttgcccctaacacgaggaactcgtttgaagggggcagcgtagcatgtctgatttgccacctggatgaaggcagacatcaacatgggtcagcacgttsagttacgggagtgggaaattacatgaggcctgggcctctgcgttcccaagctgtgcgttctggaccagctactgaattattaatctcacttagcgaaagtgacggatgagcagtaagtaagtaagtgtggggatttaaacttgagggtktccctcctgactagcctctcttacaggaattgtgaaatattaaatgcaaatttacaactgcagatgacgtatgtgccttgaactgaatatttggctttaagaatgatycttatactctgaaggtgagaatattttgtgggcaggtatcaacattggggaagagatttcatgtctaactaactaactttatacatgatttttaggaagctattgcctaaatcagcgtcaacatgcagtaaaggttgtcttcaactgagctgttctagttttctcttccccagcactgtcatctagattttccatttcagtaattcccacccctcggtctactagcaacaacaactttcttgtatcctttgaggagacgttagggagaaccatcatcatttcacagttaaaagaaagacagtccagtcctaggcaaaatttcatgaagccacttacttaggattttgtatccagtcagtcatcacccacagyaacccccacccacagccattagcaaaccaggaccggggccaggtgaagtttgagggcaacatctcgctttatttttatttatttatttatttatttatatttgagacagagtcttaacactgttgcccaggctggagtgcaatggcgtgatctcagctcactgcaagctctgcctcctggattcatgcctttctcctgcctcagcctcccgagtagctgggactacaggtgcccaccaccacgcccagctaattttttgtacttttagtagagacagggttttaccgtgttagccaggatagtctcgatctcctgacctcgtgagccgccygcctcggcctcccaaagtgctgggattacaggcatgagccaccgtgcctggccacgtccctattttagaaatgagaggagtgactgcacataggaaaaatgccacttttagcaattcaaagtggaaaaacttcttttatataaaaattatcccaactcccaccccttggctctcagtgttgcatctcccacagaggtaaagttgtgccattttcccacggctttaaacaaagcaaaacaaaaccaccaatcctaataacccccctccctgccccgtctccacgctgtgcggagagggctctagcccctcagtcggacttctccttctccttcatgtgcaagaagacgatgctgaannnnnnnnnnnnnnnnnnnnnnnnnnnnnnnnnnnnnnnnnnnnnnnnnnnnnnnnnnnnnnnnnnnnnnnnnnnnnnnnnnnnnnnnnnnnnnnnnnnnnnnnnnnnnnnnnnnnnnnnnnnnnnnnnnnnnnnnnnnnnnnnnnnnnnnnnnnnnnnnnnnnnnnnnnnnnnnnnnnnnnnnnnnnnnnnnnnnnnnnnnnnnnnnnnnnnnnnnnnnnnnnnnnnnnnnnnnnnnnnnnnnnnnnnnnnnnnnnnnnnnnnnnnnnnnnnnnnnnnnnnnnnnnnnnnnnnnnnnnnnnnnnnnnnnnnnnnnnnnnnnnnnnnnnnnnnnnnnnnnngaccagctactgaattattaatctcacttagcgaaagtgacggatgagcagtaagtaagtaagtgtggggatttaaacttgagggtttccctcctgactagcctctcttacaggaattgtgaaatattaaatgcaaatttacaactgcagatgacgtatgtgccttgaactgaatatttggctttaagaatgattcttatactctgaaggtgagaatattttgtgggcaggtatcaacattggggaagagatttcatgtctaactaactaactttatacatgatttttaggaagctattgcctaaatcagcgtcaacatgcagtaaaggttgtcttcaactgagctgttctagttttctcttccccagcactgtcatctagattttccatttcagtgattcccacccctcggtctactagcaacaacaactttcttgtatcctttgaggagacgttagggagaaccatcatttcacagttaaaagaaagacagtccagtcctaggcaaaatttcatgaagccacttaggattttgtatccagtcagtcatcacccacagcaacccccacccacagccattagcaaaccaggaccggggccaggtgaagtttgagggcaacatctcgctttatttttatttatttatttatttatttatttatttatttatatttgagacagagtcttaacactgttgcccaggctggagtgcaatggcgtgatctcagctcactgcaagctctgcctcttggattcatgcctttctcctgcctcagcctcccgagtagctgggactacaggtgcccaccaccacgcccagctaattttttgtacttttagtagagacagggttttaccgtgttagccaggatagtctcgatctcctgacctcgtgagccgcctgcctcggcctcccaaagtgctgggattacaggcatgagccaccgtgcctggccacgtccctattttagaaatgagaggagtgactgcacataggaaaaatgccacttttagcaattcaaagtggaaaaacttcttttatataaaaattatcccaactcccaccccttggctctcagtgttgcatctcccacagaggtaaagttgtgccattttcccacggctttaaacaaagcaaaacaaaaccaccaatcctaataacccccctccctgccccgtctccacgctgtgcggagagggctctagcccctcagtcggacttctccttctccttcatgtgcaagaagacgatgctgaagatgaagagccccagcatcatggaraaggcgctggcgtagtaggggtaggccgaggggatgaagcgctcatactgcgtgtgctggagtggccgcacggatacctgcaggaggacagaggtggcaggacctggccactgcagagcccaggcagggcacatgctagctgaaaacagaagctgtcacctgtgcttacctgagtggaagagtacaggtgtgtgtagcctagccggttgtaatccactttaaactggaatacaccatacacgtcgggcaacttgaactgaacactgtatttgccacctgcggaagaaccaacaagaataaccgggaggggtttcccagagcttttcctggttgggcctcgagagcaagtgaggcctggggccgttttctggcagcatcctcgtgcaggaactacactcacctttcttcttcaggaaggtcctcacaaaaggatcaatgcggacaaactccagctgaatgtcatcgccatcaaaggggacccatttgccatttgagagctgctggatcacgatgctatactcctgagataaaaggccaggttagccagggctggccatgactggaggccttccaccacctgcaggcagagctgcacttaattcccacccgacgaacatggcaggaatgcccaggagttcagaagacctgcagatgcccctgccacccggccctgatcagtaaccagtctctctcctcagcaaggttaatcccccaacacagcatctctgcctcttctctgaaggcctagattccttcacacagtattcatggcccatcaaagtctggacccaaaccaccctcctgccccgacatgtgccaggcactttcaagtattcatgcttccatattcgctttctcttgcctaacaaattcatcctaatgacctatttctcttattaagtccaacttcctgggcagagttaatcagtgaagcccctcccactgctgccccccatagcaaatacacacacctcttcaaaagaagtgctcctattaggacatcagttttcacgccaggctctgcatctcacctggcatgcttaggtgtagggattaacttattcatctttatttatgccctttaggccagcaaagaagtgttcaataagtgcttctgagctgagctcagtcagcttggcaaaccctttgggccctcccaccccaaacatctcttaccactaggtcagtgacagtgtaggcattgggtggggctgtctcgcccacccgatgatgggacacaggccccacacggaggacaccctcctccttgaacacccagcgggagagrgccacagctagttcatagttgcctgtctgggaatacctgcaggagggaaacaggagcagcttgggcaccagagccacctttccagtggtgcctgatgggcaggaccactcatgtccaccatgacagtaccctagcgaagttctgcctgtaggccttgggcacctagggactcatggttaaagggaacgcaggaaacaaacgaaaagatatggctggttgcttgtcatctgcacaacaaatacacaaatttctaaaaggaacggtggaggttagggatctctagataagtcactactaccttaaaaaattggaagtgccaataccagcaatatagcaataaagccctgaaataatctgacagcacctgaaacactcagcctctgacacttttagctaaaagcctccttcttccccttctgagtcctccccatatacacacactgcaccacccggatccccggcccctaagcctcctggcagctacctctgggagccgggcgccgccttctgcactgctgagttgaagaakgagtcgctgaagaagtcgagggagccgctgaagatgacrcgggcattgttcctggcctggagcccagcaatgaggagggtgttcttccccaccgcatgtggatactgggaacaaaacgaagctgtgacccaagcagttccaagtaagggaaaagctgccacgcctcccgaacaagaggacagcaggccagaccaaaacgaccctggccctacctgaagggggagcctgagaccacaccgcttctgcccatgccccaccccaccaactagtcatttccttcgcctcagccaaatgtgctgttctgcttcatttttatttcgaagcctcaaggttgtgaagcccttacctgggtgataggcttgtccgggaagaaggagtaagaggtggaagagcccgtcaggatgtccagcaccaaagggttatcaggatcggccaccatcctgcagcaggacgagagcagcccagcactggccccaggaactgagcccaaggacatgggatccccgagagccagttcttcccaggaatgaatccttttttcttaattgccaaccacttagctcttgtcttgatataacaatggagtctgacttgtttttgtttttgtttttcagacagacctcgctctgccacctgggctggagtgcagtggcacaaccttggctcactgcaacctctgcctcctgggttcaagcaattctcttgcatcagcctcccaagtagctgggactacaggcacacaccaccatacctgtctaatttttgtatttttagcagagacggggtttcaccatgttggccaggctggtctcaaacgcctgacctcgggtgatctgcccacctcagcctcccaaagtgctgggattacaggtgtgagccactgcgctcggccaactttttttttttgtttttttktttttttttaaagagaggagttctgtgttgcccaggctgctctcaaactcctggcctcaagcgatcctcctgcctaggccttcccaaagcgctgggattacaggttgagccactatactcggccttaatataacaaattaatcccatctacgtacccttaaagaattacaattttgccttgatttcccaaaaaaattaagtgaccccttcttcccccaggtttctgctgtcctctccctgctcactcactcacccaacacctcgaaagaggatgggatttagagatgatttcccaacgatggttggggccttcagcaggttctcagtgtcagccacgatgagcgtatgctgcaaagagtagatggaaaggtgggtggtcaggaaaaggttccccaagccagggagaacctcctcacaccctcttggcttttggctaagcagagctttgccatatgcccctgaaacctggaaggtgacaggcctgattacctggccaaggtctgagatgtcatagttgtgatggtcaatgacagccgttttctcctcgtcaaactcaatcccgcactcactgcccagctctcgaagagggtcacctgcacagaccgaagagacacctagctgagcccttacaggggggccttgggccaagtgtccttggcttccttgtgactccctctctgtcagccccagtgccctgcagcttcatccagctgggctcagccccagatggaccc

SEQ ID NO: 95818 - DNA, 53970 bp, Homo sapiens
  misc_feature (1)...(53970): n = A,T,C or G
tctatgtcttatctaatttatcaatattaagtataataaaatcctataataattttagttgggaatgtttttcctaaatttatactgatttattgatcaaataaactagcattacttccactttatggttaaagattatgaaaaatataaatttgtatttggccaaattggttcattattctgattttcaacaaaagttttatgtcagtttgaagagaatttcagtgatctctatttttccttttcagcactgtgttgaatatgaatgttataagcagaaaaccttccctgtttcagatcttagagggagaggattcaatctcactaagtataatgtttgctgtaggtattttgctgatgctctgtattaagaggaggaagttccactctatttgttttctcttttttttttttttctgagagttttgttctaaatgggtgttggaattttgtcaaatgctttttcctcatcagtcaatataatcatgtgagttttcttctctagcctgttgatatggcagacaacattgactaatactcaaatattgaatcagtgttgaatatctggaataaatcacatttgatcagggtgcataattctttttacacattgtttaattgtatctgataatattttgttaaggatttgtctgtattcatcagtgatactggtctgtcattttctttcttatgtagtgtctgtctgatttggtattagagataaagcaccttcataaaatgaattacaaagtgtatcatcctcttctattatctgcaggagatagtatggaattggtattaattcatctttaaatatttggtagaatttttcattgaaaccatctgtgcctgaagatttcttctttgggagtttttaatttatcaatttaatttcctaaatagttacagtgctattcatatgatctttttatactgtttaagtggcttgaatttttcaaggaagtggttttaagttgtcaaatttatgtgtgtcgtactccttactacccttttgatgttttcaaggtctacaatgataggtcctgttttattcctgatattagtgatttgagctttgtttcttccttccttcttaccctctctttttttcctttcttcctttcttgtcagacttcctagaggtttgccaattttacgtatcttttcaaagaaccagtttttgctttttattttccgtatttaattttattgactcctgctcttacctttattatttccttccttttgtttactttggatttatccttgctctgctttttttagttttttgaggtgaaagcttacatttgagactattctcttttctgaatgtaagcatttagtgtataatttccctctaagcactgttttagctgtgttccacaaattttaatatattgtatttttattctgttcaatgtactttttgatttctcttgagacctctctttgacccatggattatttagaagcacgtcatttagtttgaatatatccctggtaacattttgttactgatttctggtttgactccattgtggttaaaaaacatactctgtatgatttcacatcttttaaatttgttaaggtttatggtctatcttgctatattttctgtgggttcttgaaaagaatgtgtatagtcctacttttgtagaagaaaaaaatatgtgcagtgttgtataaatgtcaattagatcctattggctgttgttaagttcttctatacccttgctggttttctgcctagttgtagtatcagttgttgagagatgctgtagtctccacatataattgtggatttgttatttctaatttcagttctgtcaccttttgcttcacatattttgcagctctgttgtttggtacatatacatttaaaattgctatgtcttctgggttgacactttcatcattatataatgtccctctttgtctcataattttctttgctctgaagtctactttatctgataatgatatagccactcctgttttctttttgctattgttttaatgatatatattttccatctttttactttcaatattttgagcaaaagactgcctaatttcctttgtctgaagttccttttaataaatgagataaaaactaaataaaaaaactctaatttcttaattgaagctttgtagtttattatttcaaaaatgtttcaaagatggtggttaaaatttaactttggatcataatatttgagttcctagaaatactttacctagaaccagcccaacaaaaaagaaattattttttcatgagcaggaagaaatgcagagaaaacctgaaaaactttgactacataaacatatgcatatataccgagcagacacaaagtctcccactatttagttggtgactaaatatgaggggaatgaagggaatatatccttacctgtttattaacagtacagttaatgtttctctttaactgaaatctctgtacattgacaaatgacctatgtgggagaactctaaaaaagatacatacaacatgtaatcattggtatctggtgttggaaatacccattcttagatacaaactcaatacagttttattgtcttgcagtaatcagactttattttcttaagctttgacaaaatgagttgcaatgaagagaggtgttgcatttcttctttgtccttgagaaaactttaactcctttctgttaccattcaaggacacaatgctgagagagccctggctcttcggcacatttttgtcctctggcaacatctctttgttccattgtatttctgtactgtacttgctgttctagcacattaaatctaacagaggaaattttaggtgtaaactatgtatatacatattggagatagaacactaacattattttacactgtagcattctgttgctgggaatacgactaaagctctaatcctttctggtgttttcttgctaccaaaccccttaccctcctccttctttggttcctcttctttcaactagactctaaaccttaggcttatgattctcaaggataagactaacacttgaacccagaactcactatatgtcaggcactgtatcatgtaccttatactgtctcatttaatttttatgacatcataatattatctcaaaataaagctaggaaaatataataataaaaagatgagaaaattgatttcaaagaggttagataacttgtctgcattcacacagctactaagttccagagcctgcactggaatctaggcttgcctgctccccaacccactcttttaccaacacatgaattctgtattatgtgatcaattcaacaactagctgctagttttagccttttagcaggattttgtgatttggccaccatattagtattgctatctgcctgaggaacacagctaatgtccctgtagctgtttctaggcttcatgtcttttctgtagctcttctctgcttttcctttctggttctaaactctgccaaaaatctttttctctgtcacttatgctagataactgagttcgagcattctgtgtcctcttgctagtttccatcttttctctataattttcccccgaatgattctaatacagctttcatatgatcatatgagaaactcacatgtaaatgcacatgttaaaagacaatcgccattttggaggcaatttttatttatttatgtgcattgttttccttgctatttattgctttccttaaatagttatcagacttaagatcctttcatttatatacctacatataactttagggtttccagaccaagacccaagatttctacctaagactataaaaagtgaagaaacatttcgaatgctaaattaatgttttagtctatttaatgtaaatataaaaatattattcatcaagtatttattaagtatgtgtcaggttccaccctagacaccactttcttacccttccacataattttttttcggtgaaagaacattttttaaaattaaaaataagctttctaaaaatggggagatgttggtcaaaggatacaaagttttggttatacaagatgaataatttctggagatgtaatgcacagcatggtaactattgttaataatactgtttgcatagttgaaatttgttgagagtaaatcttaaatgttctcaccatgctggcaggcagtaaatataagaggtgatgtatatgcttattagcttgattgcggtaatcatttcacaacgtgtttatatatcaaaacatcacattgtatgccttaaatatatacaattttgtgaattatacctcagtaaagctgaaattttttttaaaaaagttttcttaatacaataataggcaaattcggcagcctggcacagtggctgtcacctgtaatcccatcactttaagagactgaggcaggtagatggcttgagccctaattgttgttcaggaccagtatgggcaacatggcgatccctgtctacacccaaaaaatacaaaaattagctgggcttggtggcatgcacctgtagtcccagctacttgggaggctgaggtgggagaattgctggaccccaggaggctgaggctgcagtgagtcacgactgtgacactgcactgcagcctaggagacagggcaagccactgtcaaaaaacaaacaaacaaacaaacaaaaacaaaaaaccagcaacgatcagtttcaatacttttgtaaatatgcttccaacttttatctacatttttgaactgttaaaccaaatttttcagttaacactttataaattaacattctttggctaggtgcggtggctcacgcctgtaaccccagcactttaggaggcctaggcgagcagatcacttgagaccaggagtttgagactagcctggccaaaacagcaaaaccctgtctctactgaaaatacaaaaattagccaggcgtggtggtgcacgcctgtaattccagctactccggaggctaagtcatgagaatcctttgaacctgggagttggagattgcagtgagctgagatcatgccaccgcactgcagcctgggcgacagaaactgtctgaaaacaaaacaacacaaaacaaccattattctacattaatggttgttaaaggttaatagttcattttctgggtgtatgacagttttaaacacctaacttttaatactggattcagcctactgttgttagctttttgcagtcatatatgaagactatgatgaacatcattgtaggtattcatctttgcatatatccttagacatttccttatagtctaagaactagcatttctagtggagtggggacatttttccagatgtccatttaagaattatcattccattagttaaaaaatttgcaggctatatattcaaaggggatcccttctgtttggaattcaacataaccagttagctcaaacctcaactctcgaaaaatgtgtctcctttactcaacaaacatttagagaatactgaatatgaggaataaaaaaagataaaaaagaccctgtactgggcaggtaatctactgtagtatgcagattcgttatcaaacagactacaatgtatttaaattttgtaggcgatgaatgcacaaggcccttaagctgcattgaaggctgcctaaggcagtatacaaaatcagtgctgaatatttgttaacacttaaggagaatgtacgttttaattttcatgtttgatgcttggggaaaagattacatcgcaccacctatcttccccatatattgattattcgtgtttctcacttccatggtagtgtgcacgttatttgcttaactttggcatataaattcagaagaaatatcatttaactctgtgcctaaggagggtatttagaaataaccgacgcagctaacatgagaaggcaaaaaaaaaaaaaaaaaagaaaaaagaaaaaaatcacactaacggactttttttttttttctaacaacaaaaaaccgtgagacttcacttggggtaaccataacgtcgtcaaggctgtggcgtcacgcctctaagcggatacggcagaagttttggggccagacacaagacttccaagtttgaatgggcagcgcaaaacccagacaagttttccggtagtgccgccaacccctgtcaggcacagaagacacagcgagaaccgtgagccgttacgaaagcctaaaacactgagctcgcgtcctgccaagcagcaggcgcacaaacctacacctccgagcgctccctggaggtcccgcccactcttctctcccgagccggctagagatctggaagagggcgggccaagggygaggagggcagtatgcgcatgcgcgctcaggacccagtcagtgagccaataaggaatctcgcgagtgttgaaagtcggtggcgtaggtcgtcgtcctggatgctggcgagatagatgttatcttccagaggaagaggaggaggcggcgaagcgttttcccagcctcagtctctctttcgttttccttttcccttcccccaaccctccgcccttctctaaatcagccggccttccttgacctcagtgacccgtctggccccgcccaccctcgtcgacgtgattcccgccgtgaggtaagcgccggtggaacctagagccccgcggaagagcagaacgtttrggagtgtgcagctcctgggcccggctcaggcccgtcgcggaggcgcggcgcaggggagcgctcgggtgggagtctcgctcctccaccagtttattgcgacgtagcatycaggcctaggcctccccgtccatccccgccggactcgggcctctggcagcagcgggtgacgcagacggaacatcatgtcgtccgcggccgagcctccgccacccccgcctcccgagagcgcgccttccaagcccgcagcctcgatcgccagcggcgggagcaacagcagcaacaaaggcggccccgaaggcgtcgcggcgcaggcggttgcgtctgcggccagcgctggtcccgcagacgccgagatggaggtgagggcgacttgcggcatggggagcgggtgcagcggggaggaggagctggctccctcgccggatcgtggcgatcggacgcagagccgggtttctctctctgcaccagactcagcttcacaccctgtggatacgaaatgatgctctcactcttgctcccttgttcttaccctattcgagctaagcaaaatggatttctggctcctcacatttaaattatttgtctctttcgtgaatcctgacaaatatttgaacgctctcagtgaacagatgttcttggttaccgtggcccgggggacccatcgtttttttcccactagactcccataattccctctcctacctctgaatgtggtttttagtttccaccaaacttcggggaagggcgaggagatgaccccttaggagcgggatgcacgggcggggtgaaggaggcatttaaaagcagcgcgtccgaggacttgggcctccttttcttcttcccggtccttgcaggggcggtatctgttgtgggcagaaacaatggcgagagctggatggccgagtgcgcagtggggataagcggggcgcagctgcttctgtgaagggagagaaggcccctcccaggcactattccactggaagggaagcaaccaaggcagcagcagctgtctcggatcccccgtctaatttaggggggatgrataagtgtaggaatgaattagagaaccaggcgcagttggttggctctcagtccggcacttttctctttttggcctctggccttaagaaaaaaaaaaattagtaccactcgctgccgagacttatgggtttgggttgggcaggggatgctgacagtactgagggggctggaaagatgggggaagctgccaggcgggtaaattggatatgcttccaggctttgcatctgggaacaaagtaattgctccttccaatttttattttcttggccttcgacctgttttgagatattttgtgagtcggagcccaaagatttctgggattttcctatccttagacagaatgaaagtaatactgctccgaagatgagtcttgatgcagaatcattatacagtaagaaaatggtagcgtaatttaccattgaggcttttggcacagtagttatatttgggtagctggggttaagtaacattaatgttagtaatcatttaaagaacttttagtggtgagggtaggtttagtgacataggaactcctgatagttcctgtagttttgagtgattaagataagattacttccaaattaaaatatattcagtgttgcttttttttccttaaggaaatggttcttttgggttactagggctctttaacttggatttctgttccaaggcttaaggggtttgacacaaagcaattatgtgtaaatgtgcagttctctacaaaaattgtttatagtttttcctcagcttctcaaaggggtctgccatccaaactttggaaaaatgaatgtttcaccagaggtcttattaatatctgaatgcagagtaattttaagcctaaagcaagtcaacatttttgacttgaagttgctattttaaatgaaaattgattttaagttcaaacgtgagtatagatgttatcactaccgtattaaattagtgatattttcatttgccagatggggaaattgagttctactaggtagaacctgtaataaaactcggatctgcctttaaaagtgagccgtttcccacccatcttgctctgccatgttcttaccaaaaaaaacatatttggcggttcaatttattgaataacattgttatttttaccttcctagtatagaaatattaggaattttatttttttatccatcttatcactgacacattttttttttggttgacattatagtgtgatttttttttttgtcttttaaaatgtcagtttcctgtttaacaaaattcagaattactgcaattcatgatataaactaagtttgagcacacatgcttaatatatatgtcacaacttaatctgttttgcacttggaaaatgaatattttataaatgactttttcttgtttggaagtatgatctaaggtgtttttctaaacagagtaaacccagcattcatgaattttttttttttttttttttggtgacaaagctgattttcccagaaatagccttcctatgtattcagttactttttttctttttgcttgatactaataggtcaatggagcacttgttttttagttatccttttggcagtgtggaactcttctgtgttcatcctcatctctattgactagattgattaaatagtcacctgtataccaataatgtgatgtcaagatgcctgaagcacattttatttttgtaggttgcatttcatggcattttggaattttgtaaactggacwgggtaggtggctttgtcacttacatatgtagaccagagatttatgatgaacatagggtcacacaagtgccaagggtcttaacaatgaagttagacttgacttaaggtcattttaccttctattccagtaccgtaccagatctcctccccacaactttttggtcacagatagttttattatagcatatattgcctagcatagatttgtgcatcattaatgaagattacttctgccaattttttttaatggatgaatagaactttgcagtgtagaagttgttttttgttgcttgtgacatatgaatgtcaggataaatatatttgcaagaataacatttattactagtttaggaatcagactgtagttagagtattcaatttaggctgcgagataaagtttttgtaatattccagaaggtggaaatcagggtgactaattctgatttctttgtagacatttgtgtggtagcacagtagatactgtagttttatgacaaaaggggaacttttccccacattttatactatttagtttggtttcatggttattacagaaaaagagaaacagattggcttgtattaaatgtagttttcttttaggatgatgaagataatcttgtgttctaatcttggcaacaaccatacagtttatatatatgggttaaatacgttgttatccccatagtatctaatatcattttatcagtttttctgttagcttagatgacagctgtttaagtttctaggaagtttggggtgagaatgtattatttaagatgtgttttggtcagaaattggtctataatggtatgtttactattttcgaagaccaattctatttaattatttctttctaccaggaaatatttgatgatgcgtcacctggaaagcaaaaggaaatccaagaaccagatcctacctatgaagaaaaaatggtatgttctaggyttgtgaatagagtctataaggaaaactttttatcaggtgattaaatgtactaaacatctatcttagtccattttgtgttacaacaataccacagactgggtaatttataaagaaacgaaatttatttcttagagttctggaggctggcaagtccaaggtcaaggccagcatttgttgagggccttcttgcagtgtcattatatggaggaaggccaagagaagagagcaagacaggactgaactttcttttataacaagctcactggtgataacctcctcctgagatactgacagtaatmttttcctaatcacctcttattaggccctacctcccaacactgttgcgttggggattaaattacaacatgggagatttggagggggacacagtcaaaccatagcaatgtctgtttaatttttgtaattatggcacagatatccatttgaaatatgtgtaatatggaatactataacttccatatcttaygtgtctatgtaagccaaatggaagtattatatgaattaacataatatgatgtcattatctagttatgttaacaacacctttaaaaatttaaccttggaagcgaggtgaagaccagaatagttactcagtgtatgtttattctgcacttgactagcattgtactctgctagttaccaaaaaaagaaatatgctccttgttcacagcatttttatattatagatggggtctttacaaaaagaacatgacattatattggagtcattcaagtcccagttcacgttccgtatcttctaagaaacttctcaaaactatgacttgacttaaacagtacctacacagagctttaaatttaaattcagttttagtaatagtagtagtggctaacagtgaatgtttactccgtatctgaccctgttaggaatgctttatatggattaaactcatttaattgtattgaaatctcaaaaagttaaaataacaatgtattaaataagaataccactacacagtgtgctcctgtagggtaaaaacagtgtcttaatctttctttctgtcttcagtacccagaacagtatctggcacatagcagatcttacatattttttaaaacatacttttttcttgtcctttgactttctcttccaaatcagtaaatatttttgaatgtcttaaatagcttcaaaatcttaaaattatggtatgtattttatgtgcatgtataatatgcacaatacatataacactatgtaaattataaatgatatatctttaggtttgatttgttatatattttacatatgtatatatgtaactgtcaccttttttgctatcaaacttagagaaaaaatagatttgccgctckgtttttttaaagtgaatactactttgaatacagtctacatattttaatactgctttaaccctttatagtttagattctgacacactctgctggtgaatctaattgccaattctgaggcttagttttagtttcttgatttgtgcttgacattgttgaccattcctcaaaaatcttgacttgccttgaaagacattttttcccgtgataatatcctctttgcttttttattcctttgtccttccttattaaaatttgaacatttcttcctagacagtttgattcttactggtttttacctggtatctttaaactgaatattttcaaatacttaacctctagcccagaagcctgtaatccgtattttcatttactttaaaatcctattcatacctcttacttgagaatatccaaaactgaattcataatttttacttagcataccttagtgttacctcaatgaatgaaagttcctcttcaggtatactcaagatgttcatgacagtactgcatacttgtaaacaataagtttacttacgagtttattctcttttccatatcaccctagtttagtatttttctattattgcatggattattttgtgcttctgtatttgcctcctttcttatgatctggccccttccaagtttcttaacatttttgcaaagtgttatttataacacaaatttgactgtgaaatggaggtttttcagtggctctctacaatgcttttcattttcttagtggcctttattggaactcttttcgtttcttccaggtttttcagtctcccagcattatttccttttttgacatcatgatcttcacctgcacagttttcttctaagcaagaagctcccttgtcatctgctagttctaaccatagataagttcactatccactcctcgttcttgaacccagaatgctgagtactacttcagaaaactaaatactagtgctgattggtgccagtataagtttatggtttttattttcttggaccttgagtatttattgcctatcagtctcatttagccattctaaaatgtccccactctgatcagtctttcttctccatttctaccatgccctcatttccaatcttcctccacaaagaattgcaggcctgtctttattttctttctcttttcaaacatatgtatagcctctattatcctacctcatttcttcctgtttcagagaaagaagctagtccaaagctattcactttaatttccgtttgattttataattgatttctttcaggttcctaatcatactctcttgtttctgctttttaggttctgttggtttttctccctcaagacatttcagttttaaccttttcattctttcaagcagtttatcttgattccaaacataattacaataattattttttcagtccaaacatcttgtagatgcgtgctcttggcttttgtttcattatctataaattaagaaatgtaattatgtaaaatatgcattcacatatgtatcttgttcagcactttaaaaacagtctgtaatcttggaaaacataaataacagaggcttgtcatctgtaggacattactggggttctagcatgttcacagtcttgttactgtgcagattcatttgctgctatgactgccatttgtgacccaatgaaacactataaccatgtgccttcctaatagcaaattgggcttcagtttttacattggtgtgaccttaaaaaatgattatgttccttttaaaaatacgtagttgttacaacattatggcatttggatacttcttgtgtttgctaggtaaaatgtctttttgtaatttattcccaaactgacattttaaacatttatagacagagatgttgagtagttggtttccctgtttattgagcttttcttgtcttgcttctcctttgtttcatcaaactattattgtttttgtataaaggctgcctaatggctcccaatttcattatttttatgaaaatttgtcttcgaggctcttaaggttttttttgcccaagtaaattttttccattctctcggtattataatagggaacattcaaaggggcagatggcagatacgaaaggaaggaatagtatcaatcccaataccgttttaaaatttgtcacagcctaactaatgaatgagcactgcattttttccagcttctgagtaaattcacttgtattgcacagtgtttaatattttaaaaattgttccgatcaactgtattgaagtataattgacataaaataattttaagtttgtaattcaatgagttttagcaaatatttctttaaataccatcacaatcatgatgcagagtagttccatcatccccaaagtttgctcctgctcctttctaatcagttcttgctcccacctccttgccacttctgatctgctttctatcactagttagcatttcatttaagtggaatcatacagcatgtagtcttttgtgtttggcttctttcactttgcatagtgcttttgaaactcatccatgttgcatttatctgtagttctctttttttttttgctgagttcattgtatggaggcatgctgaaactttgatttctgaagttttaattgatactctgataaaatgtatcttaaatttttttttttcagcaaactgaccgggcaaatagattcgagtayttattaaagcagacagaactttttgcacatttcattcaacctgctgctcagaagactccaacttcacctttgaagatgaaaccagggcgcccacgaataaaaaaagatgagaagcagaacttaytatccgttggcgagtgagtaatagtttaaayttcatagttcaaccaaacttattttcgatagtcttcagtggaagcataaaatcactatgataaataacttaaaattattttagtgccattatttatttggccctgtttggcttggcatgatttagccataaatgtataagtatataaaaatacgcataatggttagagcacagtggctcttgcctgtaatcgcagcattttgggacgccaaggtgggaggattgcttgagtccgggagtatgagagcagcctgggcaacgtagggagatcccatctctacaaaaaaaaaaaaaaaaaaaaaaaagaataaaactgcataacgccttattttttgtagcattatatagtttatgaattgtaacaatcatgttgagtatggaatttagatgtcacgtcattcctcagagaggaaacaaatgcagaggttaagtggcttgtttaacatcacattgaagaatgatccagacttgaatttgaatctgacttgggtgtgctctaggctcctccatcacatacagatgttgacagtattttatctaaagtgtggtgtgtgggatattgtgatgacttacatcacggcagcytgtttaaaatttttattgcatacttagttgtttttatataaattgaagtgtcacgttgtatgccgtcctttggtggtggttgaaaataattcttacatgttgaatttggaaattctctagaattttcattctggttggataaataagatgtttaattagtaatagtagatttagggcagtcttggctccctgaaatggctttgtgtaattcccaaagtgaaaactgtgattagtaattaaaatacaaaagattgtttaaaagaagaagtatcaacaaggttaaattcactacacagtttgttgaaagagggaagtatgatcttcatcttgaaggggttatcgttgtaagcataataccttttatttggggtattccactcattcattatatcttatttctcatccattgtgaccaaagcactattttaatacttacgaaactttgaagggacaattttgcccttcagctgtatttaaaatatttcagacttcagaagtttgcattagtgtcatggcatgaaactggaaactactgtactgaatattgttatgggatagtcagtatgatgtctcgaaaagaaacacttcttttattcttttctattttattattatcctaatttatcttttttataagataaaaaagattctrttggaaatagtaataataaattgttaggcttaatgtattaaatagtgttattagggaaaaaagtcctagttaacagatttctttactcctcaaaccatcttaaatgggaagctaatttacctaaagtaatgagggtcatagtattgtctttgggtatcaggaatacatttttttaaatctttttttgtttgtttgtttttattgagacagagtcttgctctgtggcccaggctggagtgcgtgcagtggtgtgatctcggttcactgcaagttgtgcctctggggttcaagcgattcttggacctcagctgggattacaggctcacgccaccacgcccagctcatttttgtatttttggtagagatggggtttcaccatgttggccaggctagtctcgaacttctgacctcaagtgatccacccacctctgcctcctaaagtgttgggattacaggcgtgagccactgtgcctggccaggaatacgttttttttttaagtcattcacgattatattcaatttttaacaataaatgacatctcagcttttaagttttacaactgtaataatcaaacattttgagagtaactataaaggatattttataaaaagaatttaaaattatctcccagtttatggagaataaataggggatggaagtagatctttgtactcaatttcataggctcagaatgcagagaagtacaaggaataacagactaggatgtactgattatgattagaagcatatataacaaacaagaaggcccttgaatttctgaggaatgcttctatcttggaaggccgcttatccttttagcaagcatgtggttttggtagaaatgaagttacaaattagattcagcggtctcaacagaggcataacgtgcctttttctaaataagatgaaaatatttgttgaaagtgtcagaattggggagtaagtattaatagttttactgaaccaagccctttagagattaattggcagtrttaaaactttagaaaatcagtttttaagggggtagtatatctgattctcttaggatgtagaatttagatgtgtatttaaaaatttttttgatgaatccgtggtcactgcttaaatttctgagtccttatgctgcagcttttgctcgaagttacaattttaaacatgtggtttctggaacttttttttccttggcaaaaagatttttaaaaaggtacactttaaaattcaaataatgagattttctgactacatagttcttgaaatttgactatcatatttgagtttattgggttctggttaatgtatcgtactggtgtattttaataactaatgtatattttaaataattatttaaaacattgcagatttaaatrtactcatattttctactgtccactggttgatgcctgttaaaaatttaattttgtggaatcttggtcagccacttgactatgatgtttaaacagtagctgataattaaagccaaaactcaaatcaggttattttattttcatcttaacagttaccgacaccgtagaacagagcaagaggaggatgaagagctattaacagaaagctccaaagcaaccaatgtttgcactcgatttgaagactctccatcgtgtatgttaaacacacttgatttttttaaaaaattgccctttgagatctcctttggttaatgttttggatttgtgttggctactatttgtgaagcaaatttttagtagtcttagatgtttattggttatgaaataaacttcagaytttgatggagatgagagcatattayaggatagtagtgctgtatttcaaagttatataaaatgtcattgtgtttgttattgccctgaagtatatgtaaatctaaggatcgttttgctttatatttgtcccacataagaaaactaatttattttaaaaaaggtacttcatgaacacatttgcttacttctgatgtttttatattaatttaattttttgtgaaatgtatttgtttattggttagctttttatcctcaagtgtttttcaaaaggagatggagggctacactgtgtacatattaaaaaagaaaaatcaggtgaccgttatgtatatttggtaattattctggggagcaaaataagtagtataccctgaaagagagtgcattggaatgtataagatatattggacaagtaacttaggaatttcctatttcttttttttttttttttactagaaagaaaataaaatccccagataacctgtatctggtctttatgaaagctgaaaatacttggttaggaacacttggtttttcattaaaaagacgagaggccaaagagtctctcagaccagtatatgggtaacgtaagaactgagttgttggagtgggtactctgatgcccgcagtcatgtttcccgcacttgattatcttccatgtccagcttttccacttcagaccatggcagctacctctagtattttggaacttgcagagttcctattcaagaatccgttagtaatgaaaataaagtsagtagatatgtgtaggcttagatgaagagattgcyttgtatttcttgtcttaaaatgcctattgtgcttttcttttgttcttagatgtaaaatggggtaaactgagagattatcaggtccgaggattaaactggctcatttctttgtatgagaatggcatcaatggtatccttgcagatgaaatggtatgtgttggtagttttttttgaagggtatgttttgtattgaaaatatcttatacgttgataaaagtttcttacagtctacaactgttagcaaatggatcctctcagaaactagtataagcagcttgccttagttgcataagtgtgatctgtattttaattgtgagaaatttccatcgctgaaaatatgataaatttaaaaagaatacatttgagaaacatgtttttggatgacttttatagtacaatgatttatttgcttccagttttgtaaaacaaaagtgaggtcattaattgtttataattgataaatgttttttccaggtggtagcttgtacaattcttagaaaacatttatcttttgttaactactagttatgtaatgaatgtttaaaaaagtttccttattgctataatgctaaaacgtttaattggttggagaaagtatgaagtcaaaagaaatgtgtttcaatgctagctctgctagatgactttgggaatgtcacttaaacggggccttatgcgggtgataataatacctcctttagagacttgtgaaaattatatgacataacacttacaaactttgatatatgttaagtttttgccatttattaactgttataaatatgtagcatttcttttgaacatttctatatgttgggaggtataattgtgaaataatattttcatttttcactgcttcatggttattttgaaatctttcagggcctaggaaagactcttcaaacaatttctcttcttgggtacatgaaacattatagaaacattcctgggcctcatatggttttggttcctaagtctacattacacaactggatgagtgaattcaagagatgggtaccaacacttagatctgtttgtttgataggagataaagaacaaagagtaagtttctagtattycattacatttttgaggctaaaataatttgaattcaggcttgggtatgggtatagctggaagaaggataaatgagacgggatcttcgcaaatattagtatttacaaatgtagcattgtcttggtggataaaaaacagcactttgggaggccgaggcgggtggatcatgaggtcaggagatcgagaccatcctggctaacacagtgaaaccccgtttctactaaaaactcaaaaaattagctgggtgtggtggcacgcatggcctgtagtcccagctacttggtaggctgaggcaggagaatcgctggaatctgggaggtggaggttgcagtgagccgagatggcgccactgcactccagcctgggcaacaaagcaagaccatcttaaaaaaaaaaaatcatactgggaagaagacattagaaatggtagaaagctgtaagactgtagtttgtttctctcccttttgggagtggttgtataaaatcattggttgtgctctcattagaagttattttcttgtttttaaaagatattttgaaatgtgagttggttggaaatttaaggagccacatttttagatgaatgtgtgtagtggtaatagtcacagaattagagtttttaaagacgggttgagtcatatatagtaatttggtgatttattatgatatttaacaaaataagttaaaatttcgatcagttgacaacatccttgtgggargaagagatggaaataatgacattagtatataaagctcagatttggaaatttattcagactctactgaatagctgtgtacttgttttttatttcctcttcatttacctgtgagtgataagtctatatttttctctccctttctagttatgttggatattttaagttatcaatttttgtttgtttgtttgggagcccaaagagtggtaattacttaaccagtctttgcttcagtttccttacctttaaaataatactattaggaatgtgttaatacatttataaacctgaaaggaatgcagatgcctactactgctaactatctttccaccctcttcctttctttatgttaaaacctccctcttttttgtctaaacctgcctcctaagaatttcccgatctagtggaattgcagaaagacattttaagtgtctattgaatttttcactggttaactttgtcagttttttaaaacttaatggttctgacatttaaatgattaatgacgttactttagtcttaggaaagctggttctaaacgtttgcataatatagctagctactctactcctttttagtattcccacctctttttatatactagattacttgtcatcagtaaatgtaatgcgtagtttatttctacgtgatgtaatttttttctcttgttmcacaggctgcttttgtcagagacgttttattaccgggagaatgggatgtatgtgtaacatcttatgaaatgcttattaaagagaagtctgtgttcaaaaaatttaattggagatacttagtaatagatgaagctcacaggatcaaaaatgaaaaatctaaggtaatttgatacttagatgtgaaaagccttcatgtaagaatttgattaaagtacagatttttttttcttttaactttaagttatgagatacatgtgcagaacgtgcaggtttgttaacataggtatgcatgtgccatggtggtttgctgcaccccatcatctaggttttaagccccgcatgcattaggtatttgtcctaatgctctccctctgctttctccccactccccgacaggtcctggcatgtggtgttcccctccctgtgtccatgtgttctcattgttcaactcccacttatgagtgagaacatgtagtgtttggttttctgttcctgtgttagtttactgagaatgatggcttccagcttcatccatgtccttgcagaggatataaactcattctcttttatggctgcgtactattcgctgatgtatatgtgccatattttctttaaccggtctatcattgttgggcatttgtgttggttccaggtctttgctgttgtagataatgcaatatgcagaatattctaatggtgtatttggttcttttctttcagttgtcagaaatagtgagggaattcaagactacaaatagactattattaactggaacacctcttcagaacaacttgcatgagctgtggtcacttcttaactttctgttgccagatgtgtttaattcagcagatgtaagtatttcctggtgctttctggttaataataatattttgcttaatgctatatatttttgtaataaaagtggcctgccttttagcatggcttgaggttattattaattttttatgcttttatttacatagttagcctggtgttatctcctaggttgtctctgtataatgggaatttacttttgtgcctttggtttcaatcttatttcattattattattattattttattttttttgagacgtagtctcactctgtcacctatgctgaagtgcagtggtgtgatcttggctcactgcaacctccacctccggaattcaggtgattcttgtgcctcagccttccgaatagctgagatcacaggtgtgtgccaccatgcccggctagtttctgtgttttttgtagagatgaggttttgccatgttgtccaggctggtctcaagctcctggcctcaagcgatctgcctgcctcagcctcccaaagtgctgggattacaggcacgagccaccacaccaggcctcagtcttctttaaatcattgttttctctatctgaaatggcataaattgtcactcctatttggtaagtcaggttggcctgactttgtttcagtggctctaggttgactggttatgtttttaaggtgctgctcaaggtattcctgaagtgatttgtatacctcacattgcttatgttttaagtcccaaggatgactgtcaaatttagtgaaatctgtctggcttttcttatattatagtctaacaaacaaatagaacctaatctttatggattatttatagtcatagaaaggatagtaatggttaattagctatttgaactgttaatagtaatataataactatgtcaagagtttgtgctattagaaattgcagttttttttgcctggaccagtgtttatttttgaagctttgtttgcatagctggcgtcttatgtgtattggagggatttgaagagctccatgttagtatatttttgtacaattaagttataaaaaggtattaattaattttgttttttttctgttgaagattgttttgaaagaatagattgtgttgtaaaaagatatttaatcagactccaaaagcaattttagcttcgattttatgtattttgatgtttttgagataattcctgtttctcactacattgacactttcatttactttaaagcagtgaattctaagattatgtttactcaaaaacaaagcacatatataatacatatgttcaagagatgaggttagggaaactgcccttgttgaaatcgtaaccaaatattaatgaaatgctggtaatttcaatttcatttagtaagtttgattaaaattgacattgttcgtaaacttgtatttgagtagtgcgaatggtctcagagaacaaactataaaatgttttaattttcaagcttttatgaaacttgaaagatactttacaagaatattaattttctaatcctatagaacttgctctccaactttttactgtgaaacttgttattttgatgtttttgagaagaatgtttagaaggtagtgtgatttctgaactacttgttttaaaattagtaacaatgacacatgaaaaccaggattggactaagtgatttttttttgtgggttacaattcaaattactaattctagaaatcatttctatatctggtattatagggtatttgttaatattatctctgatctgagtatattttttgtttgtttatctaggactttgattcctggtttgatacaaacaactgccttggggatcaaaaactagttgagaggcttcatatggtaagtattttggagtagtgttaaagcatatttatgatgggaaaaaggataaaggtttaaattagtagattattttcctgttaataaaaaacacaatggcttaagaatcagatctgcttgaattctgacacttaactcttacatcttacaatcagtgtagggggtgatgtgtggttgtttcagtgttagaacctagaatggaatcctgacttaagggagaaagtattctcttrcagttatacaaaatacagtggggggaagaagaattgcataataattaatatagacaagtttttgttgttgtttttgagacagtctcactttgtcgtccaggctggagtgcagtggcatgatcttggctcactgaaacctctgcctcccaggctcaagcagtctctccccattcagcgtctagagtagctggggctacaggctctggccaccatgcccagctaatttttgtattttttgtagagatagtgtttcaccatgttgcccaggctaatctcgaacttctgaactcaagttatcaacctgcctgccttggcctcccagagtgttgggattacaggcatgagccaccacgcccggccttaatagacaagtttttaaagcttagttcaatttacattccatggaagaatctaacaggttcacttttgaaagggctaaagatccatctgttttttcttaaatctagctacattgtgtataaacaactgctaatattgcattatgagcacagttggtatgtttttgcttgctgtatagctttgtttctacatacagcttcctgtgacggttcacaagtaaaagttggtaggtagagaaacttctctaacagacaccagattaaaataccctgctaagcaggttaaagcaggagcttgtaagaatgttatataaagcccttaatgacctaactcaggaattctcagcctcttttgacattttggtctgggtatatctgagaggggtaaggagagaggggagaacgtgattgtcctgtgtattgtagcatgtttaatagcatccctgatacttttactcactagatggcagtagtaacattcctccagttgtgacaaccaaaaatttctctagacattgcagatgtcccctggggaacaaaattgtgcccctccatgacctaacctttttaacattctttggcatctgttttacttcttcatatattgagctttaatttgatagattgctgaccccactgtcagttttctgtaaacattgtggtaattctaatctatttttgcttatcatttttgctacacctagaatcctttttcctggtctctttactaatacctagtccaagactcagcgacatcacctccactgaaccagccaggctgaggctggcctaggtgcccttctgtgtattcyatctttaacaatctgagcatcctaatattataggactttgcagaggatattgagatgattcacaagtgttttccatactggattgtaagcacaaaggcaggaagcacagatttatttgtctttgtatacctggcacaatgcctagttagagtggatatttgaacagggaaaaaaatttaagttcatgattgttcaaatatttcattataaagtactttaaaattcttaaatattgagagttttgttaaatatttgaaggtagtaatttcctagctacctttgtttcaattcagatggcattcatgcatctaagcactctctttgtatttacttagaccaaggattgtggagtgtatatgtaatcttgggggtagaaaaggaggcagaagaacatgattttttttcatgcattttttyccccttattcctctgctcttggctttcctttagtaaatacgtaggtacatctaggtaaagcaaatgaacaacccattcagcagtatcaaccagatttggtaactctgttttgttcacagggtattttgaaaatgcttatgaagtcagggagaagaggtcttgtagctacctctctactttctcctgctctttactttgaagtttctacagtagcacctgtggtcttataatgaaaggagggtttagaagtcggtatggatgcgcttaggaatgagataactcttatttgatgtattagttatctaatgctgcaaaagaaccccttattccctccaccccccaaaaacaccttaacccccctttaggggttactaagacccccttatttcccccacctccaaaacacttcatagtttatattttattaacaaccccagaatttatgggttgactggatggtttctttgtggattacacttggggttatccagttacatttatttagctggacaatgctagaagagaaccggtggggctaaaggtcttcacttacacatctggcagttgctgccgcctgttgactagggctgaactagcttttctacgtggtgatgttagagaggtgttgctggtatttttcccactaatgtctaatttggtttgtgatatagtcactatttttaaaaaccagtgtaaatagaacagaggtacaaaaaagggtayctttagttgtgtagttaattttaaaacttactgttctatgaaaatgagtgaactactactacatataacatggaaatgtctcattgtttaataaaagaaaccagatataaatgggtgcatattgagtgagtccatgtatataaagttaaaaatgataggcaaaattaatttatggtgtctaaaaataagaatattgcttacccttgggaaggaaaagaggggatagtgattggaagggacacaaaaatgatttctagagtgttstatttgggtaataacatgggtacttttacagtacttgaataaaatttctagaactgtacactcatgatttattgaagtgtgtacttttatattctttccctaagttagtacattaagtttaaagactaaccataaggagatcttaatgagacccttgtccattctttttttttttttttttgagatggagtctagctctgtcgcccaggatggagtgcagtggcgccatcttggctcactgcaagctccgcctcccgggttcacgccattctcctgtctcagcctcccaagtagctgggactacaggtacctgccacctcgcctggctaattttttgtatttttaatagagacrgggtttcaccatgttagccaggatggtctcgatttcctgaccttgtgatctgcctgcctcggcctcccgacccttgcccattcttaggcactgttagacagtctgcatgcaagtaactagttttagacctgaaaggcagcaaattgttgaaaacattttaaaaatttactattgtttttagtattttatggtagtataacaagtatatactcaaacatatacaggcacatctcattaccctttgcagtgcttcacagatactgcatttttaagaaacatttattttgcgaaacaaatagatggtttgtggcaaccctgtgtcaaggaagtctatcaataaacaccgttttccyaacggcatgtgtttactctgtttttaaagcagtaatgtattgctttaaataatgtatcacatttttaaagcaataatgtacttttaaaataaggtgtgtacgttgttttttttttagacataatgctattgcacacttaatagtgtaaatgtaactcttagatgcactgggaaatgtgacttgctttattgaggtagtctggaactgagcctacaatatctctgaggtatgcctttattgaataagtaatggtcttgtattactacccttcaggaacccagtagtaataaattatatacagttagcccttcatatccataggttccacatccatagattcaatcaactatggattggaaatatttgtccccaaaaaagataaaaataaaatagatggttccatctgtgttaaatataccgaccttttccttgtcattattccctaaacggtatagtgtaacaactattaacatagcatttacattccattaactattattataagtaatctagagatgatttaaagtatatgggaggatgtttgtaggttatatgcaaatactacattttttataatggactcgagcatttgtggattttggtattcaaagggaaggggacaggaactagtctcccacagatactgagatatgactgtatttgcagggagaagtcctaagaaatcacttgatactcacgcagagaaatttctttttcatgtattttatatacaattctaagatgctgaaatatgaccttatgtgtaatattggtattacctgtttatttttgtcctttttaaggttttgcgtccattcctccttcgtcgaattaaggctgatgttgaaaagagtttgcctccaaagaaggaagtaaaaatctatgtgggcctcagcaaaatgcaaagggaatggtatgtrttctcagatgtacttgatagcactattgattcttccctaaatttcatgtgtattttgttttcctaatttgtgtcttcatggaattccaatttgctggattgaactcaacctgaaaagagttttcttgtcacgtagtataggacttgctcattaagttcgttatagaaagttttgaacctgttagatgacagaatcaggatggaaggcttatgaatccaaaattaaaattgggatttaattaaacggggttcatatgaaaccatctacttgggatttttaaaaaggaaactgtgatagcacagtgtgggagatatacggttcacttatagttcataaatactgggtcagtgtaaagtagctgcagaaaaagatactgttrgccttaatgtaaatgtagtgttcaaaggagaggaaataaatatagctacccttttctttactggtctcatcatatttcatgtatatttaactgcatacttaaattttgataagtatttgcaagaggccagagttgtttggttaaaggacttaatatcatatagagaactgggcatgttatctgggtaagaggttatctgtagaaggtggttggtcctaaatgtcctcaaaaacttctgaaagggtagcagatattaggcttaccttggatggctctaaaacagaactaagatgagtcaatgctaaggaaagacaaatcttttttagttaaacatttgagtgaactttatatcagaattgagatggaaaggtctgccttgttgtttaagcatagattgcctaggctacttactttgttcaaaggatccaaggctctaaaactttgatgcttagacaaattactcattctttcataacaatgtctacatccttagtatatgttcaaggctttttataatctggccttagcttatggctgtagcttcacagtcctgcctcacagacatacctccctcccccatgtatttatacgtatgtttaagtcacgttgtattcatattattctcatcatcatgccttaccatttcattattcttcctgtcttctcagatgttagggttcttacctaaatgctacactagctatggggtatatagtaatcgaatagtggcactttctgttgcaaaaaaactgcaaactaaaattatgtttaaaacttacattttttaagttttgctttattacttaaaaatattatgtcttactgctgtaattctacccaagggaactgtttttgtactttaaaaataatatcctcaaggcccaaggcgtaagtatgaacattataatgctatggacagtaaagaaaaatggaagcaaaaagaggttacagatgttaaattcctaaccatacctagaagttgatgagtagtttcttacagatatttgggggttcatgtggggaaggggattaagtatgtaaagtggcagggattgatcaaggaacatttgagctctaaaaatgtttttcttctttgaataggtatactcggatattaatgaaggatatagatatactcaactcagcaggcaagatggacaaaatgaggttattgaacatcctaatgcagttgagaaaatgttgtaatcatccatatctctttgatggagcagaacctggtccaccttatacaacagatatgcatctagtaaccaacagtggcaaaatggtggttttagacaagctgctccctaagttaaaagaacaaggtatcggttacccgtatcaaattatcaaaactgttttaaaatgctcatgttaaaacaaaggagcactgtactttgaaatgactgctctgatgctttccaaggttgacgtgtagaacattaaaaaaacctgttcattatctgagctctaacccccamtcctgattttaggccttaagtctcttagaaggtaagcaatagttagagcaaccatactcccttgattttgggaagagttcatactttatatatactttcctagaaattatagctttctgtcataaaatgtgaagaatgcatctccctcccacacatggttaccagatccattgttagacagtggtggtgtgttcatgatattgttttttarttatttatgtggagttttaatttaataaggtaccatgtacatggacctgaaacatttttatttgtagtatgctgactttttttatgaaaatgggtatgtctgtgttgtgtgtttgggtatatttaaattacacgaatgcagaaagaacttagaagccagcttcygattttaactaataaaaacgtttttagtctgctatacccttcctcctcccagattattcgaagcaaacgccagacactatagcctttcataaattattacatatctcttaaagatacgaaatatcactgctatagtattaagtgtgcagattcaagtttgtgtttctctctatattttaataagaatgacatttggaccagtaggtgaatctcctctatgatactatcaaaagcatgttgtaagagttgtcagtgaatgggtttactttttccttttcatacctttttgtagagatagatttttaaaaaatgctktccttgaaagcaaagtaattaaaggagttaaattggtggggaggagtggcaggaacgtggtgggaatactcagatattaatgaaaggtatattaaactctgcagggaaaatggagactattaagtagtctcatgtcccagcactttttggaaggctgaggtgggcagatcacstaaggtcaagagtttgagaccagcctggccaacatggtgaaaccctgtctctatcaaaaatacaaaaaaagttagctgggcatggtggcatgcacctgtagtcccagttatttggaaggctgaggcagaagaatcacttgaacctgggaggcagaggttgcagtgaactgagatggcgctgctgcactccagcctgggtgtcagagcaagactccatctcaaaaaaaaaaaaaaaaaaaattcttatgcatttgaggtgcaggaacgtgtgacaacagcagattgtcagcctctgcttctaggacaggatcatttcataatcattacttttcaaaatgatcctttgtcttgatatattctactgaaggtattatgtagctgcctaaagaagtggaaggcagtcggatagtttgaatcatggcagataagtgataagtgaaggatagtcattgtagatatatgaggcacatattatggtcctttgatctagaatggatcttcagaaccaggctgagaccaggattattaggtgtgtgttggaggtttggggagtcatatgcattgaagagttgttgtgaagtagtggaaagttatttttaaatgtatatggggtaacaagataatgattatcttaccctttgggatggcaaagccttccagaccagaggcaaatatgcttttctgtacaaatgttacccttttttatttgtgccatggtgagaaaaaagtgggaaatgactgacttggataataatgtgtagatttttttcccccttgtaaccaagyaggtagctttggaattaaggataattgattagtcttagttttggttacccttaaatttttctacttttgaagccactgataatagattgttatattccccaacaggttcacgagtactaatcttcagtcaaatgacaagggtattggacattttggaagattattgcatgtggagaaattatgagtactgcaggttggatggtcagacaccccatgatgagagacaagtgagtaaaatttggggagggagataaaaaagaatcagataaattttttgacaaccattttgttttatccataggactccatcaatgcatacaatgaaccaaacagcacaaagtttgttttcatgttaagcacgcgtgctggtggtcttggcatcaatcttgcgactgctgatgtagtaattttgtatgattctgattggaatccccaagtagatcttcaggctatggtaagagataacgaataaatatattctgtgcttagtagatggcgttagttaggacaggctaattctacaaatatcagtgacttaacccaatagaattttatttttctctaatctaatggttcagtgagagtatattgaggtgatcttccatctaaataagggtatttccatctcagggatctgccatatcttaggaccctggagtcctctgctatactgcatcctattggcagaagggggaaacgatagagttggggatttcccaggaaattctttatgggtcagaccttgaaagagcctccttgtctctccacccccttgatcaaasaattagacagaactcaaatcatgtagcataactgactgcaagggaattggtaaattatagtatagttatatcacaggaccaaagagaattgggtttgatgagcaactagcctgtcttccactttagttatttaaaagaacacctgtgtgagagtacctggtcagatcaggaagattatttttagattgagagaattgatactgcagattggcctgacccatgatattggtgaccacaaacccaactttaatctctgtcattagtcmctttctttttttttttttttgagatggagtttcgctcttactgctcaggctggggtgcaatggtgcagtcttggctcactgtgacctttgcctcccaggttgaagtgattctcctgcctcagcctcccgagtagctgggattacaggtgtgcgccaccacgcctgactaattttgtatttttagtagagatggggtttcaccatgttggtcaggctggtctcgaactcctcaccttcaggtgatccacccaccttggcctctgaaagtgctgggattacaggagtgagctactacacccagcccattagtcactttcatcttgtactcttactaagggtgacaggggaaaatggaccaattattagaaataagggagttttttaggaatgtagttagcaaaagtaaaacaaattcatattcagattagtttgactacttgtatatagttaattgggtaatatttaaaggttagaatttttgtgttgtttgctaagttgtttcatgtcacttctttgcctgatagcagtgacaatttgggtttgatttagatagaaaaacattttgaatttaaacctaggaaaaaagacttaaaatctttcctcatcagacttaaaaattataatgttgtatattgtttggagacattatgtgttttatctcagtgtaacctagcagaattcatctgattccttacagatgcagtgttattacaaatttttaaaagttttatatttcagaatattttaattttttttctcagtgtacccatttcagtgttatttatgtgacttttaaactaaattcaaaataacatggtaatttatttaggaccgagcacatagaattgggcagactaagacagtcagagtgttccgctttataactgataacactgtagaagaaagaatagtagaacgtgctgagatgaaactcagactggattcaatagtcattcaacaaggtaagccatggaactttaaaactttaccaagttggattgacacaacctgtttttgtttgaaaatcgtcttagaagattcttgttactaagcatccattgagtcaagcttgcagccagtagagatgacttgtattgcaaatacagtaaactttagttttgtcattaaaaagatggatttgggctcaggacagttgaggtttgaataatgagtctgccagttagyagttctctctggttacatgaacccatttcctcatctgttaagtggggataaaaataactacacttaaggattttaaaggattaaaggggataatgtatataaaatatctgacattcagtgtggtggttaatgatttatatgtactaactactcttgattactgtggggaaaactgaagaaataaaaatcaaagagcctgattttattcttttttcttgtctgcaatttactgagtacccaccagatgctaggcaccgttcttggtgctgagaattcagtggtaaatggaacaaacaagtattcttactttcaaagagtttacaatttagttgggagggagagatgaagtaaacaagggtataagtaggagtagggggtgagagtgggattttattttggatcaattgaaggaaacttaagttctcattccagatcagcttttaaggatgacataatttatgttttcatgaagcctactataaagttgatgatgggaaatataaaattcaagaaaaggggtgggaaacttaataatttcaagtgtgcattggtttcctttgtaactgcatttgtgagcatgtatttactatctgtctataaagctgaaaggcatactgttacattgtttactgattatgtaggtatcttgattttgtcagtctctgatgtccatgtaagagagtattgtacatgtctttggtatccctaatgctattcatagtgttagccatatgtctgcatacctgaagacaataaattattgcttatttttacaaatcgtttccgttaataaagtgtttactttgtgccaggcagtgtgctatatacttaacatttcattttctcctttagtcttcatgccaacttgagatgttagcatcagagataaaggcttttgagaggttaaattacttgttcattgtacatacagctgggaagtgactcaagggggatcaagaactttgttaactcttaagtgtttaattagaaaagtctctggggacttctcgaggctgccaccccgtgatgttatctcatgggtgatataatggctaatgttttatttttcttcacacatccatgtgttttgaaatacacctgccgtgtgtttcttgttctcagttattttcatccatgaaacactttttttttttttgagatggagttttgttcttgttactcaggctggagtgcaatggcacgatctcggctcactgcaacctccgcttcctgggttcaagcaattctgctgcctcagcctcctgagtagctggatttacagatgcccgccaccacacctggctaatttttttgtatttttagtagagacagggtttcactttgttggccaggctggtctcgaactcctgacctcaggcgatccacccacctcagcctcccaaagtgctggattacaggtatgagccaccacgcctgtccaaaacactttttttaaagataaaaaagaccttaattgattcataattaatttagaaatcttgaggtttttttacttcatatttactgtggcaatttttggagcaaaccttcaggctaatagctttcttgtgccrtttgtagacatgttagtcaaacagcaagccttaagtgcatacctttgtgttactgttttttatttgagggacataattaaaaacgagagtacacaagcactttacatytgaaggttccggaaccttcctgcccaacttggaagtagtttgtataagcataagaacattttggtagcaatggtagcatccaatccaaggaaacataccttgtggatatctcctcacttacaaagtcatggatgtttggctgtatatcctattatgggtcccaaaccatgatacaagtatttaaagaagttgttgaaaacttggatctttttccacttacttacaagttggttggcatataaaaatcaaagctttgtttaggtgtatgtgagtgacccttgaggagggtgaaaacaagtctttctgggtttttgtttgtttttttatacctgtatttttgaaaaattacaaggttgtccaaactcctgccaactgaaaatatttattaatttattaatggtgagtttcttcgatgatccagatacattttctcaccaggtgtggtagtgcatgcctttagtcctagctacttgggaagctgagacaggagaatggcttgagcagggagttgaaggctgcagtgactatggtcctgtcattgcactccagcctaagcaacagagcaagactccatctcaaaaaaataaacgaataaaataagtttttaggagtttcagttcttctggaagttttctttaaaaagaaactgatgttacatatttcagttctgtgtaaagtttggcctaggtgaaggattttttactttacttttctaaggagaaaagctgatttggggagtattagttaataacacctttctgctcatcagaaacttgtgtgtataatgcttccatctgttgaaacttgtaggtttttgaaaatttttcatatgcagctttcacaaaagattatatttcgttggcacagtatacagcaggtttcattatataatacataaggtttaggaatgttttgtagcttaccaactgaaaatttggcattaaatttagtgcaaaaatcaaaattattagatgtgaataaacagtaaacagaaatgattgacatttgagataaaattataaagcattaaaccttacatttaaagtttcaagtttccagtaaaataaagtctgttcagttaacattatacaacacaatcttttttcagggaggcttgtggatcagaatctgaacaaaattgggaaagatgaaatgcttcaaatgattagacatggagcaacacatgtgtttgcttcaaaggaaagtgagatcactgatgaagatatcgatggtattttggaaagaggtgcaaagaaggtgagatgtagattaaataatgcttttaatatagaatgttttagaccagaaacaggaaatatttgttacattgatgataaataattttatttccttaaagagaagcttttgtgtacgtgaagttaatttattttgactgcagttttcatgctttctttgctgtgaatctaagaagctgattgttttgttctctagactgcagagatgaatgaaaagctctccaagatgggcgaaagttcacttagaaactttacaatggatacagagtcaagtgtttataacttcgaaggagaagactatagagaaaaacaaaaggtaatttagaaataggtttgggttacatgaaagctttattttactggaaacttggaattttaagtgttactgtaatgtcttataattttgcttaaaacagtagtcatttttgcttattcacmtctgaatattttcatcattatgtaaaatttaatgccagtttttcagttggtaagctctgaaatatttttaaagtttttgtaatgaagtttgtggtatatgtttacagtgaaatatattcttgtatgggatgaatagtaatttgggatggtaacctgattcattttattttaaacagcagaattggctggtaataaagggaaaaatttcttaacttcataagtaatacttggtaatatagagataaattgaaaaatacccagagattagaagaaaaaaataattctacccagtgtttttcttgttaatrtttaggtctatatcttcagaattttttgtaggctaattatgtgtctacatttttctcctagtttagatttataccaaacattctgtagcatttctccctcatttaacagttgttcctttaagcaagaaatactgaatgcttactctgttgactagacactgtctcgtgttaattatatacataatattgagcaaagtatcatagtctccaccctcatagagcttatagcccaggattttgtgaatatctttacatttacaaacatccttcttgatgatgatttgttactgtgtataataaaagttggtgatttgagttgtttcccatgtgctagattgcattcacagagtggattgaaccacctaaacgagaaagaaaagccaactatgccgttgatgcatatttcagggaagctcttcgtgttagtgaacctaaagcacccaaggtgagttgactgacacagcataaaaatatctaaaaattttgaaaatgtaatttttttcatatattcttgcaaaaagattgataattagattttgtgtttcttttttttttttttttttgagacagagtctcactctgttaccaggagttcagtggtgcgatctcagctcactgcaacctccgcctcccgggttcaagcaattctcctgcctcacccttccgagtagctgggactacaggcacccaccaccacccctggctaatttttgtaattttagtagtgatggggtttcaccatgttggccaggatggtcttgatctcttgacctcatgatccgcccaccttggtctcccaaagtattgggattacaggcgtgagccactgcctctttcctacattttgcatttctttagagtgtactctcttctgtttttagttaacatttttcaaaaattaattttgaatctgtgcatttaaaattaagatataaattcagttttattgaaagatgcattcagttgcttgcagaattggctgttgtggtttatgaagtgaggactaaggatacatttaaaatgaaatttcttttttatggataacacttatttttgtttttctttaggctcctcgacctccaaaacaacccaatgttcaggatttccagttctttcctccacgtttatttgaattactggaaaaagaaattctgttttacagaaaaactattgggtacaaggtaattgaaattatctgcctttctgttcattcctatccagaaattatggaaggtataaacattagttataaatatttatctaatttggacctagtgtgaaacaatactgctttagcctagtctagttgtatgtatgaaatacataaacttgggtctgtttttctttaacaagaaaaaataagacttcatgaccaatctggtttgtttttaacataatacatgcaatgtatcagtatattttctttcctggttgaattgaaacttgtgaaatgtcagttagttggttcatcacatgctctttaaaatttactgatttgatggcatagaaaaatatcttttaggtacctcgaaatcctgagctgcctaacgcagcacaggcacaaaaagaagaacagcttaaaattgatgaagctgaatcccttaatgatgaagagttagaggaaaaagagaagcttctaacacaggtatagcctttaatcagtacaaactttagtaacagtttgttgtaaaggactgtgttaggttatgttggggcataaaaataaatacaagtttctgcttttaaagatggaataattggagacaataaagtatgggcatgtggataaatgctccatctgattgtcactagttgaggtagttgagaagactacagattttattactctggctcggtagagtgggtatcttttttatcaccttactttraatgttcccgtctttcctatgaattttccacattgctacccagtcaccattttcaactataaatcttggcttggttattttttaaacatcctttggtgttcatcaaggtctttcagaatctggcctttgacttacctttaaagcttcattttccttccatttttctacttgctcatatttttgccctttatgttattcactctttctggccaactgctagtaatccttcaaagctcagtgaaactgtcaccttttcatacagtattccttactctcagccactcatatttaattgcttgggtatttgagcaatatataatgtgttgtcaaaagtgtatatttatgtacacgaaaagttaccactctaaaagaacttaataaactagtgaaaatttgtttttgtaatatttagaaggtttgctaatagcatgttttccaagtttaatgtgctgtgattaaatattttgtttctgttcctgtgaagggatttaccaattggaataagagagattttaaccagtttatcaaagctaatgagaagtggggtcgtgatgatattgaaaatatagcaagagaagtagaaggcaaaactccagaagaagtcattgaatattcaggtaattcttttaagcaggctgttggagtttagtaagagctgttggaaggttcttgttttcttattctgaattatgttgtgattagctaattttgtcacagtgtagttagtaccttcttcattattttttacaaattagaaaatgttctgtttccagaaatggcgtaatggtttcctttttaaaaattttttaaccctagctaactctagcgacagcaaagaaaatcagaataagtcactggataattgcccttgcatttttatcttaatttctctgcataacttcaagtattatgtgttgtgtttcctgaagtcagttgtattattaggttaacatgtgagggtatgctgtggtgagtctgcttagaatagcagaaatttaagaattagaagataaataatccagttgatcccattttttttacattaaagaaataaaaatataaatgatttgtttactttgtccaacttttacagctgtgttttgggaaaggtgcaacgagctccaggacatagagaagattatggctcagattgaaaggggagaggcgagaattcaaagaagaataagcatcaagaaagcacttgacacaaaggtaatttgcttgttaataagttaggtagttaataaaataactcctagctgtgagtatgagagagtgactttttataaaggaaaagaagtaagggtttacaatttaaaatttcttcagagtagcattcaaacatggtattgtcagcagaatttacctatacactagactgatagatctgagtcaaagacactaagattagctttttactaagtagaatcaggaagtcttagtctgtatttctctttataataataaagactataaaggtctttygggacaaagattatataaagcaattgaagtgctctagatagaaaattctgatttgaaatgcaacattttagctaattatactaaagctgagtttgaaatacagattatataggatttgtattttatataatataaaatctgactttcatagattggacggtacaaagcaccttttcatcagctgagaatatcatatggtactaacaaaggaaaaaactatactgaagaagaagatcgttttctgatttgtatgcttcacaaacttggatttgacaaagaaaatgtttatgatgaattgcgacagtgtattcgcaactctcctcagttcagatttgactggtttcttaagtccagaactgcaatggtgagtgctcagggcttttttgtgtaatgtagcagagttcagagtaagtgtcatctttggtattctttaaggtgactttaaaaaaatctntgaagtagacttttgttacaatattgttagtatcataaaacctaataccagggatagcttacaagtttattggtcctatcctttagtatcttacgtctttaaatatcactatatgataagactagcttttcaagttctaagtgggaggaagtatcagtttcaacttctgagtgttacgactttttggtttttcaaatgaacatatttctataaagaaaaatggtccttgcattcaagcatctgcacatcagaatcagcattctgatttatttaatataaatcatccagagtctggattattttaagatggcttattatagtgaaacactacttttgcactgatttagtgctaggttttgtttttattcccaatatctgactaacagtttctgaccaaatagccccatttctaataacctaaaatttgaattcagaaaagtttaactttgatggattgctccttttcttccttatttcaccaccattgaactttgagcttcaacttgttttctgccagatgaggataatgctaataagttctttagtcttaagtttgggatattctgggataagcaaagtttaaacatctttgtgtttgtttatagtaagatttctctgtatatttaaagtaaaatgtcactttgtaagacagtggatagtaagcagtattttcatgtttgaccactgaaaattttttttcactagacatcactgtttgtgatacccaagtttgggaaatgtactaaacttaaatacatgaagatactttgaagataaaacactgtataaatatataattagagaaaagatccagttgctgaaagcttatttcttcttaagtgggaacaatttatagagttaataaagaataattttatagtgattgtaacaagacagtgccatgttaatttaactagtacagtaccgtaatttaaaactgtgttacttcttaacatgttccatgttaagatgcacaaaaaatgataatgtattcttctatctctatatactatttctaagtcttgtgtggtgtattctatacagtagtattttaaaattattttactgtagttgtgtgtgtagtagtatcacttactataagaaaaaaataattttgctctataagaaagggggctgctacccagcagccgtccgtgcagrtggacttctgtttctttcagggttaactgctacttctatgttatactttaaatcttttctggaggctgtatgtccagtttgccagagagagatgaggtagaactcatcgtagacttccatggctggttttccaaaattgggaaaggtgccatgtgattgattgactaccataattctagtgatactttgaagggaaagattatacacacctgttaaagttcttgttgtttttgaccctcacatatgtgcactattaatctttttaagttttggatataagtagcacagtagttctcagacatacacactaagtagcagtattgcatatgttcatttttattgctttaattcctaagtgaaggaagaatttttgaagaatacacagtagtttggctttaaagattggagtaaaaacattatttacaaatatcttgcctttaatcttcatagcatgaattgtatatgaaaatcagttgttttttttttaaatcaggggtgtattagtggttttatatattatcctattaaaacataccttgttttaaaattgaaatcatgaaacttgtggatggaaagtgcgtgtaccatgtttgtttataatttaggagctccagaggagatgtaataccttaattactttgattgaaagagaaaacatggaactagaagaaaaggagaaggcagagaaaaagaaacgaggaccaaagccttcagtaagtattcatgaatatgtaaatatgtggattatgtaaatttcccctttctaagtatttaacactgcttggctgtcattgatgtgttagtccctgttgtgcacccctccattgcctttactttttttttttttttttttytcctkaagggagaacccaagctcataatttgagattcttccactttcaaatttaggtagtggyataatttttaatttttagttgttatgagtaagtatgtatttataggttacatgagatactttgatacaggcatgcaataagtaataaggacatcagggtaaatggggtatttatcacctccagcatttatccctgttacaaacagtttaactcttagttattttaaaatgtataattaaattatttattgcggtagtcactgtgttgggctatcaaatactgggtcttagtctctctttgtatttatttgtatccattagccagccccactttcccccacccccactgcctttctcagcctctggtatccatccttctctctgtctccatgagtttaattgtagtttttagctcccacaaataagtgagaacatgccaagtttgtctttctgtgtctggcttatttcacttaataaactccagttccatccatgttgctgcaaattacagggtctcattgcttatggttgaatagtattctattgtgtatacataccatgttttctttatccatttatctgttgatggacacttaggttgcttccaaatcatggctactgtgaatagtgctgcagtaaacatgggagtgcacatatctctttgatatactgactttcttttgggtgtaaacctaggagtagggtaactcttatctgtagttttttgaggaaccttcaaactgcttccacagtgattgtactaatttgcgttcccaccaaaagtgtatgagggtttccttttctccacattcttgtcaggatttgttattgcctgacttttggataaaagccattttatctgggatgagatgttatctcattgtagttttgatttgcatttctctgatgatcagtgatactgaacagcttttaatatgcttgtttgccatttgtatgtcttcctttgagaatcatctgttcagatcttttgcctatttttaaatcggactgttaggatttttttcagtagagttgtttgagctcttacatattctggttatttattaatcctttgacaaatgggtagtttgcaaatattttcttccattctgtgggatgtctcttcactttgctgtttcctctgctgtgcagaagctttttaacttaatgtgatcccatttgtccatttttgctttggttgcctgtggggtattattcaagaaatctttgcccagtccagtgttctggagagttttcccaatgttttcttgtagtttcacagtttgaggacttaaagtctttaatacattttgatttgatttttttatatagttagggatacaggtcaagtttcattcttctgtgtatggatatccaattttcccattaccatttattgaagagactgtcctttctccagtgtatgttcttggtagctttgtcaaaaatgagttccatgtagatgtatggactttacggacttatctctgggttctctgttcttttccactgttgcactgatctatgtatctgtttctataccagcaccatgctgttttggttactatagctcggtactataagttaagtcaggtaatgtgattcttccagttttattctttttgcttagggtggctttggctatttctgggtgttctgtgggtccatataaattttagtatttttttttctatttcagtgaagaatgtcatgggtattttgataaggattgcattgaatctgtggattgctttgggtagtatggacattttaacaatattgaatttgctaatccatgaacatggaatatctatttttttgtgtcttcagtttcttacatcagtgttttatagtttatcttagagatctttcgcttctttgattaattcctgggtattttatttcacgtgtaattactgtaaatgggattactttttatttttcacattcttcactgttggcatagaaatgctactgtttgttgtatgttgattttgtatcctgcagtgtcactgaatttgtttatgagttctaatagttttttgatggagtctttaggtttttccaaatgtaagattatgtcatttacaaatagggcaatttgacttctttgtttccgatttagatgtcctttctttctttctctcgtctgattgctgtagctaggacttccttgaaatacttaaaaagtacaaatttagcttgactgggttgtgtgggaaaaatcacttcttgatgatatggtagtccttaatatggggcttcgtgaaaatcaggaaagtatgtctcgtaaatgtcaagtgtgtacacatctcattgagaatacaagttataattttagaataatttaagaaacattggaaaagcagtggtattatgacttttactgttagtctctaagctttgattatttcagtgatgttttagcaatgtgaaggcaaacacttaaagggaaaaaatgttatttaataatagttaatttaataaaaaatggttaatttataaagtcatgaataaatgagtatctctggataatatttggtacttatgtaactgccttttaaaaactcaagtgtttcttactattttgggaagcttgcatttatttgatattgatctactactgttaattgtgcattagttttataacgtcattattaacattaacnttttttattctgtaagtaaaataagtaggtaagattatttggaggctttatagtttgctttgaaagatttatatagcctgggggaaaagtctcatacctattactttgtagtagttgttattactaaagtgttataatgtgtctgcaactatatttcatgtttatattagtcttgkgaaaagtaatccttctgtctgtttgtagacacagaaacgtaaaatggatggcgcacctgatggtcgaggaagaaaaaagragctgaaactatgaatatgtttttgtttcataatcactaactttaaaccagtagttctttaatttacgggtcttcataaratgtactgtacaatgctcaattgttatgtcatttaaagacatcaggttcatctgtttactgagctagaaacatagtatgtagtttcacttttttaaatgcaacagctgtgctgaaatttttttatcattaacacttgaagtaataaaataggcttcatttattactaagtgtttcatttgatttatttttctattgtagttccatttgtgaagattgtgactttttgtttattagctataatttctacacttgtaaggcttamaaacaagttaaaaagaaaattgcaaataacatttgtccctttcagtcttcacctagttgtgtaattattttaattcactttgcctttgcagaaatttgggtattttctttgtagtgctattgagtctcatctggaaagattatataaattgcattctccttgcttatgtgggtagaatgggaraagaaggcaagacaaagtatacttaaattctatgcatatttctgttatgctttctgttttttttagttgattctgaaatgaatatgccctattcttttgaaagaatggccttttagttgtatagccaaagacatttagtattttccggttccttaaggtattactgtaccattttgtaaaaggaatattattattattatttttaattatttggtaaatattttgtcatatgaccttctgaagcagccacaacttagataatgtcagaactaaggtgattttttttttttaattttgaaagcccagccaaaatgaggtgtgaatttgtcatactgttacattgaaattggtaacaaaatatatcccctcccatttggacttttagggtaaatgaaaattttattgtattttaaagtagtttctaagtgttagcaagactgactataattccagtttctgttttctatggacagacctgataaactggagaccctaaagcaggaatacccaaattatagtgtcaggattttagctgtaccagaggcctttatgtgctacacataatttgtataaaattttatatgtgcagattgggtacataaacagttctccatttttctaagggaatgcaataaatgtagcatcgtgaataaatataacttttataatccgtaaagtggtcttttctttccatttctttaattgttttctcaatttttattcactttttcctttaggacacatttcccttaattggatatctttcccttaaatttctattagtagttgttttcatctgcccacatgtaattgaagatttaaaaaaaaaattctgatacctgcagtattactaatactgcttaatttcttgaaatgtggaattgctgctgttaatgtcaagcaaaacgcagtatttatggcaaattgtaaagtaatttgaatttagtgctacctcaaaattaactttttaaatactatgttagattcttaacagttaaaggtctaatacatgcatgaggaatggttacttatgaaaggaaaaagaatttgtaagagttatcacctcagtttggaagaaattgaaaaaatgtaaggctgaagaaaacttacggaggtcacaaaagtgatgttttcaagaggaagagaaactgggagggagatacacagtggaaatgcaaaatgaatcaagtatagtggtagccctgagagcttagggactcaaatggaaactgtgtgaagggaaactcacttgaaaaaaaagcatgaaccagctaggccctgccaccactgtgtttggccaagttcacaaatctgttttaacctgtcgcttccctgtcacttctctggctttcctctcctgctaagcttttgtttcctggcagtaattaaaatcttctgtcagtgccacagctactactgctactggaactgccttaaccactactgctactggaactgccttagccaccttggtatcgtggtttggcaaagtattggcctctaccaccatagggcccagagcttctgcctccaaagtttcctcccttcatgggtccaaaatttgaagactgattgttgtcattgccaaaatcattgtagcttttaccacctccaaaattgcttcaatcattaccaaatctattatagcaatccccactgccaccatatccatcaccaccaccatggctgccaccaaagccaccacgatcacagaacttgatgactgtatttgtgactaattgtataatagtttctgttctgtggaaagtaaagcattccaacacagggtttcagtgtagattgttttgttttgtacccatgctgttgattgctaaatgttttaataatctgatcatgatactgaataaatgtctttttttttttttaacaacaaagcatgaaagattgcttaattgtacatctgacaaagtgctggaggctattataaagtgtaattattactacttttaagagacagggtcttgctctgtcacccaggctggagtgcagtggtgcgatcacagctcactgcaacctcaaacttcagggctcaagtgatcctcccacctcagcttcccaagtagctaggactacagataccacgcccagctaagtttttttagtttttgtagagatagggccttgctatgttgcccagtccggtctcaaacgccgacttcaggcaatcctcttgcgtcaacctctcaaagtgctgggattacatgtgtaagcctacattccaaagtgctgggatcatagttgtgagcctacaccacacctggcctacattttgtttttcataaagttgagagaagcaaatcctaagcatagagtacaagttgagcatccctaatcaaaaaatctaaaatcagaaatgctccataatttgaatgctcattagggcatttctgatttttggattagggatgctgaactgataagtataatgcaagtattctaaagtctggaaaatgctaaaaacacttctggttccaggcatttcagataaggattgctccatctgccctttgagtatttaatatatgccgattgtttgaactaatctggatttaattatataaatgattatataaatgatctttggcttagtacctttcttaatctcgatcttaaaaagcattgtaaaacacccctgtggtttttcagaaaaattctgagtaaaaaataaatttcatcttgttctatccctttgaatctaaaaaacaaatctttttgaaaggatgtgctactatatttcaaaccagtagttttggagtagaacattgctaaaaaaatgggtactaaggagggtaatttaaacaaagtagattaatgacacaaggtggattgatgaactcataaatccaaatgaatggaatgctagaagacatgtattaacggagtagctgttaccaaaatatatacatattttgtatatgtacatagctgttaccaaaatgtatctttgcctgttggaatctgatgtcaagatcaaaggtgagggcatccctcagatgacagataatgggcaaaatacattcttggtgtggagcagtgctgcagaattaacttcgctgtgtacatcccagaatcgttttggatctgttaaggtttttattagaatgattaaataggcttttgcagcattaactttacagtagttaccagaaaagactatgctacaagaaccaaaattgaagtaagaagaaaaagactgaaatgatatgattctaaatgaaaaaaatgaagaagtggaatagtttctccacaggcataagaggcaaagcattgtttcagaagtggactggcacctcacctgagatactcaagactggcaacatgggtctacattctttgttaccacagattcccttgtgtccggagagattccctagctctaatgacagmttttttggggggtaatgaggctatgagaagattgaggatctaggtacttgcctttaactctacagcatacaaggtgtgtggctcttatctctaggacaccaatatttaatgttgcatatcatgtatctccagtacaagaagaaagtttatcagaatttagttaatgttggaaactttgtaatataaacaatgtaaacactacattgacaaaaatattttattaatacaaagaatatgcatatagtttgcttactacagaaattcttgtttttgatgtagacaacccaaaggagtttttatgtatatagattgtgaataaattgggaaaagaaatagagataagtagagattatttcacttcattaaacttttgaagtcctaatttagttcatgtgattatttgtaaacttttctttattagtcttcctcaatcattgaagaacccaggattcaaatacaatacttaatggaaacactttttcatcccaaactaaatcctgccctgaaagccgaattcactatgaaatctgagatgaaactccaaggctattatgctggccagtggaaggttggttcacccctcttgaggtgacattagggtggtctgcagacatcactggagtggacaaagagatgcctgggtggttggggaaaggacagatcatagacaacagtagcctctttctagagctcagttgcaataaataccacagttactcatcagacacactggcagttctacttattcccatgtttcaaaactagagaattctagcaaggactaagcactgcttctgtagaccatcggtatttctccatggctgtttgaatttttgtcaaagcttctgtgtctcatgcacactagtgacttttgagacagagtcttgctctgtcacccaggttggagtgcagtggtgcgatctaggctcactgcaacctctgccacccaggttcaagcaattctcctggctcagccttccggatagctgggactacaggcatgcaccacacctggctaattactgtatttttagtagagacagggtttcaccatattggccaggctggtctcgaactcctggcctcaaatgatctgcctgcctccgcctcccaaatgttgagattacaggtgtgagccactgcatctggcctgatgcagattgataatttcttgagtgaggcagtgctgttgcctagtagcaaggcttagctgggtgagacattactagctgccttcagaagcggatctctgccctgaagtttaccagcctgctttccttgatgcccatgctggctgggtgtagggatcctgagtggagggaaaaagaagaatagatgatacagatttgctgtgcaaaggcggagttcttactggctcttcctcacaaacaggctggtgattagctgactttcagattcccttctgggaggtggcaaggggccatctggtcatcctagctttgcaaggagtaacttttttttttttcattttatatgccctttaatcccagtagatggataggtttgctttcttagtatgctttccagttgtagaaaggtcttttctctgggtattggctttcccccagcctcctattttttgcgctccccctcctccccagccacctctttccctgggagccaacttgataaaagtaayggcacaagtcttgcagaatactcctaccaatctaaatgctgcagacgccacagtgcttttttctcacccttaatagtcgtaagataagttagaggaagctccttcaagagtacgctgagtttagtttcttcacagcaggaactaatctttaaaaaaaattatcattgggctccttattgtaactggacagtactggaactgggtgggtgcttgataagagaatgaatagtttaggtagttacaatgaaaccacaggcacctgtagaggtctccccaggctcaccttgacgctctgattggcggctgcagaccccatccgcgagatggcagtgttaggaacaaaggtgagctgcccactgcaggtcaaacgctgccggctaccagctgcagctgggagtgaaagactagaatacagaaaggcgcaggcagtcacgtaggactaggccgggtttaacacccgaacagtggtgctagaaggtcagagtcttctacgtacatgttggaaacatccttgattgtctagcaccaagacttttaaacacagggggacaaatcatcactttgggtatttgtaattgttcgtcagttcaaatctcttggttttaaaaaaatactttccctctgcgcgactggcgcgtcacgtcgcgcgcgaccagtccgcagggctcctcccgcgctgctgataggcccgcagacggcggcccagcagaggagcggaaagcatggtccggggggcggcggacgcctggtaggcgctcgggccgttgttgtggggctgcgcgctggcgctgcagggcgggatgctgtacccaagagagaggccgtcgcgggagcggaagaagctggaccgcctctggagcttccgcgccgacttcttcgacaaactgtgccttggcttctaggagtagtggtatcggcgtctgctgcgagagtcgggctccaccatggacataccggttccctccagcttcaacgacgttggccaggactggcggctgcggcattttgtagaccagatgtggtacgaacgggaggtgaccttcctggagcaatggacccaggacctgcacacaagagtggtactgaggattgtcagtgcccactcctatgccatcgtgtgggtgaatggggtcgacgcgctagagcatgagggatctacctcccctttgacaccgacatcagtagcctgttccaggtggggcccctgccctcccgcctccgcatcactatcaccatcggcaacatgctcatctcctccaccctgccaccagggagcatcctcgacatggccgacacctccacgtgggtaccatcctgcttccaccgcagacacccaccttcctgtcccaccccgtggggcattacattagggtaattacattaggtaagtcacatatcagtgacttacaaattttgtaagtaattaagaaattttcaataagtgtggagctgaatatttacatgagcccttcaaaaactgatagttaatggaataaatgaaaataacaggagagactttgttgaaagaagacaaaatagtcaaggaagtgatagaggatacaaaagaaagatgaaaacttacattcatttaatgtctaaccgtgtgccaaaagacaatattattatttagttttcataaccacaacatttggtggatatgattgcttccattatataggttaggaaagtaaagcttaggggtttgtgaacccactagtttaaagttgtgtagccaataggtggttgagtgagaattcaaaactggaacagatttgcttgatccagaatggtataactttattgtccatgcattgtcttctacattttactgcctgtaaagtgggagtcagttatgggaggagacccagaatgtcacaggttttgaaagctgctgtggaaaatttggaaggaggcattggatttaatgactgatacaggtcagtgcagattgaccttggagagaacagttttcttcagtggcatggtagtgttcaaaacaggatctgatggtaaagaaaatgtagaaccagtgtgtgtagactccttgatggaaaagtttatttgtaaaatatcagaggaaaattataatatagatttgtccattcaaaccccaaagtccagattcttactgcaatatttgatgtagccaatatacagcagttgagttcaattttggcccctgtttatgtgtatgctaaagaaaaataacaatcctaagcctatgccacttaaacaagaggatgtgattatactatgaaacacttgtgaccataggaatatagcagtgctaaggcaaaataggtcttaacttgacttttcctgtcatttgctgccattgtttgcc

SEQ ID NO: 95819 - DNA, 48300 bp, Homo sapiens
gagggagggaggcgggggggcagcccccgcccagctgccgccccgtccgggaggtgggggcacctctgcccagccgcccctactgggaagtgaggagcccctctgccctgccaccaccccgtctgggaggtgtacccaacagctcattgagaacgggccatgatgacgatggcggttttgtcgaatagaaaagggggaaatgtggggaaaagatagagaaatcagattgttgctgtgtctgtgtagaaagaagtagacataggagactccattttgttctgtactaagaaaaattcttctgccttgggatcctgttgatctgtgaccttacccccaacccaaccctgtgctctctgaaacatgtgctgtgtccactcagggataaatggattaagggcggtgcaagatgtgctttgttaaacagatgcttgaaggcagcatgctcgttaagagtcatcaccactccctaatctcaagtacccagggacacaaacactgcggaaggccgcagggtcctctgcctaggaaaaccagagacctttgttcacttgtttatctgctgaccttccctccactattgtcctatgaccctgccaaatccccctctgcgagaaacacccaagaatgatcaataaaaaaaaaaagaaaaaaaaaaaagatttagcctttctgccagaaccgccatcttccagtaattcaccaaaatgacgaacacaaagggaaagaggagaggcacccgatatatgttctccaggccttttagaaaacatggagttgttcctttggccacgtatatgcaaatctataagaaaggtgatattgtagacatcaagggaatgggtactgttcgaaaaggaatgccccgcaagtgttaccatggcaaaactggaggagtctacagtgttacccagcatgctgttggcattgttgtaaacaaacaaggacaagattcttgccaagagaattaacgtgcgtattgagcacattaagcactctaagagccgagatagcttcctgaaacgcatgaaggaaaatgatcagaaaaagaaggaagccaaagagaaaggtacctgggttcaactaaagcaccagcctgctccacccagagaagcacactttgtgagaaccaatgggaaggagcctgagctgctggaacctactccctatgaattcatgccataataggtgtttaaaaaaaataataataaaggacctctgggctgtaaaaaaaaaaaaaaaaaaaaagatgtaagttaaaagtataattaatataaattatagatatgtggaaatttaaacattaaagggacatttgatggtatttaaaaattactactttaatttgtaaaattttaggtgagataatggttttgtggttattttcaaatgtttttatgtttcagagatacataccaaaatatgtataagtgaaatgatatgatatctggtatcttcctccaactaacacaggaaggggaagtggctggatgaaacaagattggccatgaattgatcattgttgagctgcgtggtggttacataaggatcaattttgtaaataattaaaactccataataaaaagttttgtaagaactttttctggactggatacaaaaggactgacagaattgctgacaaggtatttgagggcattgggaagacttccaaggaaattgggacactcatgtgaaagcgttcctaggcagcaagagagcatgaacaaacaaattaagttattttaagcatcacctaacatcatcgatatcaaacatggttagtatttgtttttcatcaagagcaggctattatcacatggaaacaggttgccagagttcatggaacttcctttgaaatggatatgtgtagaaatgggctgagtgaaacaggagagggactgaacgtttgactgggatatcaggagatccagagtgacaatcctggctctgtcattaaccagtcgtatgtcttggagaaaggctcttaaatttcgagtgtctccatttccttgtttacaaaacaagaaggcctgacttattccctgagaacccttcttcaatctactattctatgtgggtttccacagacataaaatgataatggtggggtcatatgtaagaaattatcaacctcaggtctctgcagcatcactgtcagaacctccaatgtcagcatctttgctacaggcaaccccagaaaagtccctgacataaccgtctgcttcacatgagaagcagatggaaggaatagagtgtgactgcgtgcattgtttttcaacgcagtaattaaaatcttggtgcccttctcagtaagataagagaatttatttacatttggcaacttactagttaaaagttcctctctacttggaaactacacttgctttatttccttgtttccataaaggaatattgaaaaatctgcttcttggtgtctcaaatgaagttaaaatatttctgattggatatcatcttgggcccacaatttctaataaaataaaaggtgcctggccaggtgtggtggctcacgcctgtaataccagcactttggagggccgaggtgggtagatcatgaggtcacgagttcaagaccagcctggccaacatagtgaaaccccgtctctactaaaaatacaaaaattagctgggtgtggtggcacacacctgtagtcccagctactcaggaggctgaggtaggagaatcacttgaacccaggaggcagaggtcgcagtgagccaagatcacgccattgcattccagcctgggtaacagaatgagactccatctcaaagaaaaaaaaaaggtgccaaaataacttccttagacaccactccccacatgttttgaaccatagtagagactcagctgcaaccatccctatcacggaaggacagatgtgaactctgaggcccagaactgctggatatttagagacccaccagctcccgtcctaccttggcagaaggctggaggctgcacagactcatctgggaaaactggcatttgagataaaaacaagggtgagtgagatctgcctgggtctgtgattctccatgtcctgcaattttttccagagcatgactgagaagaaggtttatctggtgcagagaaaagagatagcctgagtgtggtggacctgcagaccacctaacatttggggaaactgaggcagactgtccttctcttcttctctgtgctccagcctctcaggttttgcagtcaggggaaggaccacactctcacattaactacatccttccctcacatctctcttaagcttccagtgctcaggcaagcttcctgactgaggtggcctctgttaacctgcagcctcatgacatctctctgctttccttccagcattttatcagtttgtaattacgtattaactgccgtgattacatgattagtatgcctttcccatgacactaaacagatattacagatcctggatatatattttttctttttaaaattgaagaacacactagccgggcgcggtggctcatccctgtaatcccaacactttgggaggctgaagtgggcagatcacttgaggtcaggagttcatgaccagcctggccaacatggcgaaatccgttctctactaaaaatacaaaaaaaaaaaaaaaaagtctgggcctggtggctcacacatataatcccagctactcaggaggctgaggcaggataatcacttgaacccaggagatggaggttgcagtgagctgagatcccaccattgcactccagcctgggtgacagagcaagactgtgtctcaaataaataaataaataaataagccgggcatggtggcacgcccctgtaatcccagctactcaggaggctgaggcatgagaatctcttgaacccaggaggcagaggttacagtgagccgagatcacaccactgcactccagcctgggtgacagagcgacactgtgtctcaaaaaataataataaaataaagttgaagaacatacggaaaatgcacaactcataagattgcagcttagtgaatattacaaagtcaacacacctgttgaccatcgtccaggtcaagaaacagaacagtcccggaaccccagaaggcactttccctccttcccaaagctaccactctgctgacatccataggttagttttgcctcctttttagtttttaatcttaaaacttaaaaaaaagagatataacttacatacagtgaattttaccctttatatcgtacagttctataagttttgataaaagtaaaccccaaactcaatcaagatacggaacagttccacaactccctcaaattcccttgtgccctaggtagtcaacccctcccccaacccccagctcttgaaaatcactgatttgtttcctttacctataattttatatatttcagtgttttttttttttttttttttcagggtctccctctgtctcccaggctggagaacagtggcacaatcagggctcactgcagcctcgacctcccaggctcaagcgatcctccctcctcaggactccctccagctcccccaccacgaaatagctgggactacagatgaatgatgcagtattttggggtgacrgggtatgggggtgggtgtttgaactctgtcactcagtgtttgtgagattcattcatgatgttgtgtataacagtagttcacctgcattgctctatcaatgtgccatgatttatttatatgaattggtatggatatactaccaagtatttatccattgtattgtcgatggtcatctgggttgtttccagtttgaggcttttacaaataatgctgctagaaatattcttgcccgtgcttttttatgcttatgggtatgcatcttctttatggcttggtgataccagcgtcaggaagatgtgctcctatgttagtttccctaagtttcacgctactatggaaagagaccaccatttctgctgtccttcccagcttctcccccacctccccttttccctagtttataagacaggagaaaagagagaaagcaaaaagttggaaaaaaacagaagtaagataaatagctagacgaccttggcgccaccacctggccctggtggttaaaataataataataatattaacccctgaccaaaactactggcgttatccgtaaattccagacatcgtatgagaaagcactgtaaaacttcttgttctgttagctgatgtatgtagcccccagtcacgttcctcacgcttacttgatctatcatgaccctttcacgtagacagaccccttagcgttgtaagcccttaaaatggctaggaatttctttttcagggagctcggctcttaagacgcgagtctgccgacgctcccggccgaataaaaacctcttccttctttaatccggtgtctgaggagttttgtctgcggctcctcctgctacactacctttcgcacttagagatacaattgatctggagttcagagctgtgtgtgatgggaggtagggggccaagttcccttttttcttttccctacgtggatatcccgttgaccgagcaccattaaccaaaaatagttccttcctgtgctctgcagccccgcctctgaaataaattgtccatacacgtgtatttttgtttctggtctctatcttatgttccactggtcttcctactttgcttttctttttcaagatttttttctggctgttcttgaccctctgagtttctacatagtcttcaggcccctatctgggtgcacttcctggtatcccagcatctgacatgtgcctggcgcgcagcaggaactcacggctggctgtagcctggatgcatcagagacgatggcaaacccttctcacacgtgccaggttccagcaacccaccctagccccgcaattcctcctcgctcactcccaccccccgcagcgcaccygcaaacggcaaggaggcgtgcccgccgcggcgcgcgtcactttcccccggaccgactggctccgccgcggctctccccgcccccgcctccgcctccacgtcttggggccgggccggaaggcagatctcaccgcctgcttccctctgcagcggtagcacaagctcagcgatggcggctccagaaggcagcggtctaggcgaggacgcccggctggaccaggagaccgcccagtggctgcgctgggacaaggtgaggggcaccagcaggcggggagcgcctggagcggggccgggtgctctgccctctccaggcgcggcgctgcttgctctgcctgagctgccttcccgcccagtgcatcccgcttctcccccgggaagacccaggagcgtacggccgctgctaggcttccttcgacctggccggcatgcggcacgttcagagttaggccgggaaggcttgtccccggasgaaaccagccatccggccggccggactgcaagttcggagtagaggagcgagccagggtggtgtaagcgcggccagaccctggacgctgtctagttgaggggcgcacgccttactgtcactcagaccgctggctcgtcgtcggtagtcggctgtgcatccccatggacccagaatcgctccgtcccgcgtattcctttggccgctgagacctttgcagagcagcgttctggtccggtcctcccatcccgagggcttggttacaaacgtgggttgtcctcccgggtgggcccgcctggcttcaggagtcccccttagaactttgactgccagggaggcacacctgggacacagcacggttttctctctcttcattccgtttcttagaatcaggaacccagctctggacatcactccctctcctctctataaacttgcgtctcgccctttcgacctgttctgcttgctgttaggttttctcggaatgtccctcgctgctctcctgctgaacttgtttctcccgttgtgactcatattttgtgcctgaacttaaatgtggcttacgtagagagtcagtccttccttggctccgaagcgttaaattatttatccctaatattcactctaaacagtctgttattttcctttatagctcttactacaaatggtaaaaacaaaaaactccaaaaacacttgtttgtaggtttgtttaatgtctgtctccagggccgacttcaggggcgagagacccctgcagtctcacaggactcgcgctccttgaagggcccactgttgttttaatgtcctgctgtcctgtcttgaaagtcttactggtaaaacaagaggtcacccactttcattgtgcactggacctccataaattatgtggccaggcctctctattctcactaccttggtttgtagtgcctggcataggcatagtgcatgacacatagtaggtcactgaaatacttgaatgaacaaagaagattacaaggtcagtaggggtcaggtctttgtctttatttaccattctctggcccctacaaataaaatgtcagcaaatcccatttccaggatgctattggcaactccttgggggcgtttttcttttcctgggaagataaccttgtgattcacaagggaagaaaaatgtttccatttctgataacttgtagcttgcagagtacagaattcttttgaagtcagagttcataatgcactttctctaagaagaagaagaaaacaatctaatttctacacagtgttgcatctgtgtatagaaaaattgtatttctctgggtagagatgagatgtccttttttttttttaatcacttctcatgttctatcctctgttaatttcttctttgctttgagactggcacctgagaagaagcccattcattctccagtgaacctcccaccagctaaaagcattgcagccctctagtcagactacccccggcgactggcaaggcgccctggcaggtgccctctgtctttccaccgtgccttcatccctgctcttttctctgctgtcagttttgctcactgccagggctgattctgatcctgctgtactcttgacttgtcattcttacctgtctgtctcctttgtttctctcaggctacttrgtctttcatagatatcaaagaccaattaagattttccagacctacactatgaacaagggaggatcactcratattgagtgtggcagtgaagtccrtgttttctgattcactccactaatatttattgaggctcttttatgagcctcttttatgtacctgatctgagcctttctttggggcacctgacaatctgataggtaagactgtgttctgtaattagcatctgctgtttttcaccaaaaaagatggggtttacttgattcccattgaatctgccacaatctggaaatgtgggcttaattccagaaagccaaggttttattgcagtagtatttcaaagtttaattaaatggccacgtcctgcgtgagtgctcatctaaatggataatgactgtaaaacaggaatataaagtccttcctctgttgttttcctgaattcataacttaaaagtctcatatgaaactaatgtgattgtcattatttttctccaaccataacattttctgcaactaccatacaaaaaaaaaatagggcaatgtataatgaacttaaatgaatcatgttagcgtctatttgaagcagttaatgttatagaaaaggcactagattaatgtttatcttgcaatttaagcaagtcacccaatctctgaggcttccccatctataaaattgggtttctgttatttgtctacttcttggagatgttacaatattcaaacttgaccaggtatgtgaatgcctggtatgaattataaaacattacaaaagtaaggttttgacttaagttgtgtaatctatcactctggaaaatttgagggcattagggaaaaaaatggacatttaatcacaactaaatgccaggtagagaaagatattttacattaatttgaagtaaaccaccttaaaaccttaaaaatcgtgtaagggaggttctagattattcccattttgcaaatagggaaacagaatttgagaactggaataatctgcgcaagcacctagagttggcaagtggtattctgggattccattctgggggttagactcatatgctaaaatctctactttgatttctccaaaggtgcttaycttgacaggaaagaaaagaacacttacattataatgtcaaactgacttcatatttcagatttcaaaagcatcagaaaattgaaaggtctacwtatatatatatacatatatatatattttctatagattagaatgattgtgaatttttttacatttctgatttttcattcacttgtctggctgtgtctatacatttttgtttttcagaattccttaactttggaggcagtgaaacgactaatagcagaaggtaataaagaagaactacgaaaatgttttggggcccgaatggagtttgggacagctggcctccgagctgctatgggacctggaatttctcgtatgaatgacttgaccatcatccagactacacaggtaccatgttttttataattcttagtaactcaatgtatcccctagctcattttctatttggcagacctaatttattctaattatagacatgtcttaycagcttggctagacacaggaagtcaccaccatttactccataaagtaaggcttgcacaataggtcgaagtagcacttattcaggactcatatagccatccatccattcattcattcatttaacacacttattgagtacataccatgtgccagcactggggatataagaatgactcgaacaaacagattctctcatggagctttcattccagtataaatgcaccaactaagctgacaacttttaaggtcctgtaatttttgccatgattacatagcaagtgctaaaaagcttttctaactgccggagttaccaagagcctgttctcctttgttttatagtatggattgagtctgtcttaatttgtgaatatttttgtcagaatctagacccagcttttaggaaggagataatttgacaaaacagaagtgcttctactgggtattggcagtactgtttatgagggaaatgaaatagaacagattattcacatcagtatttcttcaccttagacctgttgatgatgaatgtcactttaattgtgggaaaagaaaggctagaaaaaattgcctaatagtgattacatgtgcctcacgtatacatcccagtgtaaaaggcagagctgggcatgttgtaacaaaactccaacaaggaaagcttatctaagggtatagaattaccacaggggccaggcgcgatggctcacacctgtaatcccagcactttgggaggctgagccaggcagatcacttgagcctaggagttcatgaccagcctgagcaacatggtgaaaccctgtctctaccaaaaatacaaaaattagccaggcgtggtggtgtgcacctgtaattccagcttcttgggaggctgagacagaaggattgtttgaacccggaaggcaaggtcgtagtgagccgacattgtgccactggactccagcctgggcaacagagcaagactctgtctcaaaaaaaaaaaaaaaaaaaaaaaagaattgccatgggaactcctggtcacaaattgttattaagcaatagggctccctgagatgctggaggaaagacttagaatggggtaagtatgggaatcctgtttggttcatggataacataggaactgtgctgctgaataaggttgccttctgtaccagttactagggctatgtaacaaatcattgaaaacataatggtttaaaacaacaaccacatttattttkctcacaaatctgcaattttggtagaactcagtggggacagcttgtctctgctycactcagcaccatctgggccagtttggaggttggaatcatttgaaggcaccttcattcacacgtctgaaattattactggctattggctgggatcttagctggggttggaaccccttcatgtggcctggacttccttataacatggtggttggctttcagtgaagtatccagagagggagagagagagaatgtgccaattggaagctgtgctgacttttatgacgtagctttgaaagtcacacagtgtcacttctaccgtattcggtttgttaaaagtgagtcaataaggctgtctcatattcaaggagagggcacatagatacccacttctcattaaaggagcattgatgtcacattgtaagaggaacatgtgagatggcttatattactggggccatctttggacaatccagttggttacacctgccattgggcctaattgttaggggtttctaagggattctagattaacctagagctttttcccctgtatttttctatatctagtttctgagaataatgaaatgtattcccattaaggactatcttacccatttttatcctagaattcatctcctctgggggtaaaccctgtggtaaacatagatgatcaatattctaaaggtcatgtaattcaaccagacaccccttgggataattttctccatgaccccaccactctgaagtgctcattcagcctattcttggatacttgtaataggagacagagatgtgaagagttaagaaagttttatctgagcagcaagtatatctttaaaatcttaggagtggattcaaaattagaggcaagaggattcccagaacaaacaacccaggtttctacccagtcttgggtagtgttccctggcagaatgctgatatgcaaatatatttgtcacttttcactgatcagactttcatggtggcataggtgcccttcctgctggtctctgggtgtggagcctcattctgaggtaccccaaagtttgcctggttcatttaagaagcagatgtatgtgattcaaaaatatgtcaaaggaaacaggacagagactggaggaaacttttgtattgtttgcctcattgatagaggttataatttcctcctgccaattaatttatgctttatttatgttctattttgggttctgtgttcatagattatttaatttagccatagcataccagtgatgggaaactcactgtcctytgaaagaggccattctatctttggaccattctcattaaaagatggtttcattattttaagccaaaatctgcctttctgtagactttacatattggtcttagttctactttttgaaggtcatacacataaacttgcttcttaygttttataataacattttatttctgaaaacctccctcttcccccactgagtctttcatctagaataagaattcccttttcccttggccattctttcaggtcctcatcctcagcaggcctccgagatttttagagaatctggagatgtgaatgcttttttgccccatggagcattggggccacagctcaagggttgagcaggaagaggggtactgtcactgttgtaagtcttgaagtatcaggcatctgggtaccttctggggaacccacaaaaccaatacacatggccttatttccttgtatcactcagcctcagaagataatcccagtgcaatgtatttgtcaaggaaaagctaaaggcattctaaattagcttggctctcgcaacaagactgtgatgtatcccctcctacccaaaataaaaattatggcttggacatggtggctcatgcctgtaatccgagcactttaggaggccaaggcaggaggattgcttgagcccacaagattgaaaccagcctgggcaatatggcaagatcccatctctacaaaaattgttttttaaaaattagccagacatggtagcatgtgcctgtagtcccagcacctcaggaggctgaggtgagaggattacttgagcctgagagattgaggctgcagtgaaccatgatcgtgtcactgcactccagcatgggagagagtgagaccccatctcaaaagaaaaagagttatgtatattttaataagacttcctttagcaaaagtgaaataaataatataaaatgaatcattatttttgcccaatcaaccagagttctctttgttttatatggctttgaaggaaaataacaacaaaaataatgcgtaaaacagcaaacacttaatatagtacttagttggtgttgaattctcagcactttgcatgttttcattcatttactccttatgaggtaggtattattgttattcctgttttacagaagaggaaactaaggcaccaagaaattaaggaacttgtcatttgcttgtaggtggcagcgtggagtacaaattctcagattgtgcttctagagtatgtgcttttaagccctacactgaactacctctcaccagccctggatacaaatccaggctctgctactcgaatatctgaaactgtcactgtgcctctctgaggcttattttacccatctataaaatgggttttctggtcaggtgcagtggcccacacctgtaatcccagcattttgggaggtcaagacaggaggattatttgacagtagttcaagaccaacctgggcaacattgcaagaccctgtctctacaaaaaatttttaaaaattagttgggcctggtagcatgcacctgtggtcctagcttctcaggaggctgaggtagggggggattgcttaaacccaggaattcaaggttgcagtgaactatgattgtgccattgcaactccagcctaggcaacagagcaagaccctgtctctggaaaaaaaaaaaaatttcctaacaaagttgatctgaggttagagataacagctactaagtgatcaatgactaacacagtgcccaatacaaaaacatagataataaacaaagctgttattttattattgttcagtttgcttccttactgagatgaatttttccctctctcccatagtgttctatgaaatttgagaaaayttaatttttggctaatttttctatatggtatatataaaaatatgttaaaacatactttttaaatctatggtgtattygtagggattttgcagatacctggaaaaacaattcagtgacttaaagcagaaaggcatcgtgatcagytttgacgcccgagctcatccatccagtgggggtagcagcagaaggtatttaaacatttttacaaaatgatgtttttataatttattttgcagttttattttaatcaccatctcaataacttgactttaatatattcattagcctcattgcttaactgtaaaaacaatgggtaaattctcttggcaacttttaaagattctggttttacattaggttaaggaaataaaattatttagacaatttagaatgtaatacctagctaaaagaaagaaatttcttaaactggcaatattatttttccctctcatttgcctttttwtacataatttttaccctgctattcataaacctcatgacccccttccctctcttgaacgcccacgtcaagctgcatttctgaaacattctcaaaccaatgggactctcttatgtagctgaaggcatatgatgctgatggtgacaatgataatagtaatagcagcaatcatttgagtgctgattatgaaccagacacttatgtatttactcattctatcctcacagcaacgtgtaaggtatgtacttttatctctttaccctgagattataatgtgaaaggaggagtcgcaatttaagcctaaggacactagtaccaggggtcagcaaactttttctctaaagggcaaatagtggatatcatacacattgcatatcacatgattcccatcaccactactcacctctcccatgaagcagagaaacatccatcgacaatgcataaacrcaggagcatggcagtgttccagtaaaactttacttacaaaatgggctgtagttaccaacccctgcccgtaaccatgttacataaccctcttttttacttgaacacttcctctgttatgatgaatttttaatcattctagagtatcagtattartagtagcttagaattacacatattgaatattaatgaaaartcttattagctttacagagctggatgagtttatagagtcctatctttgcccatcaggagcttccaatctaagacagaagcactcgtggggacaaacgtgtggccgtgaggaagggtgcatagccggggaaaatcacccggtggcatcagccccaggttcaactcaggagggcataagatttttagtctttagctttgcagctcaaaaatgtgctttttgtcaataaagcaagagaaaagttatagctctgggggatagatgcacatgaactacattcacaagagaatgatgtggtataaaccagcataycagcttgtcatttacagttagtggatgtacaatcagaactaaatcgtgaccgtgttcctctgccgccccagggcaagtcagatcctttgctcagagcatgcaaagtgcacrtatgtggctaagtctgtctgctgagctgcgtaaatttcttcattttgggctgactgccctgcttctggttgatacaaccttcagagatatgttaacattatcaattaaggtacagatttttttgccctggccttggagccrtatcatttccttaaagtgagtgatgttactgatttaagcttatggttcaagtctcagagtttgatgggatgggatggagtggaactcaaggctactctctatcacctgtaacgcgtgagacatttagagatcataatgtaagtgtttaaccaacacatggtaaaatattcatgatgagtgaatggaatcttcgtaaggagttggaaactattgcagtttctgaatttcgcccgaggagatgtttatcctttaatcttccaattttaaatatctggtggggaacgtaagcagtaactgttaagtatatgcagagaacgcattgcatttttttgtgcacatttgtaacagagagagagagtggcgatctgctctttgtgccccagccagccttcagaatagtgtcggcgaagctagtgcycaagaagtatttggggagagtaagaatgatctgattgtttaactcacaggggtggtataatgttgttcattctaagtaaatcgctcatttatttgtggtaacgtattttacaccagcttgaaggaagatttgatgccattttctgygtcttaccctaagcaagtttctgtggaagttgagaaaaatgtcaaagaattaagttttctttcaaaggctgattggaaccaagatgtatatatgtgtatgggtgtgtgtgtgtgtgtgtgtgtgtgtatacacacatgcgtactccaggatgtctttatatttcaaataaagcaatctctaatcaaattccagtctgtgtggtgtacgctggattgtgataggcttaggctgggattttcagcctctgcactgttgacatgtgactgcacagtggctggatgatcttttgttgtggttgtagggtacattgtaaggtgttcagcagcacccctgacctctccctactagctgccagtagcaactctctccatttcccagcatgacaagcaaaaatgtttcgagacatttcagatgcctggaaggagaaggtgcagacttgccctggctgagaaccactgagatagacagagagctgaaaggccaggaagcagcctggctctgccactaagtggctgttagaaccggggaaaggggcctgacctttcttggctttagtgccatttctataaaacaaaagagtgaaatgagatgactcctgagagtcctccagctttactgtcccatgccagggtaaagattataataaatgctgtccttgatctggatgctgcattcaccctaaagaacattcagcattcatttccttctttccatcactcacagtcctgatcactcaactctccttttcttccctgtcactctgcattctcaggtttgcccgacttgctgcaaccacatttatcagtcaggggattcctgtgtacctcttttctgatataacgccaaccccctttgtggtaagtagccatttcctttcataatttcctgtcacatgatcagggatgggacttggctgaattttatagtctttagggctattgggattggactgtttgaatgacagaggagttccttggcatgtatgagrcatttccttctctcctggaatgtttctcccacatcttagtaatatttctctggtattcaacttttgattcattggaattggtttttttaaattgcagttttccttttctttgcattctaagggtattcgagagagtcagcaaatttttttttttgagacagagtctcgctctgttgcccaggctggagtgcaatggtacgatcttggctcactgcaacctccgtgtcccgggttcaagcaattctactacctcagcctcccaagtagctggtattacaggtgcctgccatcactcccagctaatttttgcatttttagtagcgacgaggtttcaccacgttggccacgctagtctcgaactcctggcctcaggtgatccacccagcttggcctccggaagtgctgggattacaggcatgagccaccacgcccggccttttctctgtttttaaatttggtttgtagttctttttctcagctatcacaattaggaaacttcttgtgtcgaaatctgaattcacctcaaaccctgtcttgtcatgaatatttttgacaagctggcacacccctgttttatacaaatgttttattctaaatactattcatggctagtacagagagcatgctcggcatatttgagtaagactttcatcaaatccttcatgtagcacaatctaaagaagaagacagtagggactatgacagttgttgctttgacatagacaaaacttttaagagctgggccagatgctgagaatatgttttggaaaatgtgatttggatgcagttagtcacatctagtagaaatgagactgtattgctacagaaggaggttccaattcattttgtgtttgccggctctagtgcactgacaggtagatgcagcacccctaggctgtaaataacctgctagacactctattcacatctaaatgtagttcaggtttcattgtttgatggaaaaattgtcatgtattcaagcatcctaattaccttcygtactaagtgttaatagctattaattttatgtcagacatgaattgaaccagtgtatcatgatcctctgcccacactgaggagtcgtcctccccttttctttggcccagaacacctgagagatgtgacataacttccagggtgttcaatgactgcagtgattcttggtgaaagggtggaggggacggacaatttaaatctcaggttgcctgtgtgtaatcaatgtcatttgccacagtagggrgaataatccaaccccttctcccattttgggaagtagtagagatgggwgctaagttgaaatataaatatttaaccctggagtgagagataaatgaggaacctgtaagagcattctccattccctcaaattttttttttttttttttttttttgagacagagtttcgctcttgtctcccaggctggagtgcaatggcaggatcttggctcactgcaacctctgcctcccaggttcaagtgattcttctgcctcagcctcccaagtagctgagattacaggcgcccatgcctggctaatttttttgtatttttagtagagacagggtttcaccatgttggccaggctggtcttgaactcctgacctcaagtgatccacctgtcttggcctctcaaagtggtgggattacaggcgtgagacaccacccctggcccctcagtgttttcctcaatgttttccttaaaagcaaatgagaaaggaggagagggagaagcagttggagggagtaaactgaatccacaaacttctgtctcaggtagaagcattgaaagcattggaatggaggcttagaccatcgttgtgtttgaagaattttctagctctaccaagtagaagatggaatgagaaggcactgaggaaattactcacctttcttattaggaaatacatcctggaattatgagcagccagttaattctaagggtaattgcatactgctggggtgtggctcaaaaatattatgctatttatatattatgtttattaaaagggagcaagttggcatgaacagtataaaatagacattttaagaatatctggttattttygttaaaaactgtttgttcttgtttcctgctatgttacagcccttcacagtatcacatttgaaactttgtgctggaatcatgataactgcatctcacaatccaaagcaggataatggttataaggtattttcctttttctactccacacgtacatccttctgtaggaatcctgtatctgtaatttttgggaccataggtaataggtgccttatttccattaactgtaaaccttctgaatgtgttcctgggtcctctaggtctattgggataatggagctcagatcatttctcctcacgataaagggatttctcaagctattgaagaaaatctagaaccgtggcctcaagcttgggacgattctttaattgatagcagtccacttctccacaatccgagtgcttccatcaataatgactactttgaagaccttaaaaagtactgtttccacaggtaaatgaattgtgtcttcactgaccttaagtgagttaatgtgattcagccaaattctatyagtgtttgtgaagtttttctctttaatttgctcatgtactacagctgcatctgattttattttattttatttacttattttgagacagggtctcactgtgtcacccaggctggagtgcagtggcacgatttggctcactacaacctctgccttctgggttcaagcgattcttgtgcctcagcctcccaagtagctggtatcacaggcgtgagccactgcacccagctaatttttttgtatttttagtagagacaaggtgttggcatgttggccaggctagtcttgaactcctggcctcaagtgatccacccrccttggcctcccaaagtgctgagattacaggtatgagccaccacgcccacccagctgcatctgattttagaggctgtagatcaagccttggcaaacttttcttaaagggacagatagtaaatatttttggctttgaggtccacacagactctttctcagctactcaactctgctgttttagtacaaaagccatcatagatgaaatgtcggcgaaggagtgcagacagaagtgggtggcttgcccataggccatagtttgctgacctgttatagattccatacawgtatgtgattcatacatattcatacatgtaagtgtgtgtgtgtgtgtgtatatatatatatatatatgtatgtttttaaaacttgctcaaaagtcttgaatagcaaacactggtatttttctatctttccaaaaattttctgtgcatatgcaagcgtatatatatatatatatatatatatrtgtgtgtgtgtgtgtttgtatatgtataatatacttcaaaaccataaataggaatatttgtgtgtgkgtgtgtgtgtgtgtgtgtgtgtgtgtgtggtttgttctgtgcrcttttccccccaattaatttgtcatggacaccttcctgtgttagtccctattagtcctgactttctgtcttaaaggctgctgcaccggtgtatttaactcagtgacacagactcagtccttaccatcaggtaggaagaggtgtagcagagtgacagtagtgtctgcttgagtatgctgtaggtcccacccctcctgattgtccccctagcaagaaaccactgattcaaagaaactgaacttgtaggtttgtctttgatactgtatttgttggatcagctgatggtgcccactccagtgcagagtatgaaagcccagtcctgcctgaagggagcagccrtgccagctgagtgttgcccacatgaaaatataggtcccagttgccagatcatctgagttctcctcttcccaaaataactggaaacctggattttgtgtgtgaaatctcctaattcctacgtgttggaccattttttccaatggtgtgtagtccagacaaaatacgtctgtgaactttccctctgcccctctgatttaacttcacgaagaatgaggcatttctgcttttccactccaggtagcttgggagttaactccccttgtgcacagttgcttgagtatgtgtgtgggtgtgtgcgcgcgtgcatgcacgtgcatgtgtgtgcgcatgtgtatccgtaaggtaactttctggcatcaaaattgtatgtgcattcacaaagttgatagtgcttagcaaattgacctccaaaaatataccagttggtgctcccaccaacagtagatgttgacagcatatgatacctacatttcctcctgctctgtgatccaatttctcatttttcctgatttgctagttgaaagtaatagctcacttttatttgtattctttaattaacctatattttctatgtgtytgttcaccttttatatttataaacatctttgtttataatatatatacatatatacatattatatatacatatatgcatatactatatatataaaatatattttttagatgttttctgttgtctttggaattttytattgaaactgtttgctgaactgtttaaaaatctgtataatatttattagtcttattttatagcttctgggttttatgtcatgcttaggaagacatgctctatagcaaaattattaaagtaatagcaaaatatttcccttgttctttctctagaactatcatgtttgtgttttataatatttaaatcttttgtttcattagtgatttttaattttatatggggcatgaagtaggaaagcagattagatttttttctaaaaggtttgcagttgtaccaacatcaatggaagaatctttcttttttttcttttttgactaattggaaaggtcacctttatgcaacaatttctaacattaatcaagtgcttattatatatcagataactgctggaggcccttcacatgtcattttttttctttttttttgagacaggttctcacattgtcacccaggctgcagtgcagtggcatgatcttggctcactgcggccttgacctcccagattcagggaatgctcctgcctcagccctctgagtagctggtactgcaggtgtgcaccaccatgctctgctaattttttgtatttttttgtagagatagggtttcaccatgttgcccaggctggtctcgtattcctgagctcaagcaatccacccgcctcggcctcccaaagtgctaggattagaggagtgagccactgtgcccggtcaacatgtaatttcatttaatyctcagagtaatgccagtaaattctggtatattatcatgcatgttatagatgaaaaaactacaaggaagagtggttaatagccagcagtcacacagcttatagatggcaaagctccaggatttaaattcagagtctgactccagagcgtgttaaccactcagcattattacttctgtgttcatctcccatttcaaattagatcaacttctgaactctctattctgttcctttaatctgcctttttatgtctagtaccaagctgttttaattactgtaggtttattatgtattttaaaatccaagagagttgtttttccagatttttcttccctaatcttacatatttattttccaagatgcattttattttcagggtatgcttgttttaaaccacaattctcttagataagaccttgttcatttattcattcccaaaagaaatggataataacctaagattccagccatcagagcactggaagtttttaaagccttttatttttctgtaacttctcctgttaattttggtatctgttgttagtctgtataaagtccctaagtcatggcatggtatcaaacaggattgttacttggcaaacaaaaagttttatttatttattattattatttttttttttttcctgagacggagtttcgctcttgttgcccaggttggaatgcagtggcacaatctcggctcactgcaacctccacctcccaggttcaagcgattctcttgcctcagcctcccaagtatctgggattacaggcatgcaccaccatgcccagctaattttgtatttttagtagagatggggtttctctgtgttggtcaggctggttttgaactcctgacctcacacgatccacctgcctcggcctcccaaagtaaaagttttattttttatatctttatgtatgggataacccaacacattttgttaaaaaggacattttgaaaatcatttctgaagctgataaaagacatttgggaacctgtcgctttggggatgtgtgggtgtgtggagccctggaactgtcccgggctggctgtagcactgtcagggcacctrtcaggccagcagtgagtctcgtgtgggaacatgagcttgaggttcttctttgtatctcactctagatgggatgcataaaacaaaacctgaaataatcagatttgctgaaaataactacagagtagaatttaaaacttgagtatgttgagggaaggaatatatatatctgggagagaatggatacgttttgtttttctgaaatggaattagaaagatgttcagttgtcttgtgcattcttgcaaaccttgcagttttgagagccctgtttctgccttgtatcattttccactgtgtatctgattctaggagcgtgaacagggagacaaaggtgaagtttgtgcacacctctgtccatggggtgggtcatagctttgtgcagtcagctttcaaggcttttgaccttgttcctcctgaggctgttcctgaacagaaagatccggatcctgagtttccaacagtgaaatacccgaatcccgaagaggggaaaggtgtcttggtaacctaatttttttttaaattatgaaatctgcttttatattcaaaactattactgtcaagtaaaatacatttttatgtgttttcattgtgctgaagaaaaactaatttcagcatggaaatatgtatgtttggctgggtgcagcgtctcatgtctgtaatcccagcactttgggagaccaaggcaggcagatcacttgaggtcaggtgttcgagaacagcctggccaacatggcaaaaccctgtctctactaaaaatacaaaaattagctgggtgtggtggtacatgcctgtaatcccagccacttgggaggctgaggcgctagaattgtttgaacctgagagatggaggttgcagtgagctgagattgcaccactgcactccagcctgggtgacagggtgacagagcgagactttgtctcaaaaaaaaaaaaaaaaaaaacaagaagtatgtatatttgttagtcaytaatttcttaaaggatctttcaaattaaacaccccaggatcaggatatgagaactgagctctaaatggtgcttcaaattcagttaatttaatttaatttaatttgccgtgtctccttaatgccaaaaagaagcagtaatagagtgaaactttagcaggttatgatttttatttcttgtcatttttctgatatgaagtgttgcttacattatggtttctgtaacatttttaaaggttggggtagcagtggcattcagagaatcagtttattttgttttatttgtgaggctgatcacmcagcaatgccccgaaataccagtccaaccacagacctactggcgcatgtgcagcaggcacactggtaggcttgggtcacacaccgatgctcccattatctgacctctgacttaggaagatactatgtgaccaaccaagaccagctgcagcttttgtttgctaaatttcacttctggagctgtcttggttggtcctatattatctttctaagaggggaaagacctcttgagttcttaaggaactgaatgtttttaaagactatcatatgctcgattcttgattaaataatcttttattttcatattcttcttcagactttgtcttttgctttggctgacaaaaccaaggccagaattgttttagctaacgayccggatgctgatagacttgctgtggcagaaaagcaagacaggtaaaattaattgtgattacctatattatagaacatataaaggatgatctcttcattggtaaaatgtttctggggagacgggacctatttggaaacatttcccatttattttgcaaatgatcatttcactgaacctcctgtagagtcttctaatggagagcaagatagagatctagtgtggggggaggttacgtgattggcaagcataatgcagagtaaatcaacccagtatatatttcaaattgaaactcctatttgggaacttctcattttgtaattgatctttttataagtaatgtctcagtgtctaatgagggtaaagcactttggtgctagctgtatgcttcagtatttgctgaggggtttaggagggagcagtaccttcaaggagatgctgaatttagtttggacagaccagggaggaattcctgtggggtatcggcacagtgtttaagacaagtctgaccagagagtttgtacaaaggagaagtaagtacgtggggctaaagttgaaaggtaggcagggcccaagcaattttgggcgtcaggtagcctatgtgatgttttgggggcaggagggtgctgctgctgaaatggtagggttttcagattgtgataaaacaggttccattctatatcagtgttgagaaagttaagctaagatgatacgtcctgataggtgagatttacttctagccatctggactgccaagagaagcagaaattacacatcktttctctgatgttctgaccatttaggactgagcttgatcttaaggggtactgagctgtcccctctcagaatcagcaatactgaccagtccagaaattgagatagcaaaacttactctatatatgggggatcttgccagcatatttgttatatttaaaaccaaaggctttgccaaagattaatatagagccattgtgtgtcatgtgtgacatayttattttatacagtcttcaaagacaggatgtctgttcaggcaaactggctgatatatatggtagctgctcagatgtttgtaaaatggcagttacatttctgaccagttatttaaagatgatgaataacaagaacagccttgcagaaaatacttagakgctttgtttgctaaattgttttatccccatgacactttagagtcttccttaagattatggaaatgaatggtggttgttgttttttttttctttcagtggtgaatggagggtgttttcaggcaatgagttgggggccctcctgggctggtggctttttacatcttggaaagagaagaaccaggatcgcagtgctctcaaagacacgtacatgttgtccagcaccgtctcctccaaaatcttgcgggccattgccttaaaggaaggttttcattttgaggtagggtgtttctgggactcactcattttcctttcatctgctctgtagaagatctaaggcatgtctttctcttttggattatccctttaggaaacattaactggctttaagtggatgggaaacagagccaaacagctaatagaccaggggaaaactgttttatttgcatttgaagaagctattggtaagaagtgatcatgaacattaaggaattggytgcaaggcaaaaggaaaaggtttggattgggattcaaagatccacagtgaaacayggtttattttgcctctccagcactcaggttgaatgtcgaactgtcctactccaaaattgacatctcagatgatttacagccaaaaggaatgtcttaaaaacaacyaagtcattcatgtcagaatcctttgcctggatgactcaaaacagtgacattgtatgcttggctgccggtacatgtattttgggagttgtgatgtttcctccactgtggtggttaatatccaggcctaaacactgtggtatttaatgtccctcctcctccaaaagtgctaatgaggatctatgctacrgtctagccagaggaaaggagaaggaaggcatggtttgctgctgtcatcagaatgatactcacccaaaaggatgacccaggtccagccagaatgacagaaaaacccttgtcctaaactgtcaatataaatgaacagaaaggagaactagctatagaaatttgaaactcacattgtaccaaacgcttttagctattaatttagtaaaaactattatgcattagatttatttatattcatttgtatattctctgcaacactaacacatgatttaactaatcaaagcataatcgctcaggttctgctcttttattgtcagatttggcagacttgtctttccgtagctttttattttaagaaagattttctttcatttatcaagtattaattgcatgtctattactcagtgactctaaaagaaatggatggcactgaccttagcctacagcagcttagatagatttagttaagtaatcacacacaagagtagaggccagatgtcaaaatgaataatgtaactaacaaatactattgggattcagagaagaaagagatatgtattgactaggacaattagaaacaatttcatgagctggaaggagtttcatgactctagtgattgagcaccatgtggccaggagggaaaatcttgcaggttcttcagcaaatacttcttgaaggcctgctatgggctaggcactgggctaaattcctaaacataaggtattaatgagaaatgtgcatacacgcaacactgtacaacctctaatatgcaatagccaggattcatactcatatgtggtttgacacagtattgtatagatgtatgtatgacgtgtgtttctgcaggatacatgtgctgcccttttgttctggacaaagatggagtcagtgccgctgtcataagtgcagagttggctagcttcctagcaaccaagaatttgtctttgtctcagcaactaaaggccatttatgtggagtaagttgttattgactctgttggattgaaataatattttgaaatgttctattatatacttatgcatgagatactaatatcctttctaatgctcttattttggtgatgaattctatttcttataaaaattaaataaggctgggcacagtggctcatgcctgtaatcccagcactttgggaggctgaggcgggtggatcacctgaggtcaggagttcgagaccagcctgtccaacatggtgaaaccccgtctccactaaacatacaaaaattagctggttatggtggtgggcacctgtaatcccagctactcaggaggctgaggcaggagaattgcttgaacctgggaggcagaggttgcagtgagccgagatcgcgccattgcactccagcctgggtgacaagagctaaactctgtctcaaaaaaaaaaaaaaaaaatttaaaaaaactaaagagatcaccttttccttttgatatgtaacaagttagtaattactattcccgatcgcattaattcttaacaaatgacaacatgaaagaatgtgattttaagtgtccagtatcaaaaaagattgaatgtcttcataatacatctattcatttttttgtagcacttactcaactctgccttgccagtgtagtgcgtaagcatccaaagakaatacagaaatgcgtgtgacctggctctctgtgcaaatgcaggcggaagaccaggcagtcatttggtgatccctggggtagattgttggacctctttttttttttttttttttttttttttgagacggggtcttgctctgtcaccaggctggagtgcagtggtgtgatctcggcttactgcaacctctgcctcctgggttcaagcaattctcctacctcagcctcccgggtaactgggattataggtgtccccacacctggctgatttttgtacttttagtagagttaggggtttcaccatattggccaggctggtctcaaacgcctaacctcaggtgatccacccaccttggcctcccaaagtgctgggattacaggcgtgagccactgtgcctggcctagacctctgttttaatggtcttttaaaaattattcctttggcgtcagttttggctgttacatttattttattatttattttattttattttattttttgagatggagtctctcgttgcccaggctagagtgcaatggcacaatcttggctcactgaatcctccacctcctgggttcaagcgattctcctgctgcagccctctggagtagctgggactacaggtgcctgtcaccatacccggctaatttttgtatttttagtaaagacgaggtttctcaatgttggccaggttggtctcatactcctgacctcaggtgatctgcccgcctcggcctcacaaagtgctgggattacaggcgtgacccaccacacccagccatatttattttagaatacactggttggtacatgttctgtgtccaccctacaaaattatttgttcctcatgtgcatgaatttgtatttgtttgataggtatggctaccatattactaaagcttcctattttatctgccatgatcaagamaccattaagaaattatttgaaaacctcagaaactacgatggaaaaaataattatccaaaagcttgtggcaaatttgaaatttctgccattagggaccttacaactggctatgatgatagccaacctgataaaaaagctgtaagtaatgtcttctcttttcaactaacctcttttctatttaccttttaaaataatttgaataaattatttaaccatacaattaattgaagctgattttaggcacttaggcgtgattataaataagctataaaaaatatatggaagccggatgtggtggctcatgcctataattccagcactttgggaggttgaggtgggcaaatcacttgagatcaggagttcgagaccagcctggccaacacggcaaaacccggtctctattaaaaaatacaaaaattagctgggcgtggtaagttaaaaaccrcaggctagaactgaaagagactctactaggctgggagcggtggctcacacctgtaatcccagcactttgggaggccgaggcaggtggatcacttgaggtcaggagttcaagaccagcctggccaacatggtgaaaccccatctctactaaaaatacaaaaattagccaggtgtggtggctcatacctataatcccagctactcaggagsgtgaagcaggagaactgcttgaacccrggaggcagaagttgcagtgagctgagwttgcaccactacactctagcctgggtgacagagcaagacttcatctcaaaaaaaaaaaaaaaaaaagaggaactagtcatcaaagcctgtgtggtcatttcgcaccttaggcaataagtgatcagaagtgtggaacctgtctgtggacacagagcttagttggtggtggtccagggagaatctgggttttctatctcaggatccagcattctctccctgtcaggagttctcacacttgcaggagcatcagtaaccaagaaggctggggaaacagagtgctggagcccacacctggactttccgattcagtaggtctggggtaggagccaaaaatgttcatttctaacaaggtcccaggtggtactgatgcaactggtcctcactttgagaaccactgtttgttttctagttagtgtactctgttctctgagtgtattggagctgttggctgtaaagcctgagtttgcattctttacaccaagcagatctttcactggagacaaaagaagacacaaaggtagcagaagagtgttgctttctatgttggggttgggggaggaaagttaagaatatccttatgagatgttaggcacgttctttgatattttctttgttctatttttcattttcatctgcacacagcatatttttaaaatagaaatagtatgaaaacgcttacgatgaaacgtggcagtcccacccctgccacctcattgccatgtcaccaagactagatttgtaaatcatgtgctcatatagtgatgttttgatataccagttttacaatttgttgactttctatttttgagataaagatttagttcttatgctttctacattcattaattctcttctccccatcctcacagtacgtttatgccacagcttttggttaaatcagattccgtgcttttgttattatgactagtaactgctgttgcctgctagctaagtagtgtattttgattaggtttccctaatttgtatagagagttgtatttcctgtaccttttgtttgtttgttttctttttttttggagacagggtcttgctgtgtgacttagtcacttaggctggagtgaatggcatgatcacagctccctgtagctttgacctcccaggttcaagtgatcctcccacctcaccctcctgagtagctaggaccaagggtatgccatcatgcccagctcttttttttttttttttttttttttttggagggacgagtctctccctaggtttcccaggcaggtctcaagtgatcctcctgccttagcctcccaaagtactgggattacaggcgtaagctactgcgcctgccttaattcatgtagtaatagttgctttgttcttccatttgcctggatttctatgtcctgtcagcagtttttcccaaatccttcaaatgcctctcagtagggttttcctggtccatgtccaatggccgccctcctggttgggtgcacagctgtcatcctgggaatgcccttctccaggattgagtcccttgctcctagacctcatggcttcctctttctatatttattttcctagatcacatcctctaatagctttctgagaacaagtaattgggtggtaagtttttggtggcatttargtccgaaaatgtcttattctgtcctcacacttcactgactcacagttttgaaagcattgctccattattgttgggcttccagcattgctattgagcctccaatccttcctttttcagcagatagttaaggcctactgtatgctgtatgtaaggttattgatgccatacttattcagtcctttccatgcaacttgttttgtttgtttttttcctctgggaagattttaggaacttttctctaaacttcaggttctaaaatttcacagtgatatgctatagtatgggtccctttttattcatgtttctggatacttggtctgtagaatcatttattttagttctgagaagttttcttgattatgtatcaggaaagggagctaattggttattttttaaaataatcacctcccctgcattttcagttctttgtttcttgaagagctcttagatgctggctttccaagactgatgttctacttttcttgtttctttctttcttcttctgtttttctgggagatttccttagctttagctttcagtgcctctgttggctgtttcagttataactaatttattaaaaatagtgtcctgttgaaacagtgtcttgctctttcacccaagctggagtgcagtgacatgatcatagctcactgcagccttgatctcctgggctcaagcaatcctcctgcttcagcctcctgagtagctgggactacaggtgtgtgccgccatgcccagctaaggttttttagtttagtagagacaggatcttgctgtgttgcccagggtgatattcctttttttttttttttttttttttaatgtaaacaatatcttacctctctaaggattatagacctaattatagttttttaaaaatatatgtcttctttttctgctacattctctttatttccaccaagttctttttattctgtttgttttggactttgtcttttacatgatgtctttccccaaaagtctgatgatccttaattttcctttgggcacctaagaactgattggaagctctgtgtacatatgcagatcaaatgacatacttcactcagaggatattggtagcaagttaactttataaggggatccccctgatttaatgagaccttaatcacctacccaaggatgataagatgagatgccaaggccctggaggcatgactggggcggagctgggggtgtcagcctgaggacttctacttgatccctctgttttcatcatgccctgcccaggttccccaactcctgaatgtttctgatttaatctccagagaatttaaaccatctcctgcagaaatggagaagaggtggttctgtgacggtgtgggctcagggcaaggaaccgggakggtctaagaacttctttcaaaccctgttcctgctttccacccctgcctcacatctgccttttgcagtacctggtgcctctggttcttgagcttggccaggattttgcagagcaccttgcctcagttctcatccatgtctccttccgcaggcactcagatttcattctctgggtcccaccagaccagttctgtgcctccatctgttttctgacttgtgcgatcggttggcagccccatcagctgctacctcctctttgtctctttgcccgtgtgtttatgctattcaaagtacctctattttaatggagttttgggacctatcaaatataaatataccatttcctcaagaccatttttcttttctaaccagtaaatttatatggcatttattttttcttacagaagcttccttttttttctctttttcttttcttttttggaggcatagtttcactctgttacccaggctggagtgcagtggygcaatctcggctcactgcaacctccacctcccgggttcaagtgactctcctgcatcagcttcctgagtagctgagattacaggcacccgccaccatgcctggctaatttttgtatttttagtagagacggggttttgccatgttggccaggcttgtctccaactcctggcctcatgtgatccgccctcctcggcctcccaaagtgcaaagtgctggtattacaggcatgagccacygcgcccagcctggaagctttatttaaaaaaaaaaaacaaaaaaaactccttatggaattttctttgcaaagattcactttataacagtaaatataatctagtttgaggtttttttttgtggtgtattaatctgtttaagtcaatatcttgtgaaatgatgtgtttaaataaaactttaataacttcaatagaactagggaagtaaaagctaatacacaaagttacttaattttctttatttaaaattaatttagttatgttaattcacaaataaaaattrtatacatttatgatgtacaatccgatgttttaaaatgtatacattgtgatagctaaaatcaagttaattagaatgtgttacctcacatattgatcatgtatttgtagtgagaacacttaaaatctactctcttagcaattttcaagtatacaatgcatcattattaactatagtcaccgtattgtacaatagatctcttgaacttctcttctgtctagctgaaactttmggccctttgacaagcatctccccaaactcccctcccttatccccacccttccccagtcagcccctggtaaccactattctgctctctgcctctgtgagttcaaccttttcggattccacatgtaggtgagatcatgcggtatttgtctttctatgcctggcttatttcactcaacataatgtcttccaggttcttccatattgttgcaaatgacaggatttccttctcttttaaggctgaatagtattccatatagtagagcacatattcataaattactatcrtttagtatttcattcatgtggagtacattttctgatttcctccaraatgtttttcttttctaaccaatagatttgtttggcatttattttcttacttatgcaagrgaagatattggttaggccagaatgttactatttaaatttataatgtgtgcattaattcctaggttcttcccactagtaaaagcagccaaatgatcaccttcacctttgctaatggaggcgtggccaccatgcgcaccagtgggacagagcccaaaatcaagtactatgcagagctgtgtgccccaccwgggaacaggtatgatgtggatggcagctggtgtgatttttactccccagacttcctaactggttctattcaaatgccaagtgaaatgttccatctttctaataggtaatttaattagaaatgctgtttcagaacctgcactaatattttggtattaacagtcagtctcagcatccagggaaaagcttactttttactttcttacttttgtcctaaatttctttgtatgggaaaattttatccttatttcagtatagtagtaaaagtgcctttttctaaacacttttcattggtagctaacaccaatgagattttctctttttctcaaacttcagtcttcccatgtctctgataaaataaattataatccgggccgggtgcggtggcttacacctgtaatcccagcactttgggaggccgaggcaggcggatcacgaggtcaggagatygagaccatcctggctaacacggcgaaaccccgtctctactaaaaacacaaaaaattagccgggcgtggtgggggatgcctgtagtcccagctactcgggaggctgaggcaggagaatggtgtgaacctggtaggyggagyttgcagtgagccgagactgcgccactgcactccagcctgggcgacagagcgagactccatctcaaaaaaataaataaataaataaattataatccattccacatgcattcaagaaatatctttgagtacccattgtagacaggtctgtgctgggttctggagggggcacagagagcctcatcagagagagtccttgctgccaaagaactgatgggctggtagcttcaggttcaagtttctgtgacctcaaaaaagtgtttgagttggtcactctgtaacaacttaacattttgcaccttaacaagctcagtgctgtccttagtgtgtgtaagtgtgatactgcatgcctatccaacatgccgttaaccagcatttccctattcagaatacagttgaaaatcaggaaaagtttttgtgaaaggtgaattaagtcagtgctgtctgacagaactaaaatgcaatccacagatgcaattttgattttctacttgtcaccttttaaaagcgtaaaaagaaacaggtgaaattaatttcaataatgtattttacttaacctagtatatccaaaaattattacaacatataatcagtataaatattattaatgagatgttttacattctttttttttcctctggaaaaaagtcctcaaaattgattcagtaattttacacttacggcatatctcaatttgaatgctccatttttatcagaaatacttgatctgtagagttaataaaatttagattagacaaagtagattttaatacccagattattccaaacatacttgttttctaataactgaatcaagtatcagttttaaaacttgaactcaattaactgaacttcataaaattaaaaatttagtttctcagtggcgcttgccacatttcaagttcttagtagccacatgtgtctaatggccgctgtagtaaacagcacccatctaggtaattgtgacaacatagacaaaccaaagctttgctcatagaagagtttttccagcctcgtgaatcaaacttgtgcaaataaaagcagatgaaaattcctgagcatcttaaattgccaagctagtagcagattaaatgtagcaaattagaggaatggggaagtataacaaacttttcttaggcaaggagaagtgactgctgatagcaagaaaggaaatattaaaacaaaacaaaactataaaacgtggacacaaggacttagaaagctcaccactccatgagtttatcatgagggaaatagcattctacacccaagtgagcccagaatacagctccactccaacacagtcatgcttatggctctcaaatgtcaagatgttcaataaagagatatttaagaagtcatgggactatgtaatatattttcactatggattcccattcaaaacctttttgtgcttaaagtgcaaaaactcaactattaagtgaacatataaaagctcattttctaagaattctggattaccaatattttattgtaatattatgcaagaatcttgttttcgtgtgcattagatagtaagctctttgctgctatattgcatatagttttttgtaaacatttctttataattcttgcttatttagtgttttcttatttctatgtttcattcttttaaaaagaaatggacagtccaactaaacagtccaacttaaggatctgttttttctgtatcttgtcctttccttttcattatctgatgaaaatatatcttatayttcggaaagctttcctttgtaatgataacactatttaaatgtttaaggctttatggtattaacatttttcacatggcttattgagtggacttaaattcaaatattagcttataaattagtgaaaaaaaccttgaaaatttgtccttttattatatgcattgaaacattgcttccatttattaaatgggacattaagcgctatgtcagtagatggatatgtggtcacggcttaagcaaggcaccagcatacctaacgtacaacagcaataaagttttttttgttttgttttttgttttttttttaagacatctctctctgttgcccaggctggagtgcaatggtggaatcttagctcactgcaacctctgcctcctgggttcaagcgattcttgtgcctcagcctcctgagtagctragattacagatatgcaccaccacacccagctaattttttggtgttttttttttttttttagtagagacaaggtttcatcatgtcggtcaggctgggctcgaactcctggcctcaagtgatctgccagcctcagcctcccaaagtgttgggattacaggcgtgagccactgcaccaggctagcaataatgtcttcactaagatttccttctttcctgaaaagcttaaatattattaatatgctttatgtcataaatttcaattattcatagaatttcatggccttctaatcaactaaaatggaaaatccttttcaagtatgtgctgctttaaaaatatatttttgtcaggggagatgtccttagttttgtccaacttttttattttgaacagtttcaaacctacagaaatgttggaataagaatgcagtgaatacccacacacccttcacttagaccaaactttgtatgtaaagagccagatagtaaatattttaggatttgmagacatgtgatttctgtcaccactactcagctctgctaatgtagtaagaaagcagccatatgtataaaggaatgggcagggctgtgttccagtaaaactacatgaaccacagtttgttgaccccaatccagactgagcaattgctaacattttgcaatatttgctctctcaccatatatgttatgtatttgagatttttctgtaccatttgaaacactctgtgatacttcatgacacatcataagacttcatgatgcttcactcctgatatttcagtatgcatctcttaagaacactctcttaatattaaggcaaatagataataatggtactaggcaggtttccagtggaccaacagaagcagtagaatgtacctattaagagattgtttgcaaggaatcaacctgtgcaattgattgtaggggccagctcggcaagtctgaaatctgcagggcaggctgtccagaaagggagcctggaattcttgggcatgggttaaagttacagtctacaggtggaattcttcaggaaaacctcagttccattcctgatgcctttcagatagaatctagcccatccacattgtctaggataatctcctttacttaaaatcaactgatgatagatattaatcacacctacargataccttcacagcatcacaacattagtgtttgaataactggagacactatcctagccaaattgacacctaaatccccaaaagtccccaaaatagctgttttctccccaatttataatcaaatcaagaacactgcattgtatttacttgtcgtttagcttaaatgttttttcatgatgattagagaaaaatgatactttcctaaacattctgataaagagatccatctagattcttttcagaaacaggaattcctaaccctggcttaaatgattataggatgtgtcctgttatttttaaagatgttatgaaatattctcaagcattaatttaacaaatggaacagttatcgattaggatggagaatagtaacacaaaatttttgttttaagaattgtaccactaaaccttacacggtggtactgatttctttttcacacataaaatgcaatatcaaaaacatatcactgcatacatgaatcgtaatgttcactcatgtcatgattaagaaataaatttgaataataaattagtaatcagtaaattcaccaagttttagttttaagtatactttaaaaaatgattagcttacatgccttcctgagaactgttattttcttcaaagcacatttatggagaaggaaaagaaaactgatataattcatatgtacttaaaaagcataattactttatatgttgccagtagggataaaaataattataatgatagctacatttattgaggtctttgggccaggttcagtgctaattgctttatataatttatcgcaatctgtacagaaactctcttgagaagataaagtctttatcccarttttacaaatgaggaatctgggccttagagaggccaagccacttgcccaagggcacagagctagtaagtatagagccagaattaatgtctacaatgaaatggattgctttagctattacagtactgtttagctattacaatgttgaaatgattttaactaattatagggatttccattaaaataaactctgcatatattaaagatggtatgaagagtatgaagtaatggaaagtacaaaggatttagatttttaaatttagctttttggtgttaagtacttacagtactcacactaggctacttaagatgctggaaacctctttaactgcaagtcagctgtatctgttacttaacctttcaaatgtttgtatataaatgagtgttgcccacagccctgaaaacttgattttcttaaagggatttgtctccccagattcttgtttatacttcagttgtgaatctttggttcaagaaatagattcattatgatatgaccacagggatctgatttcttggtgtttgactcctcaaacccacccggaggctccctattgctgttcattctaggaaggctttatagacaaggctggagcttaggtgccagtagtttgagggcrgacatcatcacaaatgtctgtattctgggagactgaggagttaacagagatgttgtttataaaagtttagcaggatttaatggcaactgacatgaaagctttctctacacccttaggtacaaatattacagatcttttagggatgctaggccaaaaattgtgtttcttacaaagtcttatgagaagagcaaaggataactttgtttatagttcagacattggaaaaatctttgggaaaaataatgcatattgtctcatggggtgttttgtctaagtcaatagatgtgttccatgcttaagtctctggagttctcttttttttcytatttagtcctcttcttaaggttatattttcattgtcacttggtcaatggggggagcatttaaactgtgctttggaataatcccttgacctggatttttttcccccttattttccagtgatcctgagcagctgaagaaggaactgaatgaactggtcagtgctattgaagaacattttttccagccacagaagtacaatctgcagccaaaagcagactaaaatartccagccttgggtatacttgcatttacctacaattaagctgggtttaacttgttaagcaatatttttaagggccaaatgattcaaaacatcacaggtatttatgtgttttacaaagacctacattcctcattgtttcatgtttgacytttaaggtgaaaaaagaaaatggccaaacccaacaaactaacattcctactaaaaagttgagcttggacatattttgaatttttgtaagtgaagatttttaaactgactaacttaaaaaaatagattgtaattgatgtgccttaatttgcataaatcataaatgtatgtcytctctgtaattgttttaatgtgtgcttgaaatatccagaaaacctatggagttagtaaattctgggctgtcatatgtaggatagccactttttaggtatatgtacatttatatttctatcaattccttagaaagtaaaataaatgaatagatcaaatgttgtgttcatgtttggggaaaatataatttgcagaaacctatgaagtagagcaaagatgctttaaaaagataagtttttttgaactaaattttttttagttctaataatgcacataggatattagtacatcgtacacgtgctaggaaaaaacagcttcagtgtctttgtttaatgtgttgaaactcatctttttaaatcttgaaaaaccaattgtttacttgaaacttgaaagtagcatatttttctgttttttggttgtttgttcatttgtattagcacaatttaatgtaattcctggtttggaggcagcaagacctatgagcaagaactatttacttgaccctcgtttttttctcttgttcttgtgtggtctgaaatctaaaactagactttattatgatagatttcctataagccaatttctaataacaaatagatttattatttaatctgtaccttctatcttctcataattcgtggtcttacagccttccaaaataactccagttgggcacccatgagctaggatcaaactttctttatatactttatatattttacattatttctgatttttaaagcaaatgattgccattatgattacactcaacctaaatagttatgaacagtttcagaacaatgaaaaattacaatactatgtgatagtattgtaactatttttctattttagtcatatgtcgcttatatcctaccagaactcttaaatctataatattcgatatattctacaaactgctttattgtagaagccatatttatgtttattttataatgttttctagtgtcaaactgtactgtggagaaaagaaatgttagatctgtgttctgtctgcattttttttgagtacatacccttcaccctctcatggagtttgtttctggaaatacgaagttgattatgacccaatcctgctatgatggaactcagtctgattggagggctaataagtaacagcaatacttacaaattctatcatagtgttttttacaagtattcagcgttcagaaatctgagggagggattcatgctgcccaaagaaagcctcatagatgaggtgctgaatgaaatgcttcacccttagggatgaggagcagctgaagatgggaaagaaagccttccaagcagagagcacagcacggacaaaaatgtggaggctgtagcaagtgggggtaggggaagcaaggggagatgacgaaaacagaagccaagatggaaactttagaatgcatcccacctctctaccactcacatgagcggatgatttcactggacctagaggggatgcgcccgaactctatttgtcgcccgtatttctaagaaatagctcatcctggctgttcattaggtatttctcaacttcttcctgttatggaatgtagggtagcccacctgctgcataaagctggcaacaataaggccactgggttttaatcttggcctactgtgaaccagctctgtgaccttggtcacctctcagagtctcaattttggtcatgttttaaaaagactttttaaagggcggttttaatttcaaaacaaaattgagaggagtgtacagagaaattccataagccccacctgcccccacacatacgttgcctccctttatgtcaacaacccccaccagggtgatacatttggtataattgattaacctacacacatcattatcacttaaactatggagacaggaaaaagatcagggattaggagggagggatgaataggcaaagcacagaggatttttagggcaataaaaataccctgataccataatgatggatacatgtcattatacatttgtccaaacccatagaatgtgcaacaccaagagtgaaccctaaagtaaactgtagactttgggtgataatattgtcatttttaaaatgaagatattggctaggtatggtggctcacacctgtaatcccagccttttgggaggctgagatgggaggatcacttgaacccaggagttcaataacagcctgggcaacatagtgagaccccatctctacaaaaagtcaaaaaattagctgggtatggtggtgtgttcctgtggtcccagctatttgggaggctgaggtgggaggatcacttgagcctgggaggtcaaggctcagtgagccatgatgcgccactgtactccggcctgggtgacagagtgagatcctgtctcaaaaaaataagatattttactaaatggtctttgaggtcatttcatcctacaggtctctacattatatgaaaatccataaagggcaattatagtaataataaatcattgggaattctctttggcagaattcttaggtcaccctctttttgttgttgttgttgttggatggagtttgagtcttgcagcccaggctggagtgcaatggcaacatctaggctcactgcaacctccaccttccgcatttaagcgattctcttgaactataggcatgcaccaccatgcccagctaattgtttgggtttttggtagaggcagggttttaccatgttgcccagactggtctcgaactcttgacctcaggtgatccgcccacctcagcctcccgaagtgctaggattacaggtgtgaaccactgtgcccggccaggtcaccctcttttaagatctaacatctcaggtgggaaaaatactttgtacgaaagaaggcaggcttgtgttcctatcttgctttgccttgaagcctgaaggggatgaatggggacaagcaagacagaagcacatggcatgcagatgctgggaaaatgctttgcaggggcgtgagccgtggtcactggcctgtgatcgggactgagagctgtcacagcagcccactctgccttctaattgctgaacttaatttgaggaagcctgttgatttgagtgtagaaggggcagcccattttctctcaatgccttggaaagaacaggccccgagttaagtgtaggagacagacttgcaggaggaaataactatttttacttttcctctttgtggtctctgaaatagcagctgttcctctttccattggggaacattgggagtacttctcatttatatctcattgattttcctcaatcatgatgctagtaagagaaagtattgctatttcagtgacattggaatcccatgtggttttaaaaacaaatgctttaagtgatggaatgaatatgtgtgtcctgttttgaagagatttttgaaaggatggcctgcatctcagtcgtatttatgatttctgcatcctaaaagactgtatcttcaaagctatttgtgcattcatttaggtgtttattgattgggtcatgttggacaccctgtgaggagccaggcatttttctggcaataaacatgcagtcctgatctaaaatatggcctagcaaaagaaatacacgtgtacacagataattctaatatagtatgctgcattgaaatagtcaagtatttgaactatgggcaagcagttctgccatgtccccttctgtgcttgtctattttaagactactaagttcaaattcctaacctttgtgtttaaaaccacatggctctgggaggctatttgcgtgtcattcccctgggttatccgtttgttccattcttgctacaagcatatttgtgtagagtaactcaaccattgaaagcaagatgtgcactcttaggcagataacaatcaaagtttaaaataacatcacttcttctatagacttctccatgcacacaaagcatagtgactactcaaattaattggaggagaaagaatactggagaggcaaggccctccaacaccatggtgctcatgctcaaggtaatcaggatggagaacagtattggagaatctggtgttttcccacctggctcccttgtgtggattcttgttgagaagcagagctgtcagccacctcctgcttgagtccagtgaaggccactttagtgtttggcccaaacccggtgcggaatgaagttgggcacacagaccaaagagccagcttcaggtctaaacagcttttgaaaccatttcaaaatagcattgcacaacttccaaagggaagttagggttgcaagttacagagatgacagagcctgattatctccttaaaatacattgttctgaactatttcaccttaactggaaaaagacagtttttttgtttttgtttttgttttttgagacggagtctcactctgtcgcccaggctggagtgcagtggcaccatctcggctcgctgccagttccgcctcccaggttcacgccattctcctgcctcagcctcccaagtaactgggactacaggcacccaccaccacgcccggctaatttttgtatttttggtagagatggggtttcaccatgttagccaggatggtctcgatctcctgacctcgtgatccacccgcctcggcctcctaaagtcctaggattacaggcgtgagccaccgagttttttaaagtctctaggtggcaagagtgaaatggagctccatttctgagaggtgtttattggttttctaaaacaaaagtaaaatgtaggtaggagcttgggctaattatctcctttatgagctcaacaggctttcttttttttcctttcctagttggttcattccctgtggtgcaacggtatctctgccccctgaacgcttctttatgtttgtggctttcattatcctaagtgcagagctacaaacgtctctcccaagctccatcttcatatcgccatttccctacttggactttcccactcggaagtcctcaaattgctttaaatgtagtctggcctcaagttaggttttcccactcagttccccacctccctatcctgcaatctactctgttcgttgacacttcaaaacacctgcccaggacctttggtgatttttcacttgtctttttcttctgagaatgtattcttgcttatcctttttatggagaatgtcaaacttatacaatcaatagtacaatggacaccaaagtagccatcacccagctctagcgaaactcaattcatgaccaatctagtttcatctgtatattccttgctccccatctttccactgggcaattctggagcaaatcccrggcctgtcatcatatctgtaagtatttcagtatttatatcagtaaatatttcagtatatataaaagattgggacttgtttacacacactgatagaggcgagaggcaggcaaatgcctaggcagataggggcaggttcccagtgaaacccaaccttcaagctggaaactgtcccaggtaaatcctcagaatggattgagaacccgccttcccatttgatgtgctttcctctgattggtccctatctttcacctattttacatatacctactttttcccctacactgttgtgcccacctttgagtagagtcttcgctttgatcttttttgcatactcacaaaccaatcagcacacgctctgtattctgggcccataagaaagccctgggctcagctatattgggggaaactttcctgtcttcagataggagaaccaccccccacatcccctctttttcctgagagctttccttttgcttaatacattctactccactcactcttcgatgtctgcgtgcctaattcttcctgatggtgagacaagaacccagatgtagctgagtgaagaagcaaaaatcctgcatcaacacaaccgtactaccattgtcactcctaaaaacgttgaccattccttaatatcatcagttattcagtcagtgtacaaatttccccatttgtctcatacgttttgtttacacttcgcttgaatcaggattcaaataacatccactcattgcatttgatggacagcctctgaaatctctttcagtctaaacattcttcatctctttaatttttcttgtaatttattccaaactaccaaatcatttgtccttcggagtttcctgcattttggattttctggttgtctcctcatgatgtgtttaacatgtttctattgtgccctggatttcctgtgaactagtacaactaaatcaagaagcatgatctgattcaggtttgatttttggtttttttttttttggcaaaaatacttgatgggagcagaggagggtggcactcctaccatctagttgttttcaaagtgccaaggatcagttatcaatggccaatgtgccctcttctgctttgccctacataatgaaagggcaatcaggtcaatggcaatgggaatcagttaaaaaggaaacatgaatcgatgtgtcctgtgtcactcacacagaatactgtcagactgatggaggcaggtctccctcagaagcaggcagaaagggctgatgagctatttgaggcaggcttggtaatttacgtcaagcttgatgaacgagtactgaatgctctcatatagctctgtggggcttcaatggttcaaagaaagtgatttgtcacaccttaggctcttagagatttcttttcgctgattatttgttctaggacaaaatacatttctgtgtcaggtgagatcagcaaacaaaggaagaaatgtgagcaagttgtgagaatccacaaagagatctgatgaaggctttggttgagtggatcagctgtgtgttggatgcaaccacaggtcagaggaaacagggcaatattccttcagatggtgtgtaactctggtgtgctgcctggaacgggaaccattacttttgttgataagacaccaggagatttaactgagggtgagtttgtgctgcttttgaggatggacttgcttgagatctatattgtatgactagtccaaacagaaagtatgcatttaggatcttctgtgaaaggacactgcactgtgtgatggccat

SEQ ID NO: 95820 - DNA, 149000 bp, Homo sapiens
  misc_feature (1)...(149000): n = A,T,C or G
ttcttatcaccatgacactaaagaaaaaggtcattctcaggtcatcaaatgccactctcttgaaatctttatttattcaagaagctctgtaaattaagacagagcaagaactgggcaatgtttaaaaacctaattataaaaccattattactttagatagaggactgcagaccagagtgcaatgtcacccaaaatagaaacgtctttaaagaattgcaaaggaagaggccaggcatggtggctcatgcctgtgatcccagcattttgggaggctgaggcaggcagatcacttgagctcaggagttctagaccagcctggccaacatggtgaaaccccatctctactaaaaatacaaaaaaaaaagcaaaaaaaagccaagtgtggtggcacaccctataatcccagctactagggaggctgaggcatgagaatcacttgaacccaggaggcagatgttgcagtgagccgggatcatgccattgcactccagcctgggcaacacagcaagactccatcccccaaaaaaataaataaataaataaaagaattgcaaaggatgaagccacagagctctgctaacatgcaccatgctgatcactccattggaggctccaaactctaagaggctcaggcttgcctcctctttagctaataggaaatgaagaggcctcaagaaactgctgggcttccttgggcatggaaatgaccaaagatgctatgaatggatctattgactgctcagatgcatggctggagtcaagcacatgacagtcaggtctggcagccctgggagccattctgtctctctaaggcagaggctttacccattttttgacaacacatcttatccccaatatctatttatttgyttataaataatatagcactagtatattccgtagtaccacctgcaaattatatagtacttatatgctataaacattatacgtgcacaaacatgaactgtctaaggaaatacaaagaaaaatctgaaaggtctatattattttcttcttttgccccagaagatctctcaagcaccattctgaggcaatggttctcaaactttgtgtaaccaagaattacttggagatcttgcttaaaatgaaggttcactgggccttgaccctagtgttgattccattactcagtattcctgggatgggcccataagttgtcattgtctgagctccccagctgactcttattctcatgctcaattggattttgcagccactgatccagacccttgtgttttcctgccccttacattttttgctacaattatatcactgtggtcttattgttatctacctcctggacaccttcgtgatcccctcagtgaatttaaacattaaaaaaaattagctaccattaattatttcctgtggcctaggattgctgagggcttcacatgcattgcctcacttaatcagactagggaggtattattagtcccattatacaggtgaagaaaactaaagctcagtcacaatgtcttatccaagttcactcagctagtaagcacaagtgacagactaggaattcaagcctgtatctgtcggattcccaaggctggactctttttttttttttcttttagagatagggtctcactctgtcacccaggctggagtgcagtggtgtgatcatagctcactgcagcctccacctcctgggttcaagtaatatccctgcctcagcctcccaagtacctaggactacaggtgtgtgccaccataccaggctaattttttggtttttatgtttatatagatggggtcttgctatgttacccaagctagtcgcaaactcctggcctcaagtgatcctcctgcctcagcctcccaaagcactgggattacaagtgtgagccactgcccactgcacccagcctcaaagcatggacccttgaccactaagtatattgcccacaaaataggtcattataatttattgaccctctactatgaaccaggcacttggcttgacaccttacacacaaatctctaatattcatggcatacctcttttcctagaggtattaatttcagtccagagattctgatgtgcaataaatttctctattctctgtaacccatctaaattcctgactcttaacccctattttcaggccttctggatttcttctccccaccccacccccaaccccagtagttatgccatagttctggacaaatacaatagccaggcatggggtcagggrartgtgacctagtcctctgtcatcagtccacattggtggccactgaggggcccatcctcccatcaacatgacctgctggccccagagactcactgctctcccaccctacatcaagccaggtatatcttttgcccatgtgccaacacagccatttcctccctgggttcttctcttccagcaggatttctgggaagcaaggtactgtcccctctgctctcagacccatagacaaacctcccccttccacaccacctgcaaagcccaagagaatgtctttctagtgatggcaaggtgaggggttccttctcccttcacatcccctcaagaaatgttagtcttttgcttttctttgttggctagaattcacctgcccacactttgggaggccaaggcaggaggatcacttgagcccaggagtttatggccagcctgggcaacataggaagaccctgtctctaaaataaataaaataaaataatataaaataaaataaaattcacttgccctaaggtcctatatttttggaagacaaaagatttgtagccttctctctactttgcccctcttaagtggaagggagacagtttgggagaaaaataagttgatatctcaaaatattatctcagatacatgttgtccccattttataggtgaggagattgaactcattaaggttatataatattatatacagcaagtagataggcctaggacccccccagttcaggaaatctcatactctgtgaagtcctcccctcttccctgccagtagcctccctggtcagcttcaagaaaacacaacagagcttgtgcattaaaaccaccactggaaggtcagacccggtgatggggcaggctggaagagcttaggtagaggtgaaagcagacaacaccctgaaaggggacaggtacccactcctccttgtcattttccaggagagccttatagaatttgagttggcatgagatgatgttagaggaatttggggtggtgcaagtaaaggaactacaagagctagaaacaatcttgaaggcttcttcccatgttgaaagtgttcttaccacgtagaaagtggtaagaaagtgtactctgcagaaatttggggggcgggtgggggcacacggttggtatttcagaggcacttggattcactggtgtcttttgatgagtttgtgtcccgaataaaatggggagtggcggtggttactggcagtacccagaggagaggagatgagggtgggcacaggggagaggagcccgagatgggtagccagctggtcttacgtgccagctttataggaaaaaaagtggaactttcagattctgcttaactgtgcaggagccagccaagtatccaaggcagaagtccttgctcagaaattgtatatctgatgggcacggtgactcacgcctgtaatcccagcactttgggaggccgaggtgggtggatcacaaggtcaggagttagagaccagcctgaccaacatggtaaaaccccgtctctactaaaaatacaaaaattagccaggcatggtggtgggcacctgtagtcccacctactctgaaggctgaagcactagaatcgcttgaacctgggaggtggaagttgcagtgaaccgagatcgcgccactgcactccagcctgggcgacagagcaagattccatctcaaaaaaaaaaaagaaaaagaaaaagaaattgtatatctgacgggatggtccgcaagcttcggggcttgggaggaaggtacagtcataggacagaacacagctttagactgggtcaagatcgtccaagtctggtggtggcttcagaaggccctttgaatgaggctcgtccaggcaataattaccatgttatctaattttgcccacttaacgtttccacttggatgtctaagagccatctcaaagccccacgtggccaaggctgaatctctaatcttcccccaacagacctgcttcactcacagcttccccttctcagctgacagcaaccccattaatctgcttgttcaagccaaaaaacctggaagtcatccttaactcctctctttctcccacatctcacaactcagcagtcagaaaatcctgtgggctctaccttcaaaatatatccaccacccatccaccactccgcagttgccctttaccatgctgggccacgccaccatcacctctcactgggccactgtaatagccttctaacagatctccccactgcaccctggctcacttgcaaaccagagtgatattttaaaactataatacaaatcatatcacccttctgctcagagtcgccccccatgtgtcaatgcataaaagtcaaagtccttacaatgtctccccattcattggcctccttgctattcctggagcacaccaggcatactcctacctcagggcctttgcacagactgcccgaagctctcctccccaagacgtccacaggggcaactccttcacttccttcaaacctttgctgaaagtttaacttcccaatgcaattcactctaaccactctgcttaaaatccctaccttctccccaaccccctgcttttcttgtagtggttcccattacattctaccagtctacctaatttttttttttttttttttgagacggagtctctctgtgtcgcccaggctggagtacaatggcgcgatctcagttcactgcaacctccgcctcccaggttcaagcgattctcctgcctcagcttcctgagtagctgggattacaggcactcacctccacgcccagctaacttttgtatttttagtacagatggggtttcaccatgttggtcaggctggtctcgaactcctgacctcgtgatccgccctcctcgcctcccaaagtgctgtgattacaggagtgagccaccgctcctggccagaaatctcttctttattatgtctactgtccgttatccaactccagaaggtaagaacctccactgatacataaggacttgtataccccacgtgcctgcaacagtgcttggcacctagtaggcataccaaaatatataaatgttgaacaaatgaagaaagttaaagtaaaactagaggtccaaaaatatcacaaaagccatctatggtcgccttttccctacctgattttgctgagtggccttacttttcagtcctctacacagctggaacattaatgaacacagagggggaagaagtgtgtttactctaggatcacctctcaatgggtcacttggcaagggcatctttgcttcttcgtcagctccttttgacacgggggtgaagggttttctgcaccacactttgaccacaagcatcaccaatttcactgaacccaacagaaatttggaccctctgggggctctctgcgtggcagggcccttttctttttctttgggcttaggctgcaatttgaaacaccactttcctgagccagcatcccccttgcagcgctgtcacagggaggcttaggcagccacgtggaagccacctaccccgacctttggcagaatttccaaacacaacacagtagctttaagttgattaatttggaactctgaccttggccccaaaaggtaagaatacataacaaggtattttattctcaaaatgtgtcaggataagaagcacttctgtaaatcgacctttttaaaatagatataattagatttgcagttgggggcagtaaagaaagggtctgaacagtggataacatgttgagaggttaattattaatgggcagtcttccctaacaaagtatctaataggcattgtggtctctttggcttcagaaattaccaagaaagcctggaccccgggtgaaacggagaaatggacacaagtcccctgtgtttctccattctgttggttttatgcatctttatccaatcaagtgcccttggacaaagcctgaaaccaggtaagagcctgacttttctccagagatgggcatgaacttttctttttaaaaygtgtgtcacaargaatccaggggtttctgactgtatgggacagagcttgcttcagagcgtgccaggtggttctatacacgacctcacaggttcacagggacacgtagccgtttgtaaacagaaatgaaattttagaaaatcatcctcggattaaaagtcttctaagagtgcctgcagctagcagtgaagtctcttgcgtatctgatatggaaacagtcatgctaaaagttattcagcrgcaaatgatatgaaagcgattcagatcttcctgagagttaatgtggcatctaatttgcaaccggggagccaggcttgcaatgaaatgctctgtcggrttggggttgtctaattgcctgcctctctcagaagagaggggaatttatgagagttctatttccagtcaggtctaaagtagagatawcattgcacaatttctagactttgttttgctgccaaaattttagtctgagrctgaagaatccaacagccgtcctgcctgttttgtttgtaaattcacaaactagattgatggcgaaagacagatcaaatgccttatcaggaaggtagtagagtggagcccagcttccaggctaagcagtggaccaataaatgacggatcagttaattgaacaatttggccagactagacaggtgtttgggaatttgttttggtactggttactggtcaggagctagtaacgctaaggtagagtctgagatttttcttttctctaagactagccttggagagagctccgacaactttgagaattagaaattccctaacgggatgtacctaaaaatttcagaagcttttttcccctttaagaaaaaggctgttcctttgtatttgactattttacttcataggccagttaataactgagtagcagtattaattattgccattcactaagtattttctgtgccaagcactatactaattatttttgacacatcatctcatttataaagccacatccaaaaatgacccttacataataatttagagccatacaggtaaaattgctggtaatctttattcccttggttcatagtgattttgctaaagggcctttcctgccctttgccccggaatgttgtatttgtttgtttactttttaatgaagtttataacacacttctagaaaagggcctctatcataaatcctcaatgagttctcacaaactgaaccagtaccccaaagccttccttgtgtgccccttgagccttaacatatatgattttttcctttggggagatttttcattaatagaaacacatcagttgctcttttgcgtctggcttctttcgttcgacattatgtttgtgaaagtcaaccatgcagtttcgtggagttgaggctcattcattctcactgctgtagcattccactgcgggaccatgccacacttcctttatccattctactgtggattggccaggactgtttttgcaatggagccrtgggaattggaagctgtcagtgctgagatagaggttgaagggagggatggcctcccccaggcttctgggtattgtccagattttccttgagcaatctcattgtcctgatcagcctgcttctttccccggggcctagtttgtgcaaatgctgagagaagtggccactattagcaagagggttcctcagaaaagaggatccaagtcaggaggcctcttgttctcttggaagcagaatctcttggcagaattctttctgcaatgagtgagcccaatctgtgtgcatgtggctggtatgatgtctttctggggaaaccgcagggaagccggtgtcctgtggtggagcccttgtcaggaaagtttctacaccaatggttctcaacaggggcaattttgccctccaggggacacttggcaatgtctggagacatttttggtttttggttgttaagaccagggagagagtgcttcccttccagcatctagtgggtagaggccagggaagctgcttcacatcctacaatgcacaggacagccctcacaacaatgaattgtctggcccaaaacattattagtgcagaggctgagaaaccatgatctatgccaagcttcaactgtcactcatcgagcaccaggaagtactccctcaaggacccttcctctttagcccctcctcccagcctacttcttttgagtatttattattaatgacatcttactaatggagtcactaatgtgctgcacacccagcatgtgccaggcactccacggacattttatctcatcctcaccatatggttgagtaagctggcagttaagtgccttgccggcggtcgcatagctggtcagggcagagcagggagaggtacctgcagcctcaatctgtctactgaggccgcagtgctctstgtcgagcccacacccagtgatttgacagccagaggtttctagaaaaacattctgctcagttcctctcacagagagggagatttagacagttgttcctgcccttcagcactaagggggactggatagcgtgagctgcttgaagcccacatggcacatcacacttatgcccagccccaatgcctgagacccaggttccccagtcggtgttgccatgagagccaacgctgctcctagaccctggcaagtcccaccttcccggtactgggcccactatcaacaggcaccttctccctcccctccaccccagcctcagcttgcaaatcctaggagcagctgaaagctacctattcagtcagtccctcatgagtgtcacaagcatacatgagcacctgccatacgtaacgcagtgcctgagtacaactcacacactctgttcacacgtttcctctcttaaaaatcactgaggaccccaaacagtgtttattatgtgagatatcaatatttccttcattagaaattaaaactgagaaatcyttaaaatctgctaacactttttaaaatgataataaacccttgcatrttaacacatataatgtaattttatgaaaaataacttgtattttccaaataagttttaaatggagaagagtgacattgttttacaaagaaatgttgcaaatctctctaatatctggcttcccaagacagctggattatcttacctgtttctgtactcagtctgttgtgatgtattgytttgtttgaaatgtaggaagaaaatctggcctcccatagaggaaaagggaggacatcctaaggcgatctccctggggccttggcctgcaaaccactgcgcttgtgcagtgggcactgtacaacagggggctgcacagccgtccccaccttgcaggaatttacagtcaaatggggtgggagtggggtggggagggaatagggggccatgggactgggtggaggggggatgtgccatcaataaaagagcaaccgtctgtggagaatttaaatacaaatataaccaaaagctgatctgcctgtcattatcacaattataaagaatgtcagccgggcgccgtggctcacgcctgtaatcccagcactttgggaggccgaggtgggtggatcacctgaggttaggagttcaaaaccagcctggccaacatggtaaaatgccatctctactaaaaatacaaaacattagccaggcttggtcatgggcacctgtaatcccagctacttggtacgctgaggcaggagaattgcttgaacccgggaggcagaggttgcaatgagccgagatggcgccgtcgcactccatcctgggcaacaaagtgaaactccatcccaaaagaaagagtatcagcgataaaggcaaagctctttccagaaaaaaatggttttatggcctaagttctaaacaatctccgtggttactgttggattttatgtagtaagtatatgtaagcttcaaattcatcacatctttattatttatcctttcataaatattgtgttctacattgacattaatctggagaactcccggttatgcacttggccccaacatgcacagactcaggggcgtgttcttgttgcaagagtaagtgtgcgatggttcagatcctttgacgtccttatgtctccaacctcagtggcacttattacctgcttctgcatgtaaacagtagatttgaaacaaaaaatgatagcgtagtggttgtacaaacaaaaaaccagaacttgaattatttcaattctctcatcctaggtgacccctgtaagcttctcatatgtgtttaaaatttaaagcaacaaaacagattgtgaacaatgagttgtaacatcttgtttgataggtaaaaatttggactcatacgaaaaatatttttactgcatttgaatatcttaaagttaaaatgtatttgtctttttaaaaattgttcactgctttataactaaagaagaaatcgagaaagtagtgatgattgctgatttttacataaatatgactgaaaatacttttgtcttatagagcagagggtcattaaaatgatccgttctgtgtgtcaaatacatgaggtataccactgagtcacatatgtaaatgttatcagctagaacagaacatggcatgagatgaggaccatgagagaggaatgagtagagaagcagattttacttccaagtggagggaagaaggcttcttggaggaggcggcatttgagtagggtgttgaaggatggtatccggacagaagagaatgaggctttccttgtacaatagcagaggtacacagctgataaagtacatgtgcttttcaagcccaaatacctttcaaaaaagaccatctaggaagaaaaagaaaaaatatcccatagaacggtgttgatagcaacacttgttaaactgcaacaaactggaaacaatgtgaatgcccaagtgcaaaccactgaagttggggactccagctactgctaagtccaacttcgaacaggcatggttttgaatacctactactagaagtcacagaaacttttgggggcaataatgatgaagttcagaaacaaaagcctattgctggcccctaagcactcacagtttaacaccagggatcttagyacagaggatgggtttccaagagtcgttgagcctcctgagatggtgcccaaggctgtgtgtgtgtgcattttgagtggggagcaggtgtcataactttcagcaaattatcaaagggacctgtgacctctgaaaaagctcagtaacaactggtcttgcagctttgtaaaacaagtataagaaaattgtatatgcaataatgtagggaaaaaaaaacaggactaaataatctacatgttgaatcataattatgaaaacactgtagacacatgctgtatattgctagagattctaagtatatttaaagatatataaagggttttaaggtttggaggatttaagtacttaaatgtacaagaaaaataaaataaaaaggccctgatcagctacagttagattggtcatcccaagacgacccccgggaaagggattttccactgtccttccgacctgccaccagcacccaactttgcaggttcagccacactcaaaatcactaccccagcagggtctgtcagatttctgagaggcctccacagttacatggaatgtcacccatgactaatatttgagatagagtccggagatgaaactcattcttccaagagtgcgtactattctggaatcagcagagggccagcccccagcattccagggaaattctatctttcccatgcaagagaccctcccatccatggccatccttcctagccctacagctgagcaggtctgtggtcctgctgaaaggtccaccctggagagacgggggacagcagcctgtcctccactctgcttgcctctcacagagacccaggactggaacccatattctttcattctgagctggagagagaaactgcagggctgacggttgaaggcatggggtctgtaagctgacccgaaaacatgaatcgccaaatgagtgcgcagccaaaagccaagagaatctggtacctggctacccacgatggccctctccctgccctcctctccacatcagctgccacagtgctgcgggcatgctgggtcatcacagttggcacagcagggagagaggcagaaagaggctgggccccgagacagggcagaacagtccccatttcatcatgaggggaatgyaaccacccaggcctcagcctgggtgtccctgacagccacgggctccacgtagaacagaggtcacagcgattctcacagccaggaaggtactgtgcgctggcccccaggacagtgaccagtttcgagtggggcgctctcagctgggaaatggggtccaacccaccagggaaaagggctgactaggggccaataggaccctccagatccctgcccagcaggctggacttcagtcccaaggtgataactagaacaagggggccgagcctagtctgtccagcagcgggtggaggagccgcggtaagaaaggcagtcgggtcttacattcaggtacctacttggggcgagaagaccaaatccagtcactccagccctggaggagtcagggcgcccrcccggctgccccacagaaggtgcaattcctaaacatggtcacaaagtagcgcagtgacatctcagctgcttcggagttccaggagagggtttctggctcaggagaatggagtttctgggtgactggaagatgaggctgttggctaacttccctttccttcccacttaggggtctatttccagaagcattcctcatttcattttttccccagtggggcttggctaggggtggggaggcatggggaaaaagtgaagagaagagaasgaaatgcatggaatgcaagcggaggcctctttgtctacagcgttttcacctccacttgtgcaggttcatattcagggcctggtgaagtcagttctggcacggctctccagtggactggcagtggcccttaaaaatagttctcaggaagatgtgtaggtggcgacgctgagtagtgtttatgtcccaacatgaagagcaggcctcattgtgtgtgtcctgtgattacaactgtgtgaaaatacatgtgtttgagaaaaaatgctggaagaagatgcatgaaaatgtttatacgtccgttgagyttgtatctgaacttttgtctcttcccctctttatgtaatgttatagtatgtatatggtatattgactttcatgatttaaataatcagaaaataaatttactacgaaatgatraaataaaggagtttgactagatcagtgatcctggaactgtagtgggtaatgaagcacctaaaaggctgctttttttgtttgtttgtttttcctgagacggagtcttgctctgtcgcccaggctggagtgcagtggcacartcttggctcgcagcaacctctgcctcccgggttcaagcagttctcctgcctcagcctcctgagtagccgcgattacagacacacaacaccacgcccagctattttttgtacttttagtagagatggggtttcaccatgttggccaggctggtctcgaactcttgacttcgtgatctgcccgcctcagcctcccaaagtgctgggattacaggcgtgagccaccgcccccggccagggcttattaaaataagattctggggccctaactacagagttgctgattcagtgagcctggggtagacttggatatttacgtttctcagcagttcccaaatgatgctgctggtgtggggaccacagagaaccactagagaaaaaacaaaagaaccaagacttgaaactaggttactgacttccaggctagggtgcttcctacagaaacaacacgaggctacagggcaaacctcacttcacttctaactttctagggttgaaggggtgagaatcaacatccactgctcctggatactgacttcttccccagtagctacaaccccaaaagtatttaaaaccccaagatatttgtgaaaatgtatttgtccaaaataaaatatctacatgctaaaaagaaagcagtccttgaaatgaacaaaaattcccaagctgagcattacttgtaattggtagaaaaataatcattgcaaaagctaattaaccatccaccctgagcggctccttggcaggcctgaaaatatgatcargaaaattcttttcctatgagtgaggcattatcaaagcagggcagagcctatgggttatccgttgactaggactgacctttccgtgactgccaaaaactttccagtgacaaatgttccagcttccttgtcccaagagaaactaaagtggtaagaaaacaaactgctttatactgaaacataacaagatcaacagcagctgtgacagcatttattaaactgtccgctgtgtaccaggccccatggtcagtaggaaagtatatccctgagggtacaaaaatgaaaaagcgtacatccactcaccaaggacttcccactgtgccagggtctctagccccttatggggtgtgtgtgggggcagggaggttggagattgggagaggcgcataatttcaacacaatgcaattagtttgtaaataacactacatgcaaaatgttacaagagccctgaggcagcgcaggttagctgagaagcctttacagaggaggtgatatctgagttgaatcttgaagtttccttcaagaagtggaaggacattgtaagcagagggaaaaaaaacatgaaccagccttgcttgactcagaggctggaaaagggagagtgaagttgggaattcttgagattttggggtggccctggatggggtacataaaaagaagtggccagagggaaggacaggaagggccatcctcagaagttttgtccycatcctggaggcagggcagaccactgatgaggggggttgtttttaaaaggctgcctttcccagatggattgatagacttatctcagcctggctaaaaccctggccactccctgatagagaacaaggttcccagcaggcaagggcaggggtggggcccagcagggaccagttttgcaagctcacctggccctacacccgcaaacactcagcttttcctccaagacaagcctcaaggcttggagcaagtctctttgaagttttcttatgaattgctatgcttaacactaaatcatgggaaagattaacacccatgaaactgaagcaggagcacataacagragcttaatatgaatcttccatcttaaaaatatcttattctacatctgaaaagagaaccatttggaaattccacgtcatactcacttatagacttaacagcaatttcaactttaaaaattcattcccacctgcattatatgacttgattcttacagtagccctgtaaagaatattgggtaggaattcttattcccattttagagacgtaaacattcacyatccgcggaccatggggaacacagctgacatcaattgcaagtcagtttctgtggtttactgcagcaagggagagctcactccagacttgggcttgtgctggttgagtctaaggaaggggtggaaagcaaggggaattctggattggattctgtcaaaaaggagtccaattcaatgattcggcatcataataatttaatagttatcactaattattatttaatataatcaataaatgatctagcagatgggaagatgaaaacagggctgagctggctttgatacagcaacacaagtcattcctgttagtcagaagagggaaatgtttagtcatgttttttgattttggagtggcctcctccctgtcttgatgcaaacacagatgtggagggtctgtgctgcacatgtttctgttcggtgggcattgtctctgttcacttgtgaatattatggtctggctgacggcagagctggtttttgttgctgtgctgtgttttcgtgtagtctctcccaaagggacttggggaatgcgtttgaggtctcttaatacctatgccctagctgcacagctttgggtgatgccctttacctccttacctctgatctctcaggagtaatagtgtcccttccacactgacattctgggtgtgaatgggactgattagaatggtcatcgtggtgccaggagatctgcagtggtgaccttccctggtatcagctatttaaatattatcaggaaagagaaatgtggaagcaaagtyctatccattttaagcatgtgaccttttaccctaactgaaccttaattgactcatttgcctctagcaattcaaagattcccagacacccggaggacaaagatgggattctgtaagaacagcccacgcagtcaatgacccttatgccatttcttgcccggaactgttttattcagggcctgacatgcagcagtgtttgattaagtgctgacaatgaaaataggtatttgatgctgtttggaagaaaactcttacatttcttgaattgaactaagatgtacagaacaacagaaaccattatttttaagaatatttaaatgtgccaagttctttgcctatttatgtcaatgaatccagaaaaacaccctgtgagataggtattatccccacttcacagatggggaaattgtggctcagagtgttgcaaactctccttagaccactcagctaataatttcctctctggtatagctgaaacatgggcttgcctgaagggcagaggcagaagaagcctccaarcctcccaaggtcctgtgattctcattgatgcctacttctagtggttctggtgtccctctcagagcccacatgggtatctgagccttcagagatatctcatttggtttggggggttgtttttggtttttctgagtctcgctctgttgcccaggctggagtgcagtggcgtgatctcagctcactgcaatccccgcttgcagggttcaagcgattctcmtgcctcagcttcccaagtagctgggattacaggcatgcaccaccatgtccagctaatttttctgtttttagtttagtcggggtttctccatgttggccaggctggtcttgaactcctgcctcaagtgatctgcccacctcagcctcccaaagtgctgggattacaggcctgaaccactgtgcctggccgagatatcccattttggataggggagcctgggacatatyctcaacttccgtgggtctggccactacttatcagaagtttctgctcaccttacacaactgtgagtgatggccaggagcagcctcagtggcccaaggggaaaaacctctggatgaagccctggacccctcacatctcagcctccatcactgcccctggctacccaaagtcaagcccagaaacacagatgtgagcacaaacccaggcagcccatagaaggcacagccctgtgatgtcaagcttaaaaattytgggctacttttaaggtcaccagggatatttcgaaagagctgaagctttttcctccatccaagaatcctctatcttccaggttgtttttatgagctgaagaggaccctccacggctcctcggtgrcttagtagtatcaagacaacacctgagaaagctcctttcatgcaaatctctgtctcacgcatgtgaagagaccaccaagcaggctttgtgtgagcaacaaggctgtttatttcacctgggtgcaggcgggctgagtctgaaaaaggagtcagcaaagggtggtggattatcrttagttcttacaggttttgggatrggcggtggagtttggagcaatgttttgcgggcagggggtggatctcacaaagtacattctcaagggtggggagagaattrcaaagaaccttcttcagggtgggggagattacaaagtacattgatcagttagggtggggcagaaacaaatcacaatggtggagtgtcatcagttaaggctattttcacttcttttgtggatcttcagttgcttcaggccatctgggtgtatacgtgccagtcacaggggctacgatggctcagcttgggctcagaggcctgacagtctccttcctgcctgcgacacaggtctaggaattattccacagttgggcactcttggtgtattattgttcatgccctggcccccacctttgtgccgcatagagggactccccttcctgaggttaatgattgggaaggtgttaaagcaggaagaactgcaagaaggcactcgtgagtgagcctatccactcattcctggaagataaacaaacgaccagtgtggctctccatactcagagggtggtttctggatgtcagagatttcgccacacaccagctctgtgccaggccttgtgctaggaccccaacatggtcactcratattcacacagtctagcagtctgccaggactgccaggacagaggaccacagactgggtggcctcaacaacagaaatgtattttctcacagttctggaagtgagaagtcygaggtcaaggggtcagcagggtgggtttcttctgaggcctctctycttgtcttctgatggctgcgtctcttctgtctgcacacagtcttctatgtttctgtgtccgatctcctctttttataaagaccccagtcatattggattaaggcccaccccagtgaccttatttcacccaaatcacctctttaaagactctggctccaaaagcagtcacattctgaggtactgagggttagaacttcaatgtatgaatttgagggaacacaaagttcagcccattacacccagcaaacactttgctaggmcctgctgtgacccgggtcctgggcttggcactgggcatacagtggaaactgcaaatctctctttgttctatttgagcttcagcaactctccggaagscttccgcgttagaaaaaaggcttacaaatacacaggaaatttgaaagtgagtagtaagtccacaccaggcccagacagggggcctgtgctgaaaggtgcaggaagcagcagccctgctgagacacacaggagcyggctggccggccgctagcagggtgggatggggagtgggggctcagggagcctgggctggggagaggcatcckccctcttcaacagaatgattgggactttctggcagcataarmaataaccggcaggagaccaagaaggcgccgtttagctggctcatgtgtgagtgagtgatgaaactcaccctctggcttggcgccttatggaactatcaactctgcatgggtgtgctcagtgtggaccccaaacctgctccctctggctttgagaggtatttctcccatacaggctggcttcagccagggggttgcctagactcgcccaggcctcagacgaggggaaagggccaaggccggctgccactttctcatcatgtgcctgcctcccttcccamatagaagggtcaagcccaaattagaagggtgggatgatggctggtgcctgaggacagagctggggctaggaggacaaactcctgggctcctcttcatgtctgggctacaagatcctggcataaacaggggctcctggcacagcggaaataaaccatgggtccctgagggagactctgggtgagaaaagagacccagatttggagttgaaagacctgggcctgagtcccagctccatcacttcccagcacgtggccttgaacaaatcactcaaggcctgcagacctcggtcagtcattagtaaagagaagattactattatagagaccccactgggctgttttgagggtgaaatgagaccacgtaagtgaacgcactttgaaactatccattgctggtcacaaaactaaygtgtrtacgcatctatttactaaatagtcatataatactcacccgattcatatgctactcccagtgtttttctctactttttattacaaaagtgttcaactacagaaagaagtttaaaggatacaatgaatttccatattccctccagatagactcaataactgtttgcattttcgtatatttgctgtatgtgcatatttatatgtgtgtgacttgtaaaaccagttgagataagagggggaaaggaagagagaaaaagacacacacatacatatcccatatgaaagttgtggacatcatgatacttcaattctaaatatttatacgctagtatttctttctttttttgagayagagtctcactctgtcacccacgctggagtgcagtggtatgatcttggctcactgaaacctccacctcctgggttcaagcgattctcatgcctcagcctcctgagtagctggaatgaatgcctcttactaaggacattctcctacatagccccagtaccatcaccacacctcagaaaattaaaaataattttatactatccaatatccagaccttactccaattttcccagttgtcccaagatagttgttgatagcgtttttcagactgggatccactcaagatcctcctgttgccctgtttgctgagcttctgccatgtctccccagtgtctgaggttgtgagcatcttggttacttgctgccaattctcacactcatctgtgctgcccaccgtcccatggcctcttgcggacctctctcccatggcgctggctccttgcacccagctatctgcttgcacacctctctccctgctggaggataagcaccccaagggcagtggccagtcttagctactgttgtttccccaggacccacacaggcctggcatggagcaggcacgtggcaaatgactgttgcatgtttgaatcttcatcagagggctaagcaacacacacctttaaaaagtgagtgagttttggccaggcgaggtggcttatgcctgtaaccacagcactttgggaggccagargcaggcagatcacttgaggttaggagttggagaccagcctggccaatatggtgaaaccccttctctactaaagatacaaaagttagccaggtgtggtggtacgtgcctgtagtcccagctacttgggaggctgaggcaggagaatcactcaaacctaggagggtggaggttgcagtgagccgagattgcgccactgcacccagcctggacaacagagctagactccatctcaaaaaaaaaaaaaaaaaaaaaaaggaaatgagttttaagtaatttcatctgacaaattctgtacccctgccggagctcatggaaagcatcccagagacccaggtgacctagctcaggccctgccctacttccccatctacaagtggccactggggctctgaaatcgcttggactctcgactagtctgtgctcgacatctgtgacaggaccatcgactgagagggagagctgccctccagaccacaagtcttctctggaaaacacacacgtatatgagaagttggctgtgttcccattataggtcttacagaagtgattccaagtcttgtgagtttctgtggaaccagaaaaccacttccggaccagcaggagtgagaagaggcgcatgcatatcatgtttgcattgttttcttgcatgtgtcacttcaccacaatgctcaggacctcaatgagagttttaagttctcccagcttcaaattgtgctttccaggccagagcttctcaaaatttaatgtgcctttgaatcatctggagagcttgatacaatgaatgtttttttaaaagtagatttgggatgggctccaggatcctgaattcctaacagttggtctgggtgacgccagtgccactggtccctgaactacactttgagaagcgaagttctaaaggtcacaaaacaacttctcatttcttcagtgaactggtaattagcacctacagctaaatataaggcagtgttctagcaytggaggaacaaggaaatgggaagaaatacaaagaagaataagacacaggcctttgacycaaatccaactggatatccctttatactacgtctagcattttgcttaagtgggacctaaaaagttactccaagctgcctcccctagggtcttctggctgtttctggtaatgtgtattcctgctgatgctcaagccctttgcaacaagttcctaacatggtatcaaatactgggcacactagcaaacttcagccataaattagggcccaaatgttgtcaccaaatggctgtgtgactttggataaatcactctcctctcacgtggactagggttgggagctcttcaagtcccttcctgtctgccaaaaggtttctaagcagtttccaagccgtttcttgcagttttcccatcaagccaggtgaaggcaagtgttatgtccccatcagggtcccccagccccctcttcttagctcaggactggggctttctggggctcacctacagtcttcctcctttccttcctaacttcacacgcatttatcaagcacatactctgcatcaaacctgtgctcaaggacagggaggcaaaggtcaataagatgcactccctccctggggaggagacctaaaacagaccgcaggtgccctgctgcgtggctgkctcaggctctcagagtgtgaaggagagcacctcactcagcactggcagaggccggcaggcctaagtgggccttcaccatatgccaggcctggctaggagcttccctggaagattccaggtracgcccagcaaccctcaaaggaaaatgctagtattgtccccattttaaaaatgggaaaacaggcttaaaaagtcagatgtctggcccaacatcacacagctaatatggattcagtgaaatatatgcaaaaatactcagcagagtggcaagtagtaactaaacggtaactaaaatacctttttcaaatgacagaacagagagtgggggccagtaatctgcactctcagacaaaactgacaagtgggagaaaggcttgtctmccctgaaggacaaaaaccaggcttgggactggccacacatgaygagaaaactgtgagaaaagaagcaggagagactttggaagagggcttggcaggccggaaagcgctaggkgcacacgacgggcagtgggggctcaaacasaggtgggagcccaggggaggaggkagcgattagtcatgctggggaggctccaagggccctttgtccttcctagatggctactcagacgccagtctgcgagcaccccasgctcagctgctccatgcttcagccaccatgcaacccatctggataatggactgttatgaagcatgttggcagccatcgattaggactaaactctatgctcattgggttgtatttgcaaggatgctctgctaagatccacagcagaggtgcatctctctccttctcatttgatggcttggaattaaaatgccacccaacattctctgccaaagacatgaagatttatgggtcactgtcaatatcaacacatgctggccattatttgagtctccttgctgcttgggactgattgctatttactttgaaagataaatgtggctttgtaatccatgcaggttgctgggaggaatgggttttaaatgcatttgttcttttttttttttttaagacagagtctcactctgtcaaccacgctgtgcagtagcacgatcctggcttactgcaaactccgcctccagsttctyctgcctcagcctcccaagtagatgggattacaagcwtgcgccrccgcaccctgctaatttctatatttttaatagagacagggtttcgccatgttggccaggctggtcttgaactcctgacttcaagagatcccccctcctcggactcccaaagtgttgggattacagacaggtgtgagccaccatgcccggccttgggttttaaatgcatttgtttcttcccttggagacctttctattccactccattctgctttgtctggtgatgttggtcccaccctgtacccaccatcagatattctaatgtcctccgaggctctggaacaaagaccagagggaccagcctgtcctctgtccagagtcatcagtatgacagtatggagagacccttagcaccttagtagaaaaattgcccctgtcttatggggtgacaccactcatatatgatctggggcaagagtcaagacccccaaggagcttacttaaggagcaataggttgtcccctttgcctcttctggtctttcgcgtttctgagcgtggtgtggaaactgagtcaggagctaaatcarttaggtcactggttctcaaacttgagtgtgcatcacaacccactgaagagctttttaaaacacagattgtggcccccactctagagctcctgattcaataggcctagggtgcggcccaggaatgtgcatttctaacgatgtcccaggtgatgctgattctgttgctggtcctgcatcccacctgaagaactgcctcagaacaagagtgggaagcattagagaccaatcatgggagagatgaggctgctggcagtgtttggcacttgggaaaaagaacagcaccgtctaaaggagaattttatyaagtttcagkgaacaatgtgcaatttaaatctttttgtaggaaatcgtcagttaaaggtcaatttccataagtatgtggatctatgtattttggaaatgcattgaaatgttacrtgggtctgggaccacacaagctacccactggtggtctgctatacctaggtactaggaaggtcaaggtactgagtaggtcacagtcttgccaccgggatgctttgctaactttattgagtgaaagtagtaagaaatgcctggtattgataagagcccaccgtgctagtttttaccaatggtccctaakcgattttccctgcagcagtcagggtttacaggtaaaactgggcccaggscaataaaggggtacagtctaaggactctgggagtttcctgatgaatactagaggtctttggaggcagacaactttttctttgcagcgggacttcmcattataagccatgatgaggctgcaattgcgatttatcagtgctgccttccttccccaggcaacgtrctaggaagaatcatggtttactgaaggcaggctaccctccccatcaaagcctagtggactgggcaagcaatcggttgggattcattacttggaggcatgtatccccagagcaatcaaaggccctgaccggcacaggattgggaggctgttgctgagacccaggcctcgagtgacaggtagagcagtggggtggaggaaagtcaacatatttggagatacgaaaaaggcaggtaagtaattgtattcgttgagactttgggtcacaagaataataatccaaaccaaattaacttgtggggaatttatttactcatgtaacatagatgtccaaattataagcttcagggacagctggatctatgaccttaataaagtcaccatgtttcttcattcgctccccacccccttctcccttcataacacttcagagtgccagattcctcagtccttggaactcaaacttccagagagaccayacttcatcacatacctatggcacatgttccagaaatgattctggccaggtgtccacccctgaatagatggccacaggyaggagaatgggatgtctgattggtctgatttgggaaacatcctatccaccacttggataggatcaactttacccaaacaggactgatcaggatccacatgggaggttcgctcckttggaggaggagatgccagcagaccgtggaggactggctgtgaggcacgaggatgagcgggaggcaagggcggctcctgcttccacagaggcgagcaggaggatgctcctgccctgctcacacagctgtggctctgcaccttgctccccgctagaaggtgggctatcgtagctaagctacctgggcagagcagacctcgtgagtgtggggaaaatcctgggcagcataacagactcatttgtagggcaaagggattttcagttagttctgtaacacactggagaaccaacacaatgctcaagcatcgttcctcccagaggaagcagatgggtgagataaataaaaccacactttcattggcatcctaggatgctcggggccctattttcaaggctgtgtatgttgaatacacatttcagtgatgctttagtctattccacagtgatkctcaaattgtggcccccaggccaacagtatcaccatgccccgggaacttgtttgaaagacaaattctccatcccactcaagacctcctgaawcagaaactctgggtatggggcccggcagtctgggttttaaygcaccctctgggtgattctgaaacaggcaccaaagtttgagaacgtctgcctataaatgtatttgatccaatccatcaagttcaaagggaccacctactataaaaactaaggcttatgttcagggtttattgagcagtctgaatttagaagagtgtgaacgtgaaacagttttctatttctcccattccagccttcagccacgcactatcaagttatatgcttccatccctttatagcatcctgggcagattcctttaacttttggtcagttcgattattaagttattttactttattctaaagcctcaatctcacatctgatttgacattcttcccttctctcatgagctagactcaaagaagatggaatctgcagtggggaggggataggatagttctgctctttcactcctcttttctctggagcaccgtggggtagggtggagtgggatggggtgggagggcagggtgaggcctggtcctgggattgctgcccctcatttttcagagcccaacccccatgggactgggagctggtagtgagggtacagctgggggacacagaggtcctcatctcttgtgagtggtctgctcttgctctggttcactgtggtcccatctgctgctggtggccttggcctgtgaagatgtggatgtggttttctgagggccctatcggtgtgagcccagcccatttgtcactaaggacagctgtggccccttttggcttctccaaaggtccatgcccctcctactctgtcctcctgtacaaagtctcagaaatgacttcggtcttcttccccgcctctgaggattgatgggagctgaggtgtggggacccatcccctcaggtacactgcctcatagtatttcttctccccgcttggctgagcctcctctcttcagatggctaaarcaggcacaacccccacgttgccacacagtcccatwaactcctatggatacaggtcagtctctctccaaaactccatcctcatatccccagcaccacatgggacctagaatagcaacgtctcagccagcatacagcctggaacaatatgaccatttctgcctcctgcaggcaccctcattccgcattctcggtaagtgattctaatcggtcccccaacttgaactctagagactaacaatgggaagaagagaactaaattattctcccagcaattcctactctccctctcccacttgtctgtctaacatgggctgggggaaggtggtgatgggaatagagactgcttctttgagagccctggagtttgaagaatttggccccagttgctggcaactctcattacagagtgtgggttccgtacattggcgcggtggcttatgcctgtaatcccagcactttgggaggccgaggcaggtggattgcttgaccccatgaggtcaagaccagcctgggcaatatggtgaaatcccaactactaaaagtaaaaaaaaatcagccaggcctggtatagtcctagctactagggaggctgaggtgggagaattgcttgagccacagagagcgaggctgcagtgagccatgatcatgcacagcaagaccctgtctcaaaaaaaaaaaagaaaagaaaagaaaaagaaaaaaaatggatagaatgtgggttccttagcacctgttgtttcagcagatgtcctggtgccacatttgctatttgcaatgcgtcttcacatacattatctcagttgaccccacagtgattctgtgaggtgtttaacctataaggaaacaggctcagagagattaagtgacaagcccaaggtcacacatgcagaggtgatggcaagatgggaacccagcccagtgactcctgagcacctgttctctccctgctgtttcatgcaggtgcctcagccacacttgtcttccagctctgggtgaacttggagcaaataaccagagaaatagcttgtctccaaggccacagagcagctggcaggggagagtttggggcaagggatttccttagggaaaacaccaattcgttctggtcatgcmcagtcacatgggtcccaaccatcaccttcccaggccaaggtcttaggttcccctggaacccctttggctttactcccttcctgggctgggggaaagggtggggatataagctggtacttccaaagcagaaagctggggtttggggctgacagagcygaccttgagcttgagctccatggagtacccagcccaggtcaaatggggtcaggaagccatctgtgccttctggatggctctgtctgaatgattcacttctgcctatggtgggtggaagttcatggttttactcccacatggtgaccacagtgcatggcaattytctagtcaacaggtggggttggggcctctgctacacacaagaggcttctttcttcaagtttaagacttctgatgctcacaagaccctcccatgcccttaccacgtgcagcgctcacccccagggcctggggtttggtgagatgtgtcgcccacatgggctgggatcatattttccccagggaagatgaaagccctcaccctctcacaaagccaattgctaaattttcaagaattttgcaagctgatttttaaacatagccattattttaaaattacattatagaacttacaatgaaacaaatgtttaaaatgacagtaataaatactcaaaactcctctgttctcattttactattgtctctgtctgtaaggttatttccgtctgtcgtactgtgtggtggaaatactattcaatgatacaccaaagtgaatctcttcccaactccgttatcagtaacatcacagtgggagcttaacagcagccatgatggctgtatttatacatggacattggcaaacattatagattagggtttgatgtattgttttgttgactgtgtaaagcaaggttcagcaaacttttctctgtaaagggccagacagtaaatatttttccttttgtaggccataggtgtctgttaaaactactcaactctgctattgcagcacaaaagcagccacagacaatagacacacaaatggacctggctgtgttccaataaacctaattcacaaaaacacatggtgcaccagatttgtcaggccatggattgctagcccctcatctagacttaagagagccatagaaaaaaaatgttagtaatgaagattaaatttagaactgtcccaattgtaactagcacaaaacattaaggaaatattcttccagtgctcaaaaacaatgatttgattgagcaaagaattcatgtcattgttgaatgattgagtttcaaygtgtccttatttcatttttgtcttcttcattaatgtaaataaacctgtcagccaacctacacttgtcatttgccaccataggttgactagtgagacaagggtccaacaaacatcagcaaaagtattctgtgaaaatcaattgctatttggagtttacaataaagaatactgtatatttcattattatttataaattgtataataccttgatagcaatgaaatgcacaatatatgcatgtatgcgtgtatatatatatgaatatattttcttccagagagccagttgctgagtatccaccaatgcaccactgcctgaggggtgtctacataaaaagagacctaacagcccagagcagcacttgttaaggacccaaggcatggtccmgaccccaaggaagggaagggggtcagggatggatagacaatctggaaagttctccaaggtggtctgagaaggcttcatgggggacagagagccgtaaagcatggtaggactcaatgacaaatgaagaatggctgtacttcagacaggcacacagcatgagcgcaggaggcgaggctgaagtcagggacaccgagacaagagggtgagcatagggaagcagaagggaatgaagtggggtcaaatatatgtaatggcatggaaacatgctatgagatcaagccaaaagaaaagaaaaagtagaatgcaaaattttacatttgcattaaggaaaaaacacgttagaagaamatgcacttaaataaattgctctgtgtgatagtatgatagctgattatgtatttatcctcaatgctttctgtaccttcctgttgttctgaagttgtattactttgatattcatggggaaaaataagcttttccagtatgaagggcaaaaagcactgagccaaacctgaagccatagctaaggacagggcacatctcccctgatgcagcccagaggcccctggagggaggtgctggggggtgaatagagactaggggtgtcactccctcctaggaggactgcaggagcacatgggtagccaatgctaaggcctcctgcccccatgggcctaagtagccctgtccacactggggatctgcccgctacctcatagcctcaggtagatgtctgktctctctttgcaaatgtcccccgcaacccatcacattcataaaggcaacaaattggggaaaacgagaggtcctctgtctttttagggcttcaccactgctgttttcccaactaaagaaatatgtacatatgtttaagtatactttaccatgcgyagaatgggaaaaacagaagttattctagagaacatctcgctcaactcgtttattttactaataagaaaatagaaactatggaggtcaagtggcatacccagggaaacagagctaagtgagaactaggctccagcagagatgatgcccagggccgggcacctcctttgtcagcatgcaggtatcatcagacaaggccaaaacagcactgggcgatgtgggctgagcagcccttggcttcgaaaacatgatttttttattattttttgagacggagtttcactcttgttrcccagaatggagtgcaaaggtgcgatcttggctcaccacaacctccacctcccgggttcaagcatttctcctgtctcagcctcctgagtagctgggattacaggcaggcaccaccacgcctggctaatttttgtatttttagcagagacagggtttctccactttggtcatgctggtctcaaactcccgacctcaggtgatctgcccgcttcagcctcccaaagtgctgggattacaggcgtgagccaccgcgcccggcagacatgacgtattctaagcactcctcaaatttacctgtggacagcaagaaggcctacaaggcaccccgtttacgatatgccacttggctccttcagggcagagctgcagcagcagtccttgtttctctgtgccccacatcccctcagcatgtaagaccacttctgccccacccattgctgaatgggaccttcagatgctatcttctccataaagctttctatgactcaggccgcatcattttgtggtcaactactttcactattattgtgtttattctccctaaaccagccaagcaatcccatttggtaatcgaaagagcaagtagcactggcttggtcatttccttcacataaacctgactgaactggatatatggtaaggatttccatcttgtacataaacacttgtccacctccgtgattcacacaattccttttccactctatcccgggcccatgtctccatcctgcccctgatgctggctctgcaggcattttctacatggctgyctgtgtacatgccrtgtggttagtcttaaatcaagggctcctagagtgcataggacataccagtttatactttttctcatcaggaatatgtgtagctggaggattaagaaatacattttcatgagctagacaataacaaaaattaaatggcaaaagtccttgctgtccttagtagctagggagctttaaaaataaatacataagcacctgtttccgtttttttactcctacagaagcagggaaattgctggagaaaaaaaaaaaatgtaagtccatatattctgtactgtgtcccttggaagaataaaattttaaatgaggtcatcaggaagtgcttcctaaatgtgaagttcacagactgaactttgaagtttagcaatggacttcccctgagcaaggtcggcttatgctattgttagaccagcagctgagcctcccccaccacgtccttctacctcttgcaattaaagcacagcccaggcaggtttttcttaaacaggatttttctttatgttggtgcatatgctgctgttataatagcagggacattgtcctcattcccagctctttcctccaagtcaaaacatttagaatgacaccacccaaagaataagtcttacttgaggctttgcaacctctaacccttcccacctctaaccttttcccatctttatccccgttatcttgggtgctttcagttttcagagaccagctttccaacagggctaaataacactctatggtttctttccccatcagaaaccaaagaactccctgtttctcagcccttgccagcagaatctggtcacccctctgcccctcaaaattacacatcttatacaactagctcctgtccctgcaccattcctgtcccttgtccttgatcctggtttcccagtggaacaggaaaaaggttttacagagggttttttgccaccatctctttgttcctcaggagatgattaagttgtgcgttaagtggggaaaaagtacattaggtcaaccccaaaatctgccatcgataacatcagagtatgtccatggctttattagttttctagtgaatatttaagagaaaaaggwgctaggtcatagaacattgagaaggctatacatctccccttggctataggtgcaatacattccaagagggagagatggtagtcatgcctcctatttttttaggtgaggtatgtattttgtagttctgctgggacaaaaacagctttcagtcattgaaaaccaaaggcccagtggacatcaggaggagatggcctccctcactgcaagacgacctctgggtcaaagcctagtgaaactttggcttttcccagcaagcaggaagtgacatagacagtgtctttttagagacctcactttggagaatgctcagtgaggggcaaacatttgctggtgacattgtagttctgtcctttgctaagcttgagtgaaaatcttttggagaatcracttttttctttcttttttttttttgatgtcccttagagagctcacaataaataaataaatcaaaacaaagctaaaagttcataaaaaagtctcaggcatggtccagattttcaggaaaccagcagtttctggaggaagtcccacccgctcctgaaaacagaaaaaataaacgagagagagtccaccagcaaacaggtgtttagtcttctctggagtcatattaagcaatttttacatttatggaaaagcaaacactccccccacatagggtgtggcccacactgggatkgaaaatcagcctcgtgctctgcaccgtgttctggtggcttctgcagctgtcacaggaaggaatccacacccgtccccaaggacgcctgcacgggaacagatgcccgctcccttaccccttgggggaaggacagaggtatctgagggattcagccctgggcactcctctcagcttcctccttcacaggcggggccctgggaggccctgagtggggccactgcgttgctatgagatcagaacggtagccagttggtgggtgcagcaggctcacacctagcaagaacctacctctccctttttcctaagaagggaaaacaactctcaaggctcaccctggaggcccaaagggaaggctgtatgggtcccgtactgcagcttccaagcccacggtggttacgtctgagcaccctgtagggctctgctctgaaagtcttttcagctcccaatgagcattgttcaagccgatgaacatccccaaaacccttccactctcagggcctcggccccacccaccacctggcatctgtctttaaggatgtttataacagagttctgaaataaagttttggctttttcctggagttctaactctgcaggagaagcagtgaggtaggactttgaggaattcaggaagtggagaacagctcatggtgagaggaaaggctggggccgacttgggatgtggatgtgcaaaaggaaaggtgaaggctggatgggaggcagggtgggyacagttaaggtgggccctgggccaggatggcctcccaaccagagagtagccttcaacatctcagcctcgtactgcgtgccagacactctaccaagccctccacttaggtaataatcacgtcttccamcctcactctcaccctgtaagggagctcttagaataacgctgctctccacggctgggaaacccaggctctgatgggtgacatcacttgttcaaggtcactcagccagtaagggccaggctgggctgcaaactcaatggcccactgcagagctcacamaggtccatttcctactcgccatgatgttttccagggagagtttagagaagctctggagctgggaaaagagggcagctgttagagaacagcgagcgagaatgggaagtcaggagacccagagctcaggaacagacttccttggcaggtggcgtagtcccatggcctctttagctctcagttttctcatctgcaagaggacaatgggccagattggtgcttctctgagagaaagtaccagtggttttgaccaagggactgacccgaacatggcatgtaagaggggtttgtttggggttggtccacaggatggttacagaggaaggaagaaagccaccaaggccaatttgaagatgtgcagaaacccagaagtgaggtgaggacggcagttctcaagtgcagagcttgaagtggtcactgctgggagggagacgtcataacaagacccaggaaacacttcaaaggaaaaactaacagcatttaaagattggctgcaatagtaacaataaaaaaagctaacatttactgaaggctataccagttatcccaccaagtgctcaactaccaatcctcacagcagccrgctgcaggaattatcattgctcccactttatagataaggaaactgaagtttatagaggcagagaaacttgcccaaagtcacaaagctggcaactcccagagccaggatttgaacacagtctcagtacagagcctatggtttctttgtttttgagacaaagtctcactctgtcaccaaggctggagtgcagtggctcgatcttggctcactgcaacaattgcttggctccctggttcaagcgattctcctgcctcagcctcccgattagctgggattactggtgtgcaccaccatgccaggctaatttttgatttttttttttttttagtagatatggagtttcaccacattggccaggctggtctcgaactcctgacctcaagtgatctgcctgccttggcctcccagaatgctgggattacaggggtgagccactgggcccygccacctatgttcttaatccccgtgcaactctgcctcctatctatgtgccgaagaaaggaacaacactcccctccagacctctgcctttcacacccattggccttggatgcccttgtctccccccggttccgattcccttcaaattccagctcctttaaactttcacaccttactctgtccacccctccacacctgcctcgtgctgtccccccgcccccacatcccactccacccccacagttcaaacctgctcatggaagtcctggaatgtgttttctccctcatcctcagtcccacccatcacacagcctgcactggatcatccaagttacatgccaaatgtctgtacccctctgtgtccaagtgaggcccaccttcctctttgcttctgtcatctattttcctgtttcttgcatgcattgcactgtgttcattatgtctattgttgactgcttgttcatatttccaccttccctataggatcgtgagtgctttgaaggcagagagaggctgggccttagtacagtctgtttgcagcacatggcatatagtggatgctggagaaatgttgatgactgaattgacatgattgattgattggatcaaatgaatgaacacaagaataaatgaacatcgggatccaggaaaggggtccttctggcaccaaccctattctgtccccctaaacagtattacatttagtgtttatgataaaggctttcagcacctttttgaagagttggtaccactggtccactttctgccctgcccttaatccatccaattggtttagatactcacacatacattctttctttctctctccttcccttactggaccccagaccaaagccaaagaaataaatgtcccctctcctgctctgtttccacttagataaattaatcctcagcatgagaggaaccaaagccagcaccttagaagtcaggctcctgtcagctcrgtttgctcacctgcacacagcccttgacttcctcctcctgtgtgggaggagcacagccctgactcagaggccactccaggcaatcctctcctcccaggcaatcctawaaggaacccactggctgagctctggcctctcggcagagggggcaggcctgaagaaccctttccaagaccagctgagctctgctggtccgctgggccctgcctgcagagttattggcggagttattcttggtgctcattagcactgcacaggctgtggattattcctttattgctaagtggcccccagaacactgcagactcatccctccttttgaagtccttgtaaaagactccaagaagtcgattccaatctcttctctcccagcgtggactgcccctggagcagcactgggggtgtgtggctgttagagtggcagccaagggccagctccccagtgaaaggtgatattgtgcttctaccgcacacctgcacgttgggatggtgtttgccttccggcctgactgctctgttctcatcttccatggacatggaggtgggaggggaacttatgtgtcattcactccagggtcctgatggccacttgcgtagagcaaagaatgttggtagggcctgcagtctaggttctagcttcagtgagctctggggcctcgggaaaagggcttgatccctcagaacatctgcaggagtctgtgacccagaccacaccaagctttcagaaactgctctgctcttttactctcccactcctctccaccctctcaagctgtgctatatccacaatgcaccagcccaggctgactcaacttcccgcccactgctcccctttaagctacagcacccaccattttgccccaaactcgtctatcctacctgagctcctgcagccagactgggtcacccatgcccctcctctaaccaggaaagaaaggaaagaatccatcaggtcttttctgtgtcctgagattgcgcaggtattcacccgctccactcccatctccttgacctctttcttgccctgtttctcggcgacctaggcattgggtcctggtcagttttccacttttccatcwctcccttaggacccctcaacctctctgctcatcaaaaaagtccaataaaggcattcatctctttgaatacttaattttacagtacctcttgcataactttcaagtttgaggtcaatacaaataaaatcatttaaaatgtctgatattaaacacttctgacccgaaaagcaaaaagccttttaacagatagttayattgatacaagagtccacaatgayaggtttcaaagatgaaagtaatggatcagtaaatagaacagtagagaaaacacagatgaaaggcaaataaccccacctgaaaaatccaaagctttcattttttttgaaaaaaaaattgtcaaaagcactgtattattttttaaaatcatgataaaaggagcatgcacctgtcaccctcccaaccccctctatacttgcccctttctatctttaagtgctgtggtctttgtggtgactttattggctcaagtttcctaggctggtactctcagagcctggtttcctaggagcagtactcataacgcaggtgcgatggacacctgtaggtgggtagtgccgcctgtgtgaaccaactcggctccaaagagcctaactccctatctgcatggttaatccaatcaaagcccaacctgctttcccacacaacagagttcaacagagcttttcattaaagcaacacatcatagcaaatacttaactagtacaaataaagcattttatttaaagcaaggtttaaagacatataaacattaagcatcagagctccattctttagttgctattcatcacagcttatgccagtccttgaattctgtctaacttgggtagtagccaattttctaactcaccttcaacttcttgggatgagtccttcccgggctccttgtttttctagaaatttcagtggcttgaccacacatcaaaacacacagggtggccaggcatggtggctcacacctgtaatcccagcactttgggaagccaaggcgggcagatcatctgaggtcaggggttcaaaactagcttgggcaacatggtgaaactcggtctgtactaaaaatacaaaagttagctgggtgtggtggtgtgcacctgtagtcccagctactcaggagactgaggcagaaaaatcgcttgaacctgggaggtggaggttgcagtgagccaagactgtgccactgtactccagcctgggcaacagagtgagactctgtctcaaaaatggggagcgaggggggagcccaccacacaacaaaacatatagggcttctcatctaaagtccgaataaaagaataatactatggctggtttgcactggaggaaagaaaagccctatcactgctaccttacttttctgatgttttgggttcctatgtcttatcccctcaggaaccaggggaaaaagaagattctgtgtcaagtgcaccctacatctgtccatgtcaccccccttcttccaatcagaacaactcatttcccccacttgactgctcccctaatctttgcaccttggagcaggatgtgtttattgattgatggatatttacttataattggtacctcttatgaaagccaacagtttttacatctggcttttaacacagactgtgctcttcaatagtcttagtgtagactgaaggtttttcaaattcacatttttagaaaagagttccattaaattccacatgaacaacagaaaaaaatttaaatgggacattacagtgatcaattatagattgtaggacatgactgacatgtagggctgggctgggaggaagagacaaagaccaaatgctcaaccaagggcagaggtggggtgtagattacgggtcagaaccgtaacataacggatggagtcccaagtgaatccaggaagttggaggaagcaggtaagtacttgggttaggcattcacaggcctaggaagtcagctggggcaggaaggctcagacaaggcaaggggaccaggaagcttggacccgtcctgggaagatagagtccaagagggcagtcatcaccggtcccacactaaaagcatcaaagctctctaatcttctgtcttctctactctctctggtgtgttgtcaaggaaggaataggtacgtgggaaactagggagacaatcatagccctcgatgtctaccgtttctaattaatacagggcagaggaattagatcttttggtagagatctaaaattcctctgaagttctatcaagccccatctcctgatgattcagtgctagttctaaaataggaaaacttacttccaaaaccaacagatgtttgggctgtcatcattatgcctgtactaaactcacttgtgatttcactgtgaagtcctgtctgtgtaatttattaggaatcatttatgtaagattatgtagaaaatgttactagtcgtgagatatctatccatctcaatgatttgacttttacagcaatgcgatggracgtgctgagggaccatttggtcaactttccacctaatggtggtgtgattagaactcctagcgggtgactcatagagagtgattagaagtaaaaaggttctggaaattcccccacactctttaaggcagcctttgtcaggtrtcttagtttcgtgaaaggtagactgatgttttccatctggtatacaaaacattttctaagtagttatagaaccttgaacaagccacttagctctctgggcctgagttttctcatcttataaaattaaatccatcaatagatcacatgatctctatggcttctttattctaaggatgtatggtaattttaaacacttggttagccatcttgaccaaactagcatcacaggtaagaaacaagctgcgaagaccaaaattcttctctggtttatacactctgggtcagaggcaaccactttctatgttgtttgggctacttttccctaaacacataatggctttgtctgcatcaaaggtcatcttctattttcctgcccattcatatgaccccataagaccttccagcatctcagtcagctgagcattttacctcctgcaaagcacatggtttccttcttctctttgcaggtcatatgaaatgctcacacagtacttactgtaatcacttcgtaaagttgattttcacatatcttcatccagaaaattatcccaactgttatatataactttattctaattgaataattccagttttcaagacacttttcagacacccattgtcttgtctgaatcctcatgacaacctcatttttttatagattatacagcattcctacttatatataatagttataactttttattcctaataaactttcgcatgacgtttcatcagattctgatagtttcttttgtttttcattcattgcattcccatccaaatgtttactgaccctgggaaataaatccagtagaccaatgaagcatgaatccaactcacagagggtggttagaactaaaagctgaaatggacttccgtgatcacctgacccactcatccctgaccgtagrctcttgttcacagcggccaaaacgtgcatgtctctcaggggcttcctgcttgtggagcagaacctttgcttgcgggcyccttgtgtctgtgagctcctcagaaccgctcttgagctcacagtgcctgatttgcacgtattggtttccgctccgttgcttattctggtcccctcatagaagcaatgttatcctttcttcaaacccgtcctttcccagagagctttgcagccacttttaccgggtttaatgagtcagctgcagagtttatgatccggtactaggccttctgggaagcagctttcctgggcttacgtcaggctgttaaagaccctcctggccttcctgccgacatttgctcggctactttttcctcctaattaatgcctctatcttatcagagtggcccattctcaaatgcagtaaatgagtccttgatgttctatgttttattttggaaacttcccactctgctcatatctgaattggtatttgctcactgttgcgcagtggtttgcctaccaggtatcccttacatcaaatcctgtccgccgcttagaaaaaccacagctaaaagttgtttggcaactcttggtgttcacagggttttcccactgagggtcagggactgcacagcggttgagagcttggactccggggtcagctggaactgcttctaacacaaggaccgctcttaacaaagaactgaggcttcctaaacttcagtttctgggtctgtaaaataataggacccacttcctataaatgttgagaagattaatgggaatgatgcatgtaaaatgctcggtacatgataaaagcccartgattactcattatcccactcaatgcttggggaaaggcaaagcagctaatattaccccagattatagataagaatactgggttcaaaagagatcacttggcttacccttgtctatactgcacctgcatgaatcatggacctgaacccaggtcacggccacytcccagacccttgctctctctgcttccccagcagcgcctctcagagtgaacacctatgtccatgacagtgattcccaaagtgttgtccccaaaccagcagcatcagcatcacctgggaacttgttagacatgttagggtctcaccccagacctaatgaatcagaaactctgagaatgagggcccacaatctgggttttagsaagatctccagaagattctgatgcacacccgtttgagaaccaaagctccatggaatactaatttgcctttggatctagccctgccgcccactcgagatggatggtccacaaatctcaatgtgattcctaacatgagttaagctgtccaaccctgtgacgttatcaggggatttgtgattaatacatagtgacaccatttaactgtggcagaggttcttacccttggaagctcattagaatcatctagggaacttataacagaaaggcccaccccagaccagttcagatctaaagacagcctggactgacaaccacagaactacagagctgmcacccagactccatggaactctgctaggctggtaatatttttaattcattaagggtttatgtgtttaacaacccaggtccagtaaattggctcctttcctccctatgaaccttggacactctggctggtcaagcctccacctcatgcccacttgtttgcacagctactaacgtttatgaagtatttgcttaatgtacctaagctccactgcccagagctatcccacttgatctgaaaacgtcatgatgaggtatggtaagcattaaacattagttcaccatagttctatttttttctaataacttaaacggcttcagggaacattttgtgtgtgtgtgtgtgtgtgtgtgtgtgtgtgtgtgtgtgtacgccttaagagactggatctcactctgttgcccaggctggagtgcagtggcatgatcgtagtttactctaacattgaactcctggcccaagtaatcctcctgcctcagcctcccaaagcactgggatcacaggcatgaaccaccatacccaccctaaggaatatagttttttgagcatgttggagtactcagaaytctcagctcagctcttggcccacttgggtctcaaccatttagagtactgattaccaaaggaagagcacaaaggaagaaaatcagcttttctcctcttcctcagtgtgggagaggggatttggcttgggctcaaagccatagtgatgctttctgctccaccccctttcaattaaagatcaccagcttcccaaaaacaggccaccctcattttccaacctggctcaggcagggaagctgagaagcttggggctgcccattcacccagtcaccaggcagatagacaggtaagagaactgggaccttcaggcctgccctcgggaggactggccaccaggctttacagcccagagcagagaaacactgtggccgttgcaaaactccttgagtgaagtgaccctaccctctactaaaaacgtggcccagtggattccagttactaacaaagctcgttgagaagatgcaagaaaggaatggaacaatggctaggacctccccgcggcagcacttcccccaagagaatagaggagctgatgggcacgtcacatttttctcaatgctggatgacattccatcaccttcctcatcttcatggaattttttttttttttttttgagacaargtctccctttatcacccaaactggagtgcagtggtgcaatcatgcctcactgcagtcttgacctcccaggctcaagggatcttcccacctcagactcctgagtagctgggactacgggtacataccaccacacccggataatttttgtaattttttagagataaggtttcaccacattgcccaagctggtctcaaattcatggcctcaaacagtgcttcgggttcagcctcccaaagtgctgagattacaggcatgagtcaccgcacccagctggaatgcattctttgaattttaaaagactgtaaatgagagatttgttcagagaagagggtgtttcctatgtacaaaaccaaagaccagcttttattttttattaggtattatagtcacaaaggtatgaaagggtatatagtaataagtctaagaaatttttatgaagtttttgaagtaaaaagcatttttataaaattttaaataaaaattttaataaaattactcaattgttaaatgtaacttaaaattactttttcataaaattactcattttataaaacacatttttcctactttgaaaagtagtacatgcttaatacagaattggaaaagacaaaaatacagaaagaattgcatttaactcctttttttttttttttggtagagacgaaatctcgctctgtcacccaggctggagttctgtggcgagatctcggctcaccgcaacctccgcctcccgggtgcacaccattctgctgcctcagcctccccagtagctgggactacaggtgccagccaccacrcmcagctaatttttatatttttagtagacatgggatttcactctattagcagccaggatggtcttgatctcctgacctcgtgatccgcccaagtcaaaacttcagattttgccaaacaccttgaaagtatgagtagatagaggaagactcgtccttttgtctgcctccttttcatcttcctaatacctaacacctctctaatctttctagaaatgggtaagaaaagcttccataaagaaaggtggagagaattgaagcatggtagtatttttgcaggagaaattataaggtttgaaatttatggaggcctcaggacatacccaatgacctaaggtctaggccagagatggtaagtaggattttttttttcttttctcttttttttttttttttttttgagatgcggtctcactctgtcacccaggctggaatacagtggtgtcatctcggttcactgcaacctctacctcccagattcaagcgattctcctacctcagcctcccgagtarctgggattacaggcactcgccaccatgcctagctaattttttttgtatttttagtagagatggggggggsggtggtctcaccatgttggccaagctggtctcgaactcttgacctcaaatgatccaccagccttggcctcccaaagtgctggggttacaggtgtgagccatcacacccagctgataagtagctttaaacacaagtgaggattcyattccatcaggaatggctgctttatgcagaagaactctaagattacatcaggctaagggtgacagaatgctgtaatccattagccttatctgtcatggtcatggcagcagcaagaggcagtctgagtgccatacactgcagtaatctaggggtgagctgaatagtgaatggagatttgcctaaaagaaacttctggagtcagtgctccaaaactctgaatcaaccaaatgaatgaattgagccaaatagaaatgcatgactattcaatatttattatgtagagaggcttagaaagggcaggcacctggagttcctccaccctcctcacccaatcacaactgcccttactgccctaccagtccagccacgtgccctttcccacccctctcaatgacccttgggctccccagtgaagctccctgagggcaggggacatagctctttggggccataaaggcattagctcacccttctcagccccttacacatttactgggtacttagatcaggccaagtgtggtggctcatgcctgtaatcccagcactttgggaggccaaggtgggtggatcacctgaggtcaggagttcaagaccagcctgatcaacatcgtgaaaccccatctctacgaaaaatacaaaaaattagccaggcatggtggcacgtgcctgtaatcccagctactcgggaggctgaagcaggacaatcacttgaacctgggaggcagaggttgcaatgagcaaagattgcaccattgcactccaccctgggcaacagagtgacatttggtctcaaaaaaaaaaaaaaaaaaaaaaagaaatcttagcaggattacatctgtaacccyggcactttgggaggccgagggaggtgaatcacatgaggccaggtgttcaagaccagcctgaccaacatggtgaaaccctgtctctaccaaaacatacaaaagttagccaagtgtggtagcatgcgcctgtaatcccaactactcaggaagctgaggcatgcgaatcacttgatcctgggagatggaggttgcagtgagccaagatcctgtcactgcactccagcctgggcaagagagtgagactcttgtctcaaaaaaaaaaaaaaaaatcttgccccttccctcaaggggctcacagcctgtgggagagggaaaatagatataattatatttaaagaattataaaacaaattgtataaatttaaaattataattaaatcattgtaataatttagatcagaaaaaataaaggcaagtaagtgccaggcatggggctaagcattgtactcacccactgtattccatgttgtcttcacaacggccttatgaggtttgctagtattgcccccattttaccaagaaactgaggcttagagcattcaagctagccaagggctaagccatgactcaaacccaggtgtgtctgactacggctgttactaagaggggaagggaatcatctgaacttgggtttcactcagaaaggggcatggttttggtaactttgaaaacactaccaccctaccctctagcactggcagaggggagctggacgcctggacagctggggagggggaggacggcagccagaagcaacagcctctgcagtcccagcagctgggacctcatgcctcaaccaaggatcagcactgggtattggctcagagtagtgaaggctgctgggggcctgtgtttcctgcatttcctatgtttatgctgccagggtgggttttatgtgaccagagagaagcagggaaaattgctgagaagtcagagatctgccagggaatcagtgatgagccccaggaaatgctttttgtctaaaaatatgccatttccgaaaggaaaacagtcattagagggtgtgagaagccctcgtrgtgaggaaagcaaaactgtaagactcaatgggaggccagtggaacaacagagaagcccattacccacccacttcctgtgcgattaacaagacgtttggaggatgaaaggcaagcagacaaaatgacaacccacagacacaactccaggggaaatgtctggggacagcataggaagacgcagcagggaggtaggaggagaaaaaactgctccagttaatatctttctggcatcggctggttcagctatagatttggctaaaattacctgtgtacttactagacgccaggcagttagggggctttgcttaaatcactctcctgcattcttcacayagcacttgatgaaggaggaaagtgagtcttggaggttaagtgacttgtccaaggttacacagctgggaagggagaaagacatggctccatcccaggttccctgatcccaaatctccccctcattgcaatgtaccaagctgcctccaataagatcaagagtcttgacgatccccaagctagtccactcagtccagttttcctgccagactayagctgttttgcattccttatcttgtgttgaagcaaaccrggtaaggaaactccccaccttttttattaatgactcattttcagccaaaacacattgcagccacatcaggtacatgtgcccactcagcaaagacgtactgtgagaaagtaacatctaagttacttggtccaaagcccttctacatcaatcatcaagcaaccaaccctcctttgctgaaatctccaggggactaggccctttggtgggggaagaggggacggtttcttcaggggcatctcacccctgggaagtgcatcctctctgctgggggcagtaaaaaggctttacrtgggccactgtggctcatgcctgtaatcccaacactttgggggcccaagcagggtgattcacttgagcccagaagtttgagaccagccgggcaatataaagagaccccatctccacaaaaaaatacaaaatttagctgggcttgatggtcccacctgtggtcccacttacttacttgggaggctgaggcaagaggatcagaaggtcaaggctgcagtgagccatgattgcaccactgcactcaaacctaggcaacagagctagaccctgtctcaggaaaaaaaaaaaaaaaaargaggcttttcacgaatttcacattccaccctccaccatctttgatgtaggtaatttatcagcattttgtagaggaggaaacaaggtctcccctacgttgagcccaaatcagtttgaccttggggaacacagtgagcatccctgcgtggaggtacgcaggatccctgagggtgacaaccttcgaggtcgttccctggcctctctgcccagggtgagcatcctcagagacctcagctctcctctcagcatgcaattctcctccactcatggccctcccagctgcccctggcttctcaaagctactcctgcatggaggcaagtacaactagccaatgagcctcctgacctgccccatcccagagagcaactgctgctaggtcctcgtggattctgggcctctgtccagtgaccaaaggagaggacacatctccagctaccatccctccacctattttctaaggaaaccaatgagttctcaaatgccacctgtggtggccccttctcagccctcaccctgagaggccttccccaagtcagaatttcccacaggggaagttactgtgggcttctctctccttcccccacctcatgtggtcaggaagtccagctggctttttctcctgtctgtctctcaaatgtgtcccctggctcccctccattgccactgccctcttcagtgtctggcctgtgctccyacaacaacaggcttgaagctggctgccctctcccctccatcttccacaccataatccaggtgatccttctaagaggcaaaggtaatcatgtttcttccctgctcaagatctgtcaaaagattctgtggcctccatagaaaaggcagacagcccggccacccaggcccttcaccatctgcctcttgaccatctccagtgtcctgcagtgtcctgaatataccttttccctgcctctgcccaacacactcccgttctttcaacacccaactcaactattaccttctctccatcagatcttccctgaaccaccccccagaaacaaaggtgastgtcccctctggttccccacagccaccccaccacttacccctgtgctcaggcactcctggagcactgcattgcaaccattggctcacacatctgtctctaccagcaaaccactaaaccgtgaataagtggcttcctgagccaggccttgtgcaatgaatggatttgcaacaaagggagccactgagagattacatgagccaagtcatggcaattagtccccatggaagcagcagctcagggcagggtccagacttgggcagacttaactatgcaggacattccattaacaataagcaccactctgagcatttcctatgtgccaggaactacgtgaagctctagattctgtcattagaaaggactgagttaattaatggaaagcaggtagcacagtgcctgacacagtataagcactgaacacacgttagcaagaaaagtgacagatcatttacgggatggttcttacaccaggcagcgtgccaagcacagtccatacattgtctcactcttcatgacaaccttaggaagagagcagtcctgtttgtccccattttacagaaaaagatactgagtcttggctaggctaagcgatctgctcaaagtcttcagctcggaagtagtggatttggtcttccatccccagtccatctgctctggcacccaggttctcagagtctctggtacagcagggtgccaaagtccagttgagaagaaagcaggccaggtttttcaggcacagcctgatgaaatatccaggggaaacacatgggactagcaggcttctttttctgtcccatttagtctaatatcacatttaacacaccatcctctaagggacagaagtcacaggaagccatgcagtctggttcctcctgatttctcctgtgtgccacatagttatgcttccttctgggaaggtgtgagttggagtcagtcccctcctgcatgcagctggggaaactgaagccaacaccattttagttactcacatggagctaagacaatcatacaaaactcaggcatggggtcagcccaccagcagtgtggacctcaccctgccggctgcrttccaaatgacagtggcatggtgccacagaaaaaacrtgaggtgtgcagctggacccccagaagccctgactctgccaggtgctagctctgggacatcttgggcaagccatttggcccgagtctttttccccacctatgaaacaagccagagagctcattcctcacaaggctgtggtcagaatgtgcctctgtacttgagaagctgtaaaatgttcctcagttgctgcccttagtagggagctcagaggaaagctagttttgcctgtgcgtttctgtcggattgccctgtacccagggcacgtcctgctctctgacaacaatcagggtcattctaactcaaatcaaacaacctggtctcagaactggtcttgcaccaccatggtgttaagctgccttcccacttcatccatgtttgctaagccgggtgggatctttcccctacaaactcctataggcggccacatttttcttttaaagatattttcccttcgactatagtccacaggcatcagaggatgaagctagcaggttgtctgtatgtagactttcttccagggaggaaagcagctttgctatctcctacctttttaaacaaaatctgccttgattttgtctgccaagatatgtctttggatggsgtaaagcacttctgagggaagctacgtgagccacgttgtagctggagagagaattgaaagaggaagccgagctgagaccaccacagttccggggctggagcccagctttgcagaatgcctgyatagcagtttgaccccaacagatgaggctgttagggacagaaatgaaaagcactgagagaggggaagtgtgggtggagcttatggacattctatgagccaaagcaattttgaagtctaatcatttggagggaaaatatttgtcatgtcattttaaagggtacaaaacaacacagaggaraatgaaagggttagaaaataattggagcgcttctccctttacccttgtagaagacagctctccggttttcagctccactcattctgtcctccattggaagctcccccagtgtcttagagatggatgatgtaaaagttagaaaatgcctgtgtttcctgcttgccttaatttaagaaactgcttgactgaaaagtgactgaatttcatttataggataaaatacttgatctccagggaagccaggcctcaatagatggatttttaccatgtcacttccccctagacctgtgggaactgacctgagtcttggggaaaatttgagccacatggcagtccgcaggtgcccacaagtccctctatgatctgagtacctgtcttcccagtctcatctcacctccctcctctccagccagggggacgtgcaccctatacccaccccatgcacacctgtcccaggctctggctttcagctcctaccccagaaatgcccacctccccccatagctcagtgtacccaagcttggcccatcctaaagccatctctgataactccaccacaacctgtcttggtccaagctggaagtgatgagtgaactctcagaataaataatagtagctcacatttcttgagctaagagccagacacttcacaaactcactctcacatttctttttttgttagtttgtttgtttgggagacagtcacgctccatcacccaggctggaatgcagtggcataatctcggctcactgtaacctccacctcctgggttcaagctattctctggcctcagcctcccaagtacctgggactacaggcgcacaccaccatacctggataatttttgtatttttagtagagatagggtttcaacatgttggccaggctggtctcgagctcctgacctcaagtgatccaccgatcttggcctcccgaaagtgctaggattataagcatgagccactgcgcccagccagctcactctcaacttaatcctggaacaaccatataatataggtattactatgatttatccccatttcatagaggaggtaattaggacttagggaggttatgcaagttacccaaggtcatatagttgataagtatcagagccaagagttgaactcataccacctttcccaagagcaccttgagctactagaactactgcacgcttgttttgtaacatttacagaactatagttcagtgggcaaaggccatgcatgattcttcacacctcccacaatactgagccaccagcaatcaatgcatgaataaatgaatgaatgagaaaatacccacagactagagagttaaggcaacttttacaaacattaaaaggatgccatgtcaacaaaaacacattaagcaccaaccgtgtggtccacattctgacgggctctaggcctcggagttgaagccagggtccactggactttcagatgttcaatgaattcccactttccaacctagaagacagtcttctatcgaggactgcttttcagtctcctagctgctgctttgttcattattgctcagcaaacagtgtgatttatgcatgagacacacaccttaagatgcaatgtagttcttccaactgtcataactactaaattgaattgaatggcaatctactggtagctcaacctctgcaggaaaaaataatcagcctgaaaataatcaatgcaatagcactgtagtgacactgtcgaaaactgtacaaacagtaggaaaggtaatgttgtgactgtcatttattaatgcagagttctagtgttcctaagataaagatcattgaaatgtgaagcgcatttgtccaaacagaatttctaataaatacctttgattgttcctttgtctctatcctttactaaagtcaggcaattagcagtgtttgcaatattacaggcaaatgaaattgggtctctgcctggtccgcctacagaggacttctatagcaataaaaataatcaactggattcttcgttttctgctgggtccatgtgatttccttaataatgtcaatgcagattgtaatttgtaggaaaaaaatactgcttgcatcaggcatgaaatttaagaccacagaaatgccatcttttcttacagaattgttttgttacaagggtatgtggcttggacgattagaagagacctcaggtgtggtgcccaattcatctttcatagaccaatattttgtttcccaaatgtgccttgtacatttctccaataccttcactctctagctgttggtgagggaaaggacaaaaattagagtcataaaatcaccattaaccccccagcttgaccactcactagctagtcatttaggctccgtgggcctcagtttgcttctctgtaaaatgaggcagaaaactatgaaagtgcctccaatctaagttccccaggctcctaagacaaggcctggcccatagaaggcacacagtacatgttgyttgagcaaataagtcagtttcttgtatggtatctggcatgtgatcagcataattaatggttgcttaaaaattaacagtctgttccccaccagtaacattcatcttcttcctcttggcctggtgaaatcttacgcattcttcaaagctaacatcacattctgctttgtctgagaaaccttcccaagaccacaccaactagaagtgatctatctccctaaactcctaagacatgtgttgtccataagcttcattcattcattcattcattttatgtatttatttattttcgaaatggagtctcgctttgtcacccaagctggagagcagcggcgcwatctcggctcactgcaacctctgtttcctgggttcaagcgattctcctgccttggcgtctcaagtagatgggattacaggtgcctgccaccacacctgactaatttttgtatttttagtagagatgaggtttcactatgttggccaggttgatcccaaacccctgacctcaagtgatccgcccccaccttggcctcccaaagtgctgggattacaggtgtgagccactgtgcccggcctataagtttcatttaaaacmagcttgtccaaccttcagcccaggactgccttggtccagaagctttgaatgcagcccaacacaaattcataaactttcttgaaacgttatgagattttttcatgattttctttttgtagcttatcagctaccgttagttttagtgtattttatgtgtggcccaagacaattcttcttccaatgtggcccagggaagccaaaagattggactgtcctgatttagaacttgggactcatggccttgtactgtaggttcccctctcaaaggatttcttagctgttcagttatgtcacaagcttctcggaggcaggtccagagacttcggttcctggtgatttaaacagcccctagtcaagagcatggcacacaacagatgttccataagcatccacagattgactgggggaaatgtccaattcccatggagatggtcagatgccctggagaggccacagtgattacaagccctacagccctccatgggatacactgggccaaagacactggtacagaagacttgtcttctgtagaaagtttgctccatttcgctaaatatcttcccatttgtaaggaaactgatatcctcatgacttgtggtgggagggaaattgtacaacctcttcaggggacagagtgacaatgactctcaaagtttaaatgcacatacaattttaaaagattaaaaaaaccataaatgtcctttgacacagtaattgcacttataaatgtttatctcacagactgacctacacatgtatgagaaaagtcattgagaagattcacttttgggttatctgtagtagcaaaagactggaaacaaatgtctatcaacaggtaactggataaataaatcaggatatatccatgtacaagaacactatgcagccttttaaaagactgaagttggccaggcacgacagctcacacctgtactcccagcactttgagactgaggcaggcagatcacctgaggtcaggagttcaagaccagcttggccaacatggcgaaaccccatctcttctaaaaaaatataaaaattagccaggcctggcacctgtaaccccagctactcgagaggctgaggcagggagaattgcttgaacctgggaggcagaggttacggtgagccgagatcgggccactgcactccagcctggccagcagagcgagactccatctctaaataaatagatagaataaagtagaaatgtatgtacttgtgtagaatattctccaagatataagtgaaaagacaaggtgccaaccagtatgcatggcttcatccagcttaygtaaaaagggagatgtacacatgtgcacttgtatgtgcctatcctgtctccagaacaatagcaacggctgacttggggcagcagggaaagagcctggggtcagaagcaggaggagacttgtcactatattcggtattctcattcatatggactaaattttttagcaagtgcatgcattatctttcttttaaattttaactttatttttaatcagatgatgaagtcacatgcacaaaatcatgaaaggtacaaaatggtacatggtaaaacgtcttcctcccagccctgtccccagccacccagtttccagcctagagacacctaataggaaccctttcctctgccctttttagagacagtccatgcattgcagagattttcttttaaaataatcacaatgaagtgaactgggagaaagcttccattgacctcaccaccctctccagctcatgctctgttctccagagccaagctttcacacagggttgtctacgtgtatggagtggtgaaaaagagttccttgggctttggagtcagacaaacctgagtcttcaatagttgacctaacctctctaggtcttatggcttcatccataaaatggacaattcatacctggctcttaggttgttataagggtaagaaacagtccatgaaaagcatatgggtcacttagccacagccactctaaatttctgggcaccagcaccctccatggctgggaccaatcctcactgagcagtgttcctggacacagccagagaccccaagacccctggatgtccccctaatcccctgagaagtacatcctgtatttctgaggtaacattttacggtaaacttctacagcaagcaaaaaaccttaaggagctcatgatcaagaccagtcctccctgggtttgggggcttttgaaagggcccaggtttagacatcaggaaacctgtatttgaggcctgactctgccattaactgagcctcctggagtgattcgcttctcatcccaagccttgcacagactgggtggtgattcctgaggcccagaacctggccagccttatagcgtcagtcagggatgtgttagtggagcccttcactcagcgaaagcatagctggctgagtctctagacagagagtgtgttgttcaggctaaactatctccctaccatggacataaaatgacatgggtakagaacacactaaattcttcaaggtaacaaatttaaattcttcaaaaagggagtggctatttaaaatatctctagttcatttttagcattactgaaattcaatgtaaatcacagtggccatatagagttgacatataaccctccctctgtcaaacaccaggttactaaagtcacagggattaagaaatgacccttggtaacaaaagttaccaatgtagaccagttatgtggcaggtggggagagctattctaaggttccttctaactccaaggggctcagatcggatatttggcaagtaagcaattggcacactgacsctgcagtttacaaagtgattcctacgatcctgagggtagaagaagattttgctcctggcagaggttttgcaggatgtgggtggggttggagaggaggctgctgtgagggtagaagggggtaacctctgtcccttcaccatgtttatcttgccatatcaccatccagcattcacagtccattgcccaaaataaaccacagatacaaagtagaaagatacttcatctattttctaagtaaatctaggaagttaaagatcacagctgtctccaagaccatgcccgttgagtaaaaatatctcttggcaagttgtcctacatcaattttttttaatgagacctcttttttcctacctagtattgataatttaatagctctgcaaaaagtgcttctgaagcaagaaaacttagtattttctaatttattctctgggagatttgactgctaatcaaatatcttaattccctccatacttaaagggggcattttaaagtgactttcccagccgttccaaattacttcttgaggtttattgtttgcttttaaatttatgtccaacatgggctctcttcttggggactgagctgtttcagaaaatgatggaaatttggggtgaatctaccaacagtgttcagtctttccaaaaagacagttcattaaaagctgaaaggtttgaccctctggctctatctttttggcctaacatcctaacacaggtgtggacagggtcaagcatgcaggcctgtctctgatacctggttatagcaaggctgtccttggcatttcacctccacctcttctgcatcatacattgtttattttcacctcattattccattcctactccatttggtgataatccactgtgtgctaggcacccttctgggcaccagcatatagaaaaatgccttagcattcgtccctgccctcaaaagggccttgggatcaagaagaagtggacacgagcacatctgactaaacacaacatcatggagggtgtatccaggatatgagcaaaatgctcagagacaactctttttatttacgtcacaaatgcttctacagcacctactatgggccaggcatcatgctaataagggctttaccaatattaattcatttaatcctcacagcaacccactgagatgaatactattcttatcctttggtactgtggggaaactgaggcacagagcagggaaataacttgcccaaggttacacagccagtcagctccaggtggggctcatggggcatgggccctggagcccacacactctgactccagggcccacactcctaccgtcgggccacactgcctcacaacacactttctcgccaaattcagagacacataactaaaaccacttacaaatggagtatgccaactgagaatgctacagaacacattgaggaagtgacatttacactaaaatctgaatgatgaacaggagttaactagactaacaggggaggaagtgggttgcaagccgtggttctgggtggggaaggagtgcaatgtgttccaggaactcaccaaggccaccagaaaaggagggtggaaaagaaggaagaaaacagctcaagaagaggctaaaacatgagcagcaaccatagcattcagcaccctcactacaggccaagggtcattccgtagttgggttccrcaagaatgataggaacctaacagctttggcaggggtaatagcatcagytatgcatcatccactgatcacttgggctgacatgtagaatgcattggaagaggacggcggggttaagcagggagaccccgggggaggcagcagcaaggagagagttgatactcccttggatgggctggaggtggataaaaatggattcaagcgagttttaggagacagtatcaacatgttatgctgcatgtttgcttatgatgggtgaggagagggaggagtcaatggtggctctgaagattctaggtattcacagggtcgggaagcacttgtttgtcacmggtttgttgggtgccggaggggaagaaagtcccgtgcaacagccacatgcaatgttcatcactcccctggctctcaggctgcttcagggctccagaccctcgcacgtgctgatctcgggctaagggctgtttccttccttcgactgaagacctttcatactgtaagattcagcttgaaagtctctccctccatacacatcacacgctgacactggaccaggcacttatttggatctcacaacatctctgcaaagaagatattgctatgcctgttttacagactactgagaatcagagaagttccaaagctgccctgtcatttgtggcataagcgagagagcccactgacatcccagcgctgccttcccagccacactgagggagaggtgggcttggcccttgaggccccttcttctcaaaggcattgaggttactttccatgtagattacggttgagaacaatgagaacttctggagcacattctgtgggctgtgtgaggacgtcggcaagggaacagactaagatggctagaaaatgcccctctttcatctctagaattcatctagtgaagcacttcccaagcctcaggtatccagggtctccctgttcttcctagaagtaggttccagtgaacagaaagcccacagcataactaagaaaaagctgtgtgtctctaccatgctggtgaatccatgctgctccttgacctgccactccttgacatggacggctctattctaacagtgccactctctcatgtcactgtccctctgcctggttcctcctcctctcttatctgcctgsagagtcccactccttggatgagtctcacccagagcatccctcccccatctcctcaggctgggtgtagggtgaccagctgtcctagtatgactgggcctaacggatgttctggtttgtgggactttgggtggtatatcagctcaatcccatgcaaaccaggatggttggtcaccctagttaggcatgtggattgcccctgcttatggcaagcccagcaagtatccaagctgtcttgcactcattggttctctcctctgctctttccccaaaagtagttatgaccctctgagatgaagccctgtgccttgttcatcactgtattctcaacatctaggcctggtacagaccaggttgtgtggtcaatgtttgtgcaatgaacgtacgagcccagactcagcatatttaggagatggctcctaccacccagcaattagagaggggaggcaacgcaggcggaggacatctaccaatgcagcacatragcaagacacagggcctgagaataactgaaccctggcccacagatgccaaagaactggttttgcttgtttgtttcatttgccagtcagaagcgtgggggataatttagtggaatcccttcacagataggttttaacttgaaataaytcaactataggtgcttggcaaacaatcaaatagtgaacaggcccaagagagaaggaaataatttagatggcagatggcagttggctccactagaagtgccacctggtgagcacgggcccacagtgggtgtgaggcgggacaacgggggcacacttccctcctgygtgtgtacctcacactgtgctaggatgattatggttctggcatacaaagtcacttatttttcatgcaacctggtccctaaacttaagaaaatgcctttatctggtaatcaactgggaaaaacattggctgaaccccatactttcaagtacttatgagattttcaaaggtggttcttacacactaacttaagagtccccagatggtgagtcccagctgcgccacttcataactaaatgatcttaagtagctaatgacttaaccttgtagagcttccattctcatgggcaaatgaaggataacatctctccctcatgggctcacagtgaggattaaacgaagggaaggtatgcacaacagttagcagactgcttggtacaaagtaagcgctcaataaaccaaagctattatttttagtggtggtaatagcactgcttttctttggcatttaaagctgtgtagctaatctgggcattccaccaggttgctgaagcaatagacggccccttaataaatagcttccagacagcatgtcatttaaaactgaatgcatttttgcttctcagttgttggacatattatttactacctgatggtcttgctctggcccaaacaagctaattattgcaattccagagtacatgccatcatccagaaatagctttctgtagagtggggactgaaattaacaggcaattagcaagtttaaaaggatttcctttccccatccccacccctggcacctctaacacattaaagctcatcacagcagttattttaaggaaattcagcagaggtacttgcrgggcccraggtcatcttgtgttggccctggatagatcatgaaatcctgttgccaaggagcatggtgggaatgtggcaggaaggctaaagtcaggaaagccacctcagccactaagtagccatatggcctggggcaagccactactcaactctgagcttcagtttcttcatcagtaaggaagtggccaggcacggtagctcacacctgtaatccagaacttggggaggccaaggccagtggatccctcgaggtcaggaggtcaaggccagtctggccaacatggaaaacccccatttctactaaaactacaaaaattagccgggcatggtagcaaacacctgtaatcccagctactcaggaggctgaggcaggaggatggcttgaatccaagaggcggaggtggcatgagccaagatcatgccactactcccaagcctgggcaatggagactccatctcaataaataaagttaagaagttagactgctcaattcctgagactccttccaacccagcaatctgacgtccacactggggctgaccactgaactacatggaggcacatgcctcagtttccttatctacgccattcatctaacagctatgtatcaatccctgttaggcactaggcactgtgctaggtgtttggaagagtcattctcaggcctatcctatctcagcaacctgtaggaatgtcctcacctccagagttagcccccttggaaggaaaatatttagtcccacattcatttctttcctatatgaacctggaatcactgggggcagcctctctgaactgccccattttctgaaaagtgtccgaagtacagcccaggcatggggcattcagcacaaagggcccaagtcttgagagggagtagtttaggagtgaagaaatcccagcctcccactatccagtcttaaggtaaaaagaattgtacagatgagcacctttcttccccttggtatttccctttggcatgacccaaagaccactcccataaagggccataccctagtgttttctgacaatctagggatgaattccctattacatctcaggatgggagaaaaacaggatttgggagtyctggtttaatcactaaatgaacttaatcttgacttctggttttgtcatctgcaaaaggcaagtggtcctgatggctacttaataaagctgtctgtgagccaaatgagagtgtgcatctgcaagtgcattgtaaactgcaaaaataattgtggttctctctgggccgccttctacttcacaacaatactgagctgaccttacagataagctgaacagatggttgcctccatggtagtatttgaatagcaccagaaagtttcacctctccaaagcatctttctgctggcctgaaattcaaccattagggattcattttgttgcggtgggggggggggcggcttacaagcttcccagggttcaggagcactctattaaatagctgttgtaatcacccagcaggttcttcctattcgctgcatagacaaaaccagttcaccaagaccacgctattgtagtagagtttaacacaaagccagctacgcagaagacagttattactccaatcagtctccctgaatgctcagcggttagggtttttcaaggatagtttgatgtacaggggattagggaatgggtgctgcagattggttggggatgaaatcatagggttatggaaaacggtccttgtgcactcagttggcctctgggtgggggccccaagactggctgagtcatgagcctcaagtccggatgtagtcagtctaaaaaacaactcaaaagatccatcttaggctctacaatagtgatgttatctacagaagcaattaggcaagtcacaaatcttgtgacctctggccacatgacccctgagcagtaagggatgayagaaaatttgcctatatcttagcagaattcaggcccctttcataatcctgaccttctggcytttcactggttttgcaaaagtggttgagtttggggagtggctattatccttgctgtaaggttcaactataaactaaattcctcccaaagttagcttggcctacacctaggaatgaccaaggacagcttggaggttaaaagcaagatggagtcaactatgtcagatttctctgtcatcatttcacaaaggcagtttcactgtgacctgctaatactgtgggraaaaraaaaaaacagtactcattgggccttaggcatattctaggttctttgcaatacttaattttgtttttaatctcaaaccagtctgagacaggatttactattcagcacatttttgaaactgggaaaatgagtctcgagatgtttaggaaacttgctaaaaggtcacatgagtgacagggttaggacttaaacatgcgtggggtcgggaagatggcaggcacagggtatcaggccaggggagatgccctagagccagcgacactcagcctacttaacttcttctaagagccggtcacctccataaggacagccagagcttctgccaggaaagaaagaacgttgatgctattcgttttccaaaagagcgtatctcctccggctaatctgaacrtatttcttacagggctcttgaatgcccctttgtagctgagtgggtgaaacggcatcaccaacatttggccctgctgctccactgagagccggcgccgttcgcgggataattatcctgtagtcttctcacctccggagagaatgcaaggcgccctccttccaaatctggcccgtcacgccagcaccacttatttttagaagctgttttcccctcatagtttcacaacctctaatctgccactctccagtgaatataaattaaaacacaacaatgaaatatggagaaatgttttctcccgtcatctccagctctctgaacccggggctgggagtgggtggagcgcctgatttgtctcccaggcgacacggaaagggaggcagtgagacgtgctacctggtcgcttccggctctgatgaaccactgccarccagttattagggaggagggcagcacttgcaaaaatttcaggtctctgagagcccagagcctgagaagtgtggaggatactaattacaccmaggtggaagcctggccacagctcacctcctaaggaaagagcgagcccattaaatagccaggaaggaatggagttcacaggggattagatttctagattatagcctcagagtcattctcaaatttatctcctaaaatctggaggtcaaggaacaaaagcacccttgaagaacaggtaaagggagcctggtctgaattcttagctcctgacagccaggccgcaagaggacagacatcccgtgcacacacgcccgccccatcgccaaagaaagctctagagctagacacttagactggcctttcatgaaatgacagcacctgccaaacacaatagggaaatagttagtccagccaggcagtgccatagagtggtcagagcatgggaatttcaagcagacagcagcaggctttaatcctcactctactctccccagatgtgtcaccaaggcaagtcactcagcttctctgaggctcagtttcctggcctgtagagtgggaataattataatactatcttggttgtcaggtttaaaagaccaaatgaatgtcactgcctggcagactacttaaaacaataagaggtgctaaagttactttaaaccaaccytctccaccctctccttccccacctcagtttcataccccagagaccaaattcctgatggattcctaaatgatatctctgccaaatactggtgccaggtgctgggcaaggcacagttttgcaaccagctgtcaggcagcaacaacttcacagtcgtacttttattcagtgtgtggtaaaacttctgggacaagagtcaaagtcgtagggctttagtgggaaactgccattgcctgaccagaggtacaaagcactggcccttccctcatccctggcctgacctaagagggctggggtaccacaggactgttgaccccactgagagctcagggtgccagaaacactgcctgccacgtgattcytattggtccttccagagatgctaacaggcctggaggctggaggtctctctgcccacactttcacacatgacctggagcagggggtcccagctctgtagctgcatttctgacccagttggataccttgacatggtcccagcaagcaacagagcacccattgtacagccttccccagccccagagagggactgtccctgccaagaacagaggtgccacccagaatctgacagcaggggaggctccccaagcattctacccagaagaacaagcaccctccccagatggcctgtggcccaccctgccctcagttcctagcagatcctcaacttggcctgctttgatgtttgtgaatggcaggtaggaaaggtcaggcaagtggaagaaacctaaaaccatgctctctatggccatggaagcttcctaggtattattacatagctgtagtatattaatattactgtcattaattgatattattgtaatgttactataatatacatagccataatataaacacattataaagctgtaatagcttatctttattctactatgtggcaagtctgtactaagcattctcctactctaaacccccacaaaagtattagctatgaactatcattgaatttcgttttacaaacaaggacaatccaaagaggccaagttacctgcccaaggccacacagtccacaagagcccaagttcccactcaggcccattctyttagctctgtgccacccagctctgcaaatgtagccacccaaagccaatcaagccagwggtagagttctaaaaccaaatctagggctctgtcccaccaatctccacctggtgcctggaattcctctatttttgttttttgttctgttttgttttaaagtttcactcayccccctccttaaacccaaatatccctgggacaggatggaaatccataaacaggtgcctgagtaagacatcattcacagagccttttcctcctgacagctggccaagaacaggagagggggccctgggcaaatctgcaggattacatcagagcttattttcccccgtatgcccctaattttctacatgctcttccattcctgatggattcctaaatgatatctctgctaaatcctggcgccaggtgctcttccattctcccagtgatccagaactttcttgctgtcatgaagaaaactgatttaataagtaaactcatacttaggaagcttcccatccaccctggccccccatggtatctcacatcatcatcagaccaaaagaacccataccctcatcagtgatgactcagcaaaatcaacttcacatgattaggaagctcacataactagcaaggcgaggaggttctctctgccggccacctcctcccgccagcactccaccacagcctgcctactgtctgcccgtttggactagcagctggtgctgtgggatctttaactccactgaaattatgtcacaaaaytggggcatcgtagggaacctaggaaaacagacaagaaataaagactccatatgtgcctggcccacacccgagtttggctcactatgcacacattagatcctgccattcacaatttaaaatatatatwtatttttttgtgtatatatacatatatacacacctagaaaaaaagtatgtattttgtatatatacaaaatttattacrtataaataaaatttatacaaaatttattacgtataaataaaatttatacaaaatttattacrtataaataaaatttatacaaaatttattacgtataaataaaatttatacaaaatttattacgtataaataaaatttatacaaaattttgtatatatttgtatatgtgaaatattttttaaatgttaatatatctataatatttatatatttgaatatataagtttatatatatttatatggctcactataaaagaaattgaaacctccttaagcatgaacaactcccacgggtgttttcttcatgagacgcacaggaagatggcaatgggtactgaaaggaatgaattgcttgtgggggaactttatttactagaacaaccccaggtaggaggagaggttttaagaaatgagagtaggggttctggaggaggtcaccttgcctcctagtacagaggtaagactccactgaggctggagaataatgctcatgaggagattggcaggccccagatccctgcagctactgggacagaggcttcagttccttgccatgggggcctctccctaaagctgctcacaacatggcagttggcttctcccacagcaagagagagaatccccagagagagcaagaggctccacaatggaaggcctagtctttcacaatctaatcccagcagtgacatacccatcacttctgctctgttattggtcagaccaaccctggtgcaatgtgggagaggaccacacagggtacaaatcctgggaggcaggggcccttgggccatttgaagggtggttactccagcaggtacagagtatggtgagcccacatgaggaggtgcccagattgcagccatagatccttgggcaggtcatccaacctcatttacgctgtttgcacttacagaaaatgagaataatagactcgtcagggcttggcaatgcctatgaaagtgcattgaacaaagggaagtatgctgcagatataagacaacatggttttgattgtaattactagtaccagtagcacatagttgtgaggactcctattctgttgagctaacagccctgacccacctgtatcaatcagtgccaatgtatatttcacattgccaatacccagcgtcagataatgaagttttgcaaaatacagcttgggtgggatctctttaatgacctgttaaaactgatttatagttagctttttacctgaatgcacataaggaatctggagttcttgctagttcttgcttggaaatgatctgtttcttcatctgaatgtcctcccttcatctgatttccttagcaaccctggtttttctgttttgattgacaatacaaaattaaatattagtccagtccctcactgggctatcacaggttccaaaacacccagccctcatgtcattgatccaacatcaaccgttccaccggtccttccctcccctgcccccttaccctgccctaagggctctcaagacagacctgtttaactctgggcatttagaacacagaagactttctcaccagggaatctctctttctaaaatccccacagagctggtcaagcaagaagagcactggactacgcatcaagacctggggtgctgatcccgactctcatccttgactgcagtgtgggctgggcaggtcacttcactgctctgagcgatttagttctggttttgaaagactgggtgattctacccattattcactgagcacctctgggccttctattatggcctcctccctttcctgccctgcagctccctgccaaaaacaaagcctatgcaaccttcgtagatactcttcatagaatctgtttctctccctgtgggctctttccttctgagcactggcaggacttaaccatatgttctaggcattgggtgtgaaaccagcaaggcttggtgctggaaatttagcctcatcttcccaaccaccatagctaactcttgtcaagtacttgctctgtgtgccaggcactgttctacctcattaaaacttcacagcaacgctgaagtggctattatcatcttcattttatagatgaggaaattgaggctcagagagagtaagtaacttattcaaagtcacccagcccacatgaggcagagccaggattcatgcccaagcagtccagaacccaagcacgctgtcttgggactggattttctttccccatgaagaatgtaaatttcttaatcacaggccctgtttattttacacacagtcagcatctrcaagtctttgttaactgattacaggtttctgtaattctaggcatgttaagcgtagggtcaagcataaactctgtccctacctttccagaacatatgctctgatatattatagcagacaaatgcaaaatttccaagactcgtgggatttagaagggatttttctcaactcttcttttccagataagaaaagggaagcttgaggagattaagttacttctgaccacatagctccctgctgcagaaccaggacagaaacccaagccttctcatccctatcacgagttggatctagggcagtggttctcagtggttctcaactgggatggtttcgctccctcaccccatgggacatttggcaatatctgggggcatctttgcttggcacagctggagaagaggatgttactggtatctagtgagaagccaggggtgctgttaaacatcctacaatgcaccagacagccttcacagtagaatcatgtggcccaaaatgtcaatagttctgaagttgagagatccattctgtgggatttaccacttcctctaaggctctttgtttctgtatctttacaagcagtcatctacagttggacaccttgtcttattcatccttggctccagtgctcagagaagtgcctggcacgtaataaaagctcattgaacaagggagggaaggagagagggagaaaaggaagggaaagaatgacagaaaaagatatcaggctttcctggcaggcaaagaaagtccaacactataaatcaagacctctgttcataaaacagaagatgtctgactgtttgaaatcaattcttgtatatcattccagagagaagactaactccgaataccttaattatgcgttagcacaatttagacgaatactcacaaaattaagcagagaacccaagccctgctacagaagtcttccccctcaaaaaaaaaaaaaaaattaagatggagtctccctctgtcacccaggctggagtgcagtggttcaatctctccagggattacaggtctgcgcmactgcacccggctcatttttgtatttttagtagagatagggtttcactatgttggccaggctggtctccaacccctgacctcaggttatccacccgcctcagcctcccaaagtgctgggattacaggcataagccacygcgcccggcccttttaaagtaaatcttgattgatggacatgatgaagtccgtgaggtacaaatgcactgccttttacaaaagtaactggttccttggaggtgtccattgggaagatggcagtagttagagctgccactgaggaagacataataggcagctctcattccaaggcagctgagccacgaagaaggctggcctgagtggtcagtgtgcagtaaatccaaatctttaaatgcagttcatgcttcacccccgaccgaatgacaaatggctcccccgtcagagcaagctggcaggtgatgcaccactcctcccctcccctgccacccgtggtgggacaatctgtcagcagccactaattctcaggaatggatggggaagtgggggaagtcaggctgtgtttattgggcaaggagaaggggtctctgagcccaaagaccttcttgggaaatgcagctcctgcmctccacagcaaataatgctcaatgaccagtcagggagagcttgtctgggctctcttcaagctatggggagcatctagaaaatgccttgaaaccgtcagatggaaacatcctctcatcttcctccctcctggaagcaatgtgctccgccgctcttccaaacccttcctgtctctactggtacacctctccaaagccctctggatacctcccatgatatgcctttcccaggctccaggtcagcacaatgctctccccactctattccccaaatgcatacctgtctccatcgcagacaccttcacatgcctggctggcaggagctcagccctgcccatctgcctgtctttgttgtgcgaccaccttcagggtcctcccttgggctcagcagtgagctgacttgccatggagccaatggagcttaggtgtcaagatccttcacttgcacaagcccctttcaacctcctctcccccaacacacaattatgtattcatgatgtattttttttcttaaagaggacctccaaattatatctaagattcaggctctgtagaacctggctctttccggccaaaatatgatctttacagagctcaacatgccttgcacacactaggtgtttaataagagctgaaggatcaaagagaatggatcctgaccatgattacaattaattaagaaagtgattaacaggaaagggaagattggtgtttctctcaggcgagctttcctaattcttcctctaccatcaaactgaaaaaagccaatagtctcccctatctcaaatccaggatcctcggaagggtttgttaagtcacagccagctggaccccacctcgcaaggatgtggttcmataggtctagagcgggacttacaatctgcatttctaacaaattcctggtgatgttgccrctgctggtccgaggccctcactctgagaatcactttgagcccctgcgttatcartaggggccatattgcccccaagagggtgaaattgtatcttgaggtgggtgatgaaaaaagtttttattataaagcagatatatatatatacacacacacatatatatacagtacacaaacagggtgcagtatatccctggtgctaaaacttcacgggtagacaattagggggtaaaaatgtctagaaagactctttaggggggcaatcatgataaaacattgagaaacactgacctggcccaagtgcctacttggtgcttactccccagcagctgagccagaagccctcacctgcagagacctgcagcccacaccatctgatactgtggaagaagcattagactgggagtcacaaaacccaggttcaaatcctagctctgcagtaacttcaggccttcccagccacacccacttcagcttctgtactgaaagagacaaagttacaaccaaaactgccagggaaagaatgctgtgcgtgcttggaagagatacatgagggggttgtttatacaaataggagtgagcaatactccacagggcattgttgagtagcaaaagcaacacattaaaccatctcccaaggaggctgggcctgtcaacggccttgcttcgctgagcatggaaaagcacgtgtcaggcagagcaggattactcggcacaagagaggccaggctggggtgggaagaatggagagacagtgcctgccagtgacaggctggggcagggygwgaacaccagggaacatgcacaycgatcctgatttgagcaagtgttctcagaggcagctctataaattccttcaccacccctaagaattttgtactttgtcgcctgcctctaaacaatgcctttggggacagcagattctttgggggtagagccaaaagaggctgagtctactttaatgttatgctggctcaaaaacagactcacacatagtgggaaccaccagactcctgggttacaagtcttgtgtctctgttaactatgtgtccaatctcccaggccctaaactaggattctttaggaatgagtatgtaacaggaaagggaagatctgtgtttccctgaagcagctttcataattcttctaccatcaacctgaaaagaaccaatagtctcctctatctctaaaccagattcccatttcttccttagaaactatgtccagtcagccaccgaaccctataagttgatcccagtggatcaactcttccgctccggtttctctgagcacctaggaactggtccctgtgtctctcctggggggatccatttcttatccaggccccagctctgcctgtccagcccaggagccacccgaaatgctaaatctgtcttcttgctaaacaagttggattgtcataactgtatagccctggtctaagtgaggttggataacagaagtggtctaggaaaactgtgtcctggggaggaggtaaagtgataaataggatgtggtcacggtgtcctaggcagtagcccctcacaatgccagtggatgtcaggatcacgaatcagggaggtctgwttcggtagaagacatgagttggggaggtctgatttggtacaagagatccagaacttgtgtccagctggagtaaggagagtaaggtatagcagagacaggacaaagtaaattggacctcagagacagggcacggggcagagtctgattccaactgaaacgtaaggatccccacatccctcaacagtccctcagatggtgaggtttaggacacagtaaggaggggtggaaagagcatgggtttgggtatgtcttccctcatgaaaaccgtggagccagaagcagtagtgttacagtgatgtcatcccctgaggctcagtttcctygtaggtaaggtgggaatggaaatgackgctgcataggctgtgagatgattttgtgagatgtaagcgcccaacagatggtggtgatgacgatgttggaatcaggtgactctagcctcttcactgtcacgcttgctctcgtctgaacgtgcttccatgtctccatrttgctcttgtgtccacaagcaaaagcaataatccattgccatttaaccagcacaaaactgaatgaggctgtcaccttccttttctgaaacacatgcttcagacagcgcagtctacagtcacttgagggctgggagaagatgctgtacaatatttactcctgttgaaaattataatcaataagtccctgactgttttcatatgtgctgctactaagctaccactccctgaccttgagcagatagatttgggatccacgtgtagccctgttaaattttgtcttttcagatttagtctctccctctctcttctccccccaccacccccctctccccccaccaccccccttctcatcctttttgacacttttagatttgatatctcttctagcttcttgacatctgaaatgtggtgaactcatcctctatattatccaaatcaatgacaaaactcttgactaagacaaagccacgtcaaaacacaggaacccctacccccttggaagacacaccaggccattcattgatacttttggggtgcattgctcccattagtgacacaaccttaccattctcgcagccaatccatatttctcccatctttcctcatgggcatcactgagaaaccttagcaaatctgcttcccagacccttctgttctcctttcactccctcatttgatcagcctctgggtcctgctgactccaccttaaaatgcctcctgtgcaccctttcctctgcgtctctacaaccgcacgcctcacagggatttgtcatctcctcccagaacattgcagtgatttcctaacaggccccctcgcctatatacctagactctttctgggagggatttaaggtggctcagcctatgtatattcacatgtctccacctactcccaatgtgatcattacctagaggcctctcatacttttttttttttttttttaatrcctgaagtttttttgtttattcctttttgttttccagctctacccaccagtatttttttgttgatgacagatcttctcctaaaatgacaaagaatttagaaacattttccatgtatttttaacatctgcgtcagtgaacaaagaaatcatagttgatgatggggtggggagggagaaaagggaaacttaattagctttagtttttataagaacttccatcagcgctgaatgaactggaatatgacatctgattgggcctaatcacaaggaagagtacattaacttgccgtgaatatatttaccagtttttacaataccatttttaaatctctacagaagccaattttcttacaagaaaattaccctaccaagattttttttagaacaagcaaacccaaatttctttcttaccctaacccagttcatccagctctgacactgtggcctgaggacagacactgatgctatcttggagcctctgcctctccacccttcaggaatgttctgcaccctgaaggaggtaggaaaacttgaggatgcaaagaaaaaccagacatctgttatgtctcttgatgttagggagtgggagtgaaattccagctcacccactctcctggggaggctagaatttaatgggatgcttgagatgcgtgggccgagggtgaggctgcagccaaagatgcttgaggctggacctgaaggtgatttagtgaccagagggcaatgccagggagagagagccttgcacggagttagtgacactacagttcccagagtggggcaggaagaagcaggcacaccatgacatcttctcattttctttccttctctgccgttccccagatgccccctcaccaattcatcagccctttctttccttccacacaagctgctcagcactttggctctgctctggaaacatttccattcctgtgctgctacagaacccaccctccccaccagattggatgcacctggacagcaggattgtgacttagctgccatcccgagttttacctggcacacgcaggtgctaggtagtattccttcaaaacaaggaaaaggtggtgtcgcatccctacttagctcctaccgttgggttggtttgcaaattttgcattgaattccatgtaattttctcttttttttttttttgtttgtttttatgaaaacgtatcatttagcctgccttaactcttgctttgaggtcacaaatgtcaaagtggttaactccaagtcacctccaagaacattattcctattgggttaaggctccacccttttgagctctaattatctccttaatgtgtgagaactgggggaatatgttcccaaattagaaataagttctctaaaactaaggcttccaatgctgaagagaatgtacaaaatgagaaaggcatactcagtccttcacttacacagtcaaagagcaatttttagggcactcccatgtgccagacagcccaacaggctttagggaggcacaaggatgaagaggacatggttatcagcacccccaagcaactctcagcctgtagagctttcctaatcattcaacaggtatttgaggtgctgaaacattgtttaaaaaaaaaaaaaaaaagcccaggtgcaaacacttctatcagatgtgccatgcatcattgacaatagtatacacatattatttataatatgtataggtgctttataaatattaactcattttatctccataataactgagctatggacaataaatgattattatggacaatctcttaaccctcacaattcagacagtgttgctaatcccatgtcaaaaagggggaaactgaggtgcagaaaagttaactttcccagagtcacacagcctcttaagtggtagaaccaagattttatttgtcttcctggtgtaagagaacttggtgggttccttaaaccctgttcaggatctgtcactggatttgcctgttgtgcattcagaggctggagaaggagtggagggggcagagtccaaggtaggacactaagagtcagggagaggtgatttgtgaaaggctttaggggcagcgccagcctctggataacagggaccctggtggtaccaaggaatcattggcaggactctgggagatgaggacttggtctgcatggggcagcacctcgcatctgatactggcgcatatcagcaccctactggacacattcaaacaggcagcaccctgtgagtgtctcagcaccagcacatcaaccttccaattcaccaactcactccagggaatgtgaagggcagggttccactgggccgcaccacccagcccggggtggccccaaaggcagaggggatgtgagtgctgtctctgtgagcctaagtaggccctgcacctgccagagacagggcacagagcaagtgtctgagggcaagtcacctggacacagcagtggcagaaaccaaggagtaggcatgccaggcaggtctccagcagcctctgagtttccaggcacagggcccacaccagggtggactttttatatgtacatacacacccacacacccacacccccacccaaacacacacactgcaccagtcccgtttcctcagatggacatttttcagaagaaagccaatgacactagcaagtccatgacccatttcaagatatgacaggacatcattttccaagtggagaaaasaaaaattctcagaaagccctgtataccacagaaatccatacaccagtttcaagtctcatccaacagaccagccagagtgcagggccacagggcaccctggctggagtgaacaagctccctccaaaccccctcaagattctaggcccaccagcataaaagtcctcttgatggtggggtcattccaaccccatctggggttgtaacctctcagagcagaggaaaataaacaggctgttgtcaggcagcccagggcagaagtgatgacacctgctcattctgaatttatctttattatacattatggccacctgtggaccattcagaaaagatgctttttgagtctcaagcaagtgactctttaagccgaatcacaaagaaattcccattttggccagttctgtttctggacgtcaacacccccctctctgtatgaataaggggtcttccagatggccaggaacagcactcaacaggccaaaacaaagcagagggtggcttgagaactacactgctacattcagcctgaggcccagcatcgacctggccttctcccacttccaacaactcattttgtagctttttggttaagaacaaatttggatttcttctttttctcctcccagtaatctcaaatgtatcagaagaaaggaaatttctaccattattgtcagaaacaagacaagtaaaaggccatcctcaaatactagtgttctcttcaccagacagcagcacacgtggagagtagcagatctctaagcacgacccagtgtgtaactccaaatggccccattatcctatctcgaggagagctgcgcatgctgtaccctgttttacatggcctgccatgcttctggtagcaaagcagtaatctcctggttatgtagcactggggatgccaataacagccagataaagaatagaactcatgaggccagttattttcagtcaaaccaagctacaaaaaccacagtcatgcagaagctggaggaaccaccaaggcaaagagaatggaaattcccttatgctagacagcacaggtccccagttttctgggrcatctgaaacttgatgtgacagcactgggagaggccaacagtccacgaataggccaggacctaaggggaaaggctaccactctacagccggccatcagggtgctgggctacagcagggctggcaggagcagacggaggccacatgccaactccagcctctgctacatatggtcccagcccccctactcaccagccatgyggcctcaggcaagtgggataatccccgtgtctcagtttcctcatctttaaaaagtgggataataaaagattcatgtactttatagggttgttgtgaggatcaaatgatttaatatacaaaaaaatgttgacaacagggctcaacacaaagtgtgctcaacagctgctgttggtattggtggtggtggtgaatggtctgccagcttggtagggatgtctatgaagtgggacaaacatttcatgagtatgaagatagactgttcagatgatactcatctaatgccattggcagctcctctctttattgtaccaagatctgtttccttcacgtttcacccaacgtcaaccagcccttcccttctttggactaagtctcccttcaacacatcctcaaatgacacagtttccagtcccctcactcttagtcaccctccttggaacaagctcaagttgctaaacaactatctctaaagccagttcccacccgagccaacattccaaggccaaaaaccatcacctctatcatgagttgagtatcctgctttcattaggggactgcactgacgtggctgcaggttgctggtcagccctagggagccagtaccatacagccccgcgagctccctcctcacaagaggcggctgttgcctccttgtgccagagctcctgggctttggatagaggaattccactgcttgggtctcatccttactcaccaacttggaggaacttccttagagtggatggcagccgcccctccccactctgtctctgtggtgtgtgccccacctaggctgtgtttgggtgcctgtagtacctcttcctgttcttgtctcaaacacacacctgtggggctcctttcccagcaccgtgcttcacaacggggctctccttagcccaggaggggagaggctgtgcagaaaggagacttctatgacacccttggggcaagggtgttgttttgctccttccatagatctctgaagccacagctatgcaggagaacagaaatagaagccagccacacccagtcttctttggcatgggcacgttgaacgggctcagttctcctgccacgactgaaagggcaccctcccacagaaggcacatgaccactgttccaagacagtccagatcaggagagaggcctttgaccagggcaaagcaggtgctgatgagaaggcacagcaaaggtggcccaagccactctgcctattccctatccctcccctgttaactccactcacaattccaaacccagagccctagcttctgagatatccaggtaggcgacaagattttctttctccacatgatacagactgctgagaggctcccctaacaaagcaccagtattctccctgaagacacaggctcaaattatgctctattcaaagctggctgtgttcccaactcctaagccctgctggctccctctgccccccaccctgacgtgggggaagatgctacaggtgtgggggtgtgttagtccattctcacactgctaataaagacatatttgagaaatacccgagactaggtaatttatagaggaaacaagcttaactgactcacagttcagcatggcttgggaggcctcaggaaacttacaatcattgcagaggaggaagcaaacacatccttccgcaaatggtggcaacaaggagaaatgcccagcgaaggggtaggggaagctccttataaaaccatcagatctcgtgagaactcactgtcacaagaacaagctgggggaaaccackcccatgattcaatgatcttcacctggtccctcccaggacatgtggggattatgggaactacaattcaatatgagatttaggtggggacacaggcaaatcataggagtggggaaaccaggagaacagggaaataaaattggttttcacaatagctaaactttccctatcctcttgagagtatttctaagcaaaagagaaatatacttttctttttgctttctctaaaaaaagaaggaaagaaggaaggaagaaaaaaatggagggagaggaggagggaaggaaggaaggaaggaagcaaagaagaaaggaaggtcaaactgacttgatttagctcattattaaacatgcaaataagaaaattcctgttcttggaatgtgatcagtcatctgcataaggtcttgcgacatatctacgattgaattatttctttgaatcaaggattcccccggccacacacaaatcagtacttgccttactttggaaaacgaaaagagctcactaaagtggtccctcttataataaggtgagagtggcctctaggacaaatttcagcttgtacaattctggaatacagaaagggtagctggctagcgacctttttccatactccaccaggcactgtgtagrggctaagggaaagcttcccctttgccctctgaaagctcactgaaaactcacagaagacagattagtagaagaaaaggcatacgaatttattttaacatgtctagcactggaggatccatagagaacaattacccattaacccttcttcataggggaaggggagatgggggaaatgtggcaatttgagggatggtaaatgatttttagggggagacgagtggacttggggaacttacaatggccatggacraagtctgttgggacttcagagcagacaagggctggtaaatgattctctttgaaatactgaatgagcaccaaaacagaagacgatggtttgtgacaaaatactgtccaggtgtgttgacagacttcagtctttcttcctgtgatatgggttcagttgatgaaaactcagggaggagactagaggtaattgctttcttccttggtatttccagactttaggcagataagggatgaagagaacaacttcatccagagctttgggagagatgaagaattgagagatggggtagggccaagggtggggggtagggagtgaagatcagagagaccctgaggctcttcttatttcagcatgtcaaagcaccatattttggggtaacagttgctgagccccaacaactgccaccccatagtcaaattaagccgatcatccccaaagcaatattagtccagtccagttcctctcatgacaaatgacctgaacacaggattcagcgagtcttactcgctgtggtcattttggaggtagggagatcattaacccacatactttgataaaatacgaaacgcctttcctagctggttcttttcctctcctataggccgacccccctccatccctttattagtattgaactgaacaaattagttaatatgggaacatttggatgtatcaactttgctctgaaacaaaaatgtattcatccccaaactctatgctgggggctgagggagagtccttacgactgacatagtccccaacaaggttctcattagtcccagtttttttttgacaccttttcctccgcattcacatccttctgccctctccagcactgtgcaggaagaaccaaccaacctgaccttggtgaaagggctgtgggtttttcaacccttcattcctgctactttttttttttaattttttagtattcttctgtgcatcctttcttctctcctaggcttctcacccagcctctctgttgagtactacttgtagacagagctccctcattcacaacatcccaatgtatttgtcctgtatcaaagcaaaccttatacagtagctcttttaagaactgctaaaggaatgaaggaacaaaactgagccaaataaagcaaaatgaagaggatatgtatgcaggcaattgtgggaacatatcaccagaatcctctcttgttattgtacccaaatccacacattctcctcagtgttgtctgggaaatacatcaatccactgtgaatggtttagatagaatagaatccatcaatktcaccagcttsattcctcctcagatgatgagccactttctccactccacctccagggctggccccagtcttcctaaatgttcattaactcctattaggtattccgaaactctcaggttttctgagycagcatagaatggttggaaaagcaattgctgtagaatcaagaagactgaaattggaatactggagcaactacctactagccacaggcaggttactctctctgagtctcaggttccccatttgcaaaatgaagcaaagctatctactccaaggattgctgtgaagattaaaagaccacgtgctaacctaataggtgttcagtaaataaatatatttttctatttttccctgcaaaattcatttcccaaacacaatctttgttcttttttttaacatataatagccatactatggcttaccaactccccagtaagccaggactctctgtatacgcagtgttttgccacatcatttacatggatgaaattgtttcctatactcccaaatttaccctgcttggtggccaagaatcacttctgtccctattactagtgatatcatgtctgcatttggaaacagacaagtgttatacaaaattacataatmtgataggaatgctgtcaatggatatctattattatatttaccagtcaaaattttagttsttataactggtatcaccaattaaaaaattttataagaaaggggtttttgtaccattggatctattgaatcattaaaaaaaaagagtttagaaaaagaagaagctatttatatactatttcattccataagactttatccagttccactgttaataaaatgtacatgcgcagaattgtattgttttctccattactaaacatgtatttgctgagtaccttctgaatgccaacatggtgctaggtactgggcatagggtggaagacacaatagacaaggacacagctccctggtatgggaaacagatactttatgtcttcagttgtaaggtccactgttgttcctatttaatatctttgaatgtggaatatatcttacaatgctgtgggctagggcatggttgtgacattgataaaaagggctcttaactgccatcgcttcagttgacttgcttgcctttttgagtggcagtgcatggcttgagcttaatttccattcagaaggtttttgaaaagactaactcattatttgcacataaaaaggcacagagacagaggtgaggcataaatttgatattcatcattagagtaaccatcatcctatgttttcttacaaagtaacaaaaagtgttttatgaaatgtaatcacaatatatgaagctgtgctttactggtgcacatgcaagaggattgcccatcaggctctaagcaaagcaactaagagtaggagaaactgccaaaccctaaagtaggggaaagaaatctccaaacaacaagaggcactgtgaccaattcacataagactatcactaagacatcaggttttaacttgtaacttgcttttttccttgttagtggtatgttaaacaatggtatatcatgctatttgtgtatactggattcaatgaaatactataataaacaagtaagcaaaacataagatcataacacgtcctgaaaggacctctcagcaagagtgacacattgccaagtaatgcacattgttccacatggagttggtgaggataacagcacttccttccagaaatacttyagtatacaaagtgctgtcacgtgatgacgtctcatttcagcatctcaacaaccgcacctggaaggccttattattttgtatatttayggatgaagagactggatctcaaatagcttaagagacttccctaacataactcagctaatgcctggaagacccaaaactagaatccagggctcctgactctacatcctatgtttttcttctcggctacatgaaatggtacaaaatacgaattaaatgattatccatggtcttgtgtaattctggcatgtttccagctaagacttctcagctgttcattcaactcaaaggcatccttcagtcctcttccccattcttctctgtctcggggatctgcctggggagagagtgtggtgaaagcagagtaactgaatcctcactaaccccaaggccctaacgcaaggagatgcaggcaataaatcattccattgcatttaccattgcattgcatttaccattgcattgcatttacccatacgtggggctctccagggatggcatcagatgctgcaggaacatgaatgataaataccacatcccaagggttagggcccaggcaagttctcaggggagagctatacatatgactggtaaaacccactatgtccagaagacaagggcaccctgctggtttgcatgagcaaagctaaattggcgctgacaactggcaataggtattgagagtctttttaaaagttgatgtcacttaatctagtaatcccatttccaggaattcattcaaagagaattaatctgggatatagagaaaggtctatgaataagattgcatcacagtgtggtttacatttggaaaaaactgtggttgtaacttaagttacaacagtagagggttgttcaaatattataattctggtacaaccacacgttaggattctctcttgccaattattgatgtcgtgggggagtgttcaagacaaaacatwgagttataaaatcaggattctaaattatatatatacacacacatacacacaattaaactcaaacatacacatggagacacacacagcattttaaaacctagaaggaaatcacaaccataatacaatagttatctctgattatgggaatacaggtaattttggtgattttctctatgytttcttttttttctttttcttttttttttttgagacggagtctcaatctgttgccccaggctggagtgcaatggcatgatctcagctcactgcaacctccttctcccaggttcaagcgattctcctgcctcagcctccccagtagctgagactacaggcatgagccaccaagcctgactaatttttgtatttttagtagagatggggttttaccatgtttgccaggctggtctcgaactcctgacgtcaggtcatccacctgcctcggcctaccaaagtgttgttgggattacaggcatgagccactgcacctggctgtttttctctaagttttctacaatgttttattttgctttttaagacagaaagtccacgcaaaccagtcaggaatagatgtgaaaaatggggatggggcctttgaaccaggagcaatatgagaaggtgagaaggatggcctgggccggctgggtctgcgagactacctggaaaagccacgggaatcacagcccacagggtgacatctccagatccagcagtcttttaggaaggcagatggagtctcagacctgtcccacccatcttaaagtggcctggtcacagggtcagagcttcagcagacagaggcgccctgggataagttgccaaatatgggttgagcaacagtggcactggaayraggtaggaggcggggaaaggggatgraaggtaaaatcctgcccctgtcctcaaggtacttacagtcaatgtgaggaaggctgacagccataaaatgatgacctatgacaacgagggtcgttccacacacatcctccagaccccggcacaagacctccgcctttcatctccattatattgggcaaaacacaaagcatcaacgaaaaaaaaaaaaaagtaaaagtacatagaaaaggagacacagaggaatacagaaaagcaaaaacctccttcaaactggtggaygtttcatcccaaaggacgctcgacctttctcaggcatcctgccactgaagaagtcaattactcacggcccacagtccctaggttccgctcagcacagtctggaatcaagggttcatttaatggaagcttaacagattcagatttctctaatattccacatccccttctgccaagaagctgctttgaaagatgacactcccttgatgtgaatttgcagcctgccccattaacaaggcttcagtcagaaaacatttttaaatcaaccctgttccagacacttgctcccaaggacaaactagaagaaactctgcaccagctcaaaccttccaagcactttgatgatcagaaatgaagggaaatattagaacaaatcttattaatccaaatattctcaacaatcttcaaagcaaaccgttgctctgggctgcagaaagcagagctcatgcagagccggccctttctgtcctaactcctgttagccaagccagccccctaaaaacagacctcagaacagcagagggaaayattcagaatcaaaggtgatgggaggaaaaaggaagaggaaacaggtaaatgaaagaaggaggatgaggattggaaagctgactacttaaacttttagcacgtccctcaaataaaaggataaggtgttgtatgccacactgcctcaaagcaactccctcagttcacagttgtgcagctgagaattctggagaaaccccacggcagctggcatctatgtcctggctccactcacaaggggctgagaaccccaggactcctcaccatgcacatttctcttgggtgtggtgggaggagcatttccgtttccaaacctcggggccatttgctcttagatacacaaacatctccccagcctttgccaagttcacccagccagaaggccataatgcagaattagtagcatttcaatcatttccgtgacgagctggtgacaggctggaatatgatgagtgaagcaatcagatgttgttacaggaaagaggcatgagaagagaatgacaacagagtggtacagtaataagcatcatcgtaaaagcccccactggcatcaagtttatcatcgccagcataactaaaggagccagaacacctgtttgtaatggggattccagctcctccactttctagctgtgtggctgagcacgcttctcgccctttctaagtcttggctgagcatctgtggaaggtggatagcaatcgctacttcataagattgtttagtgattaaagtcaaacaatgtctataaggcatttgcaaagcattagcagtaccagtagtaccagtagtagtagaagtagtagtagtatttggtattataaggagtattttatattatttcaaataggattatgcactatttcattatacccttatctcatatagaagacatttttaatgctatttgattgaaagtagaccagagactcagaaaggttaaacctctttcctagtaagtataaaaagttaatgcaggccaggtgcagtggctcacgtctggaatcccaacactttgggaggccaaggcgggaggatcacctgaggtcaggagtttgagaccagcctggcaaacatggcaaaaccccatctccagtaaaaatacaaawattagccaggcatggtggtgcacacctgtaatcccagctacttcggaggctgaggcaggagaacagcctgaacccaggaggcagaggttgtggtgagccaagatggtgccacagcactccagcctggacgacagagtgacactccatctcaaaaaaagttaatgcagaaataaggctgcatatcggtttcctattgcttctgttaacaaattactacaaatttaattagttaaattgacactatcttacagttctggagtcaaaagtcctaaaattaaggtgtcaacagaactgtgtttcttctggagactctgaggacagaatccgtttcctcacctttttcagcttctagaggccacctacgttccttggcttgtggctccttcctatatctttaaagccagcagcatagcatcttccagtttctctctctgattctaagcctcttgcctctttcttataagaacccttgtgattacattgggcccattcaaagaaacaaggataatctccccctctcaagatccttaccttaatcacatctgcaaagtcccttttccatataaggtaacatattctaggttctggggattcagatgtggacaaatttggaggtggtcattattcagcctaccataaactggatcctgttctgcagaacatagctatttggagcaagaatgggagttttgtttgctttgctttaaactctttcatttctttactcagcaaataccatagagcagctactatgtgcagggcacattcataactcataacctcctcctctctggatataaccacatcagaatcgagcttcattagtgtgatataaaagaggtctttgcatatacacacacacatatatatatatatatatatatctcaaaatatcaccaaaacccatactttaaaaaacaaaaagggcctttggagatcatcagccaatccccttattctataaaggggcagaggagtaatacaactatcccagtgtcaaatagggagtttgtgagacataatgagggcctgaattagatctggaggaaaaaaagtaaatggaggtatttttgagaaaaatcagtgagctgaacggcaatagggtaggagaaatgtaggggtcaagggtgcctaaagttcatggcttggggatgtcactcacagagctggggacagatagaggaaagacacttttgagggaaaatatgtaktcagtgtgttctagaactcggatctcttcttagtgtcactgtgaaattttccattacttcatctcacttcctgttctctcataagcgcgaacacrgggctgtaatcatcgtctgaccaccacatgttagtgcactgtgtttcttgctgacacctggctaggctttgaggatgagtttccatcccaacatctaccaacatacaaggagcccaaggcaatgggattttctgcgcatctttgcttgaaccttaaaggtgctgccccattgtcttctggtaggcctcgtttctgggaagacgtctattgaattcttatctttgtcactgagtatgcagtttgactttttacctctagcttcttttttttttttttttttttttttggtcactggttttcagcaatttgattattctgtggcttggtgtagtttccctcatattttttgtgttttgagatcattgatcatcttggatctatgtatttagtgctttcatcaaaygtagatatttttccaccattattatttctttaagcatttcttctgtcccctttcttgtctcctttggaattttcaattacatatatatgaggcctcttaaaattgcccgacagctccctgatgttctgttaatttattttcagcctttattctctgtgtttcaaatggatggtttctgttgctgygaattcaagtccactaatcttttcttctgcaatgtgtaatctgttattcatcccacctaatgtatttcatatctcagacattgatttttgaatctctagaagttcagtttagacttcttrtatctcccatatttcttcttagcatgcttacattttcttctaccatcttgaataaatgaaatatagttataagaactgttttaatgttcttgtggactaattttaccatctataacaattctaggttggttttgattgattgatttttctcttcattatgggttgtattttcctgcttctttgcatgcctggtaatttttgactagataccggacattgtgaattttacctaattggtgctgggtattcctacattattttaaatgttcttcagctttgtcctggggtgcagttaaattacttggaaatagtttgacccttttgagacttgctttaaaactttgttagatgggaccagaacagcctttagtctagggcaaatttgccccttgaatccaaacactgtttatgttgttaatgatgacaaaatatccatgtcccacactattccttactaagtctcccttcaacaattgtgtttgagtagaactgttaactgcctcacctcactctcctgtgtattcacaaggcaaagatccccaaggttttgaccaatacccaatgttgttttggtgccagcttgcacagcaccagggctcttgcctctcakagagaattgtgccccctctctccactatgtggcacagcacattgagctcaacaacgttctatcagactgatgttgccataacactgcatatcttcacccaggaggggcgacagccctaagtctcttatgtggcaaaataaaatccaactttcagtgctaaaaaggccctgcttttctggagcgaaccccttcagaggtctcacaagcatttaaaagagaatttctagaccacaagtttcagtgtggagagctgcaggcttagagaattgcagggatgtttgaagccctgcccacagttccaggaaacaccctktgtatatgagctcctttcccacacaaatgtgagaaggaggctatgaccctggaaattgaacacagggcaacagaaaccctgccgaaactattcttgcattgacattagacacaaaaacacccatataagcttgatttgctgtcacagtcaaataaaacaataacatgtaagcatttcaaagagattccactgacattctcacttgtgattctgacaacaagcgtgtaagtaagaaaggcaggcgtcacagctcctaagtgacagacgaggaaatcagccttgcggaggttaaatgatctcaacaaggtcagacagctagttggtgcaaagtggggccctgaacccagatcttctgactcttggtcaagagctctattcattccgctgtgtctgctctcttactatatcagaaaagggaacagccaccaacttcctgtgttgaccctagaccaggacttcttgatsacagcacacttaacatttggggctggataattctttgttgtgagaggctgtcctgtgcattgaagggtgttgagcagtatccctggcctctacccactaatgccagtagaactccccttgccccctgttttgacaaccaaaactatctccaggtgttgccatgtttccaaatgccccaaggtgggggaaggtaacagcagagcaaacttacccctcagttgaaaaccactgccctaaatgatgcctgagaatgctgtccacgtgtttgagaaagcagtggtgattaagttagttctgtgaaaggagaaacaaaatcaaaagaggaacttgtgctgataccagtgagtctgggaccacgaaacttggccgtgagagacagaattgtgcagcaccagggagttatctaaaaagttctcttctgggccaccctctgaacttaaccttctgtgttctcgctccactccttcaggctcagtcagctctgcaaaacccaatccactttccaaggaaacatttctggaaggcaacacggaattagttaatgtgatgagaggcagaacagagcagttaagatgcaggctctgcacataccacaacgtggatgaatctcacttaatgttgggtgagaagagccaggcccaraagagcatctattgtgtgaatctactaactcgaagttcaagagcaggcaaaactaatctccggtgatggaagtctgaacagttacatctgctggtggtgttgcctggagacacgtttcagagaatagaaatgttctctgccttgatsktggtggtggytacggtggttgtaaacataatagacactcacaacactcacagagctatacacttaggattcgtcacctaaaaaaaaaaagaaagaaaaagaaaagaaaagaatgttgactctagaaccaaattgtctaagtttcatccctgaggatgactctggttaccttagagcattttgtgaaaagttaataaactacacagggtatacaggaagtgcacaataagtatttgcatcattataattaacagaactacacttcagccaagcgcagtggctcacgcctgtaatcccagaacttcaggaggccgaggcaggcagatcacgaggtcaggagatcgagaccatcctggctaatatggtgaaaccctttctctactaaaaatacaaaaaaaaattagccgagcgtggtggcaggtgcctgtagtcccagctactcgggaggccaaagcaggagaatggcgtgaacccgggaggcggagcttgcagtgagccgagattgtgccactgcactccagcctgggtgacacagagagactctgtctcaaaaaaaaaaaaaaagaaaaaaaagaactacacttctagccagtcaggcaaagccaaggattaagagagttactctgaatttctctgctgccccctctgcctcacctcccatgcattgaacacagagtgtatatgtaagtcctcccaccccaaccatcaagacaggcacatctgccatttttctctgtcttcttcagttccttccaggttctctctgccttgcttaggagctgcccctgtttgcagagctcttcatcaatrgactgaatatttacagaatagcgcagttttgattaaacagttcatttcactggagactggggtggtgtattgtgtctcctccggagttattcttggcatcagcagcccttgctcttagcatccgtttctttacattttaaggtggagcataagaagaactgcagtgaaacagatcagatggggggcaggtgggatttctctttacctttccccsgctatttcttggtggatttatcccgttatcttcgctgctatttgctccttgctatcttttattcttctcttttgaaactggccgagtcagaaggaaataaacaaatgcaagggtgygtagaaagagcattagatggtaggtccagaaacttggactctacatccagcatctagtgatgtgattgattgatatctgttttagcttttcggsacctcaggttttgggctgtttttttttttttttttttttaatctgttaattgaagtgattggtctagatttgtggtctttgaatgtgtgtcagccatggaaaccttcctacaaacagaatctcaagcagcaaatgttaaaacctaaaagcaattttgtttgggttgaaacaaggtgggcgggcagtcaggaacccacccttttaacttctgtgtcctctgccatctcctgtagcagcccccaaagtagttccacaagatccttggccttgggatgctagagcacaacgtctaaaccattcgatgtgcctatttagaaactcatttcctgctcttaaagcgctcagccctctcccctacacataaagccttgcctccatgaaagcagggaggactagccttcgaaaccccagcacacagaggtgagtgtgagcacagctcaacagtatacaagcccgctggaaagctgccccagacagaatttcctcagttgcatcctatggactatcagtcccagaaacgcttggccaaaaaaggaaatacggagggcgggggcagcttgcttcaaagtaattgaggttgagagccgctgtataccatctgccccttctagagattaaattcacagtagcttcttctctcgggccagcaggaagcctgattaatgccgcttaatacgacacttcccatatttatttggccacaaaactcctttttccccataactcctattaatatcacaggaaacagtttgagatcagaaaagccttcacaaaggcaatttttaaagactgagttataaggctcaaaataaatgaggaattctagaaaaggaagggaggagggagaaggacactggtttggggtctggagggctttaagatgagggcgaaacaaggaccacccatgattccaaagaatgtccggaacttgcttgctgtctgttggtgcctttctttcagctcattcctagagggcggacagaggcaggagttgctgtgttgctggccagtggctcctgaccataggaaggggactgtgggtgtgagaagtaaagcagagcaggcccctgcctctgttctccccttccgcctggtattggctcaccgtgacaaatctttccctaggaagggcagaaaatgaattatcctgttaaatcaattcagcagataacccacctctgtgcaggccttgtgctgggaccacacagatgcataagacacgtacagcttagagcctagtcatgaaatgggaaataaacagccccatcctcamggtctgaacaggggattggggagcacagagaagggccccaccccgaccagctgtcaagagaactatccatacattctaattcctccaaggttgagggctaaggtgtaggaagaggagagaggttccaagcagaaggaattgcagaagcaaaggcacagaggcatccgggacctgcgagcagctatggctggagccgcgtgtcgcaggatggagagcgtgtgaacagaggggactggaagcggatcctcccaggaagcagttgcaggcggtcatgctacagtgagttgctgatagtaggaggggaagaaagaggaagggggagtggaagatgactcagtggggggtgagccagtgcctggaagagaggaatgtgtgagcagaatgaggaagttagcaaaagctggttgaaggtaggaggtggaaagacaagttcagccctcaacaagttaagcaggttatataagaagtccaggcatggatgacgatgatcataatcatgatggggaggatgacaaagatgactaggaacgcyctgtcatctctctctctctctctctctctctctttccttcctggttgtgtgagtttgcagggagacgggaggttgtgaagaacaataaccagaagagagtttgcgtcttcatcagaaagcacctggggcaggtagagttggtgctagcttctccatccatccctgacaccccagccccattcatcattcagcagaagacaggctgggctggcccaacttggtcctgtacccccaccaccccagaaccccactggtccatagtgaggatccsttctctttgactctcctccttctctgtgactcgcctaagcctgatcctacaccttctctcccagccactgcctcagcttcctccacccccagcttgggacgagccacctccctggctgggtagcatgggacaagccatctccctgcagaggcagagaaccagtgacactacacgcaaaccaaggccatgctgcaaacagaacaccaaggcaccctcgtcttaggatgcattatattcggggtagatgytgaattctagtaacacattccctggggtgttttcaaatccagacacactggagccttgttccagcctcactgtgggcgaaggccccgggctcacctccagcctcaggctggctctggctgctgcccctgttccatcctggcaagcggaactgaacaggcccgactccacagcccccggtgctgccagctgcaagctctgctgactccaacctcaggcccctgcgtgcctgcttctaaatccacacgttcctgctccttcctgcccctgctgccctctcagaatgccacttctttctgccaagacctcaggcattgctatggcccagccccatctttattgatgtcggggctctgtccccttgcagagcccatcccaytgccacccacatctgggacagcaaaagacttctcagtttcctccagagttcagtttcttccaaaaagctcggcacatcttagctgccagtgtgaactgtgagctcccagagatgcccgtggcactttccaacattcgtcacttttgacacatctaaaatatcctagctcccagagctgcgtgagcaccagcccagatggaccggctgctggggaagcatcagtctctccagggcctctgtgaagccctggggcagtagggggatgtctgacaaagcttcctaactgaggagccccacttcctctcgctctgggcacccctgccaaatragcgggcacctctatgttccagcagccctcgctgcccagcttctgagctgcaagccagcttccttccacagaattctctgcaccttggcttccggtggctccaagcactttgccatctgccgagtcagttctgccagagatgaagcagctgatgtggggagttctctgtgggggccacctttcctctctcaggtcacctttactctcagaaggaaactgaccccctgacctattaaatagctgaaatcaagggccactaggggcccaagtcggtgaaggtgcaactgaaggcaagaaggtcagcatctagctagacagacacgtaagccaagaagacagacgaggtgagtggaccctttgactccacagtcagacagcaagagagctactcccagagttctctggggcacgaaggggctgcaggggtaggtgaacagcatccagagaaatagttatcatggaaagtgcaagcaggaaacaagctgggatttttttttttatttaaaattatttttcaggccaggcacagaggctcacgcctataatcccaacactttgggagcccgaggcaggaggatcacttgaggccaggagtttgagaccagcctgagcaacacagtgaggccctgtgtctatgataaataaataaataaataaattagctagtggagcagggctggtggcatgtgcctgcgatcccagctacttgagaagctgaggagggaggatcgcttgagcccaagaggtcaaggctgcagtgagctacgatcactacactccagcccaggcaacagagccagaacttgtctctaaaaatacaaagaaataaaagaaaagaaattcttttaaggaagtaaatactaacatggctcagaaattaaaagaatgtaaaatagaatagatttgcaaaatctcacccccatcccacgatgtccatatccattccctcctccccctttcccaccatgggtaaccacttatattcatctcatctgtatcgttccaacataaccttacgcagctgaaagccaacatggagttatttacttatgcccccacccttccacaaaagtatcacactttagatactgttctgcaccttactttggcaactcagcagtacattctagaaatcttttcaaatcagtacagagtgtttctttagtcaagctgcaaagtattccattgagggatatgtccccgttcagttatctagacactagatggacacttgggatgtttccagtattttacaattacagacaatcctgcaatgaatgaccttgcattaatttcatttcgtaagtgtgcagatatagccacagggtagagtcccatgcaggaaatgctgagtaaagagaaaatgcatttgtaactttcatagctgttgccaaatccctctccattggagttgcaccattttgcattcctgccagtgtctccatcaaggtgtgtggtcacactttttaatgtttaccaatctgatggttgagacttgtgtctcagtatatatttactttgtatttttcatcttaggagtgaggttgaggatcttttcatatgtcaaagggccattcatattcctttttctgtgaaacggctcctcatgtccttggttggcccattttttgttctgtgggttgctgtccttggtctccttgatttctaggcattctatagatatcggggatattcgccctttgtgttatgagttgcaattattttttctcactttattgttcattttttgcctctgcttatggtctttttttaatttagttggtcatacagaagttttttgtttgctttaatgtagtctaatttaacaatcttttacagcttctgaattttgaatcacagagggagattcttattcaaaaggttatcaaggaattagcccatattttttttctggtcattttatgattcctgttatttcatttaaaaattggatccatttggagtttttcctgatgtatgatgagaggtatggaccaaacttataacttttcatctttttccagatctcccaatactattttttaaagtccatctttaccccagcactttgagaaattagatttccactgcccagaacaacctggccaatttgagaagtcacttctatcaaatactgaatgcaaacatatgcatttgagtgttctgggtttctattctgcttctttatccaagctcctgtatacacagcttgaattactgaatctttacggtacgtgttagtatgaaataggacaaatcttcccccatagtcctttttagttcagagctcccctggccatttactggcaagctgagctctgtcactggggctctccttgctcactgtcatgttttattctcttctctcctacaaggaggccaatatatgcctgcaggcatccaaccagggaaagaggcaagcacagcccactccccaaacaaggcagaggcaggggtgcaaggccttctgggagagtcccagtaggccatgtctatgtacccctttgaggccggtgttctggggaaaggccaaataggagacctatgtcttcctggaggtttggactttgccctgaagattctcagcactgatcttctggtccatccaatctgtttaaatgagggtgatcccagataacctcaacataaagagttatcctgtctgatattctgtctcctcatgatctgttactgatcaggtgcagaagaacccttcaaggaggaagatgttacaatagcaatatcaatgcctacttctactaccaccaatgccaccagggccacctttattcattgagaacctgctatataccaggcattgtgggaggtactttacacgtttatctcattcacttacaaccccatgaggaaaccatctgtaaacgtgcccagaattgtggctcattagcggcagagccaagctttggatcccagcctggttccaaaactcatactcttcaccactgggcaacttcttctcagaatgatctgccaccctgggatgatgcaaattcccaggcctcccagacctactgaatcagctgctctgggaatggcacccaggagtctgcatctccagcacatgaatacatgagaaccactgctcacaaatgtaaaaagttaggtaatatatcagggaggctgtgaggatgagtgtttccttagcagtggtgtaagggcagaaccctggctggagtgttttgcagtcagactgatttcctcattagcagagagtgttaaccggtagcctagtttggctcctcgaggtgcctgattcagacagagcatcccacagctggagcaccctagctggtggaggcagggactcagccaagtaggctccagagctgccacctaagcccagtagatttctcttgcccagaacaacctggccaaatggaagatgggaggctgaaatcctcactccaaggaggggcctccttttcttggcacaaaggcaccgcrccaagctacacagctaaggcagtgtgctacctaaagcaggtgcacagaattcacagagaggtaccaaataggctggcaaagaccttggtggataagtacccacaaatatctggaaggaactatgttgggttgagacatgagaaggaagagatcttaggcaagtttggaaagggaaacaacacattgaatgccaacccctggactagayatttcatcaacttcgttcatcctcactaccacccacacaagacggtcttcctatttccaacttagaagaaggaagttgaggctcctactggttaagcaagcttcccaaggccatacagctaataagtgttaaacaatcaaacacagaactgactggctccaaagccagtgcccgccccactggccactccactaccctgcctctgccattgctccctatggcaacctggaaactgtsgggtacctgcccgtggtctgaagtgggcaggcagcagtcagctgggcctccagatatgggtggtgaagggaggatacaggtccaaaagaatatcttaggggaaatagtgcacatgcccagaaaacttttatagtctcagaacttagatgtgcggagaaatcgaattctggtcctggtttgcttttttagccagttgtgggccttggcagtcactgaacccctccttatttcttcatgaggaaattaacatgcctaggataggaaccgctgtgctgcagaccccagggtcaggcaagtctcaaagaagatgagagtcaccaagggcctcaggaaagctgaagggcacagggtgcatgctgcagccatgacctcaacctctgtgagtctagaggtgaccatattggccacacataagctcaccttccccctacatttcataatccttccctcccatcagggccagcctttgattaaaattcccaagattatctgaggagctggcggtaccacccaccaatggagttcatctggctgcctttacaccagccaccttatggctgggtgggcactttcctattcttcggccaacacaacactttccaaactgtgtgacagttgtttatttacttgcctctaccataagaccatgagctttttgaaagcatggtctgtcttattcactgttaggtatcacagtgtattcacaatccctgacacatagtaggtgcttaataaatgtgtggttgaatgaataaatgaattaatgaatgaatgaatgaatgaatgggatcagggtgggccttcagtctctaaaagcatacccaagagccagccctctcagccgcaggtccgcacatggggaagccctagggaggttcaaggactagatcaggcccattttctcatcaggcagcccccaaacctctgccccaaagagcacatccaacatgctttcagcccacactccccacccacggtttactgcctgtaatcccagctactcgggaggccgaggcaggagaatcgcttgaactcgagaggcagaggttgcagtgagccgagaccaccccattgcactccagcctgagtgacaagagcaaaactctgtctcaaaaaaaaaaaaaaaaagaataaccttgggctgtttggccaagttaatgcttaatgctttcctcatgctgcaagcgtttatctttgcccagattccagctccagggaggggaacattcctgcagaacagccaggcgttcccaggtcacctctgctctcactctcacttttctttttgcatgattaaatccggcctaaaaacacgtctcaggggcacatatctgtcactcataataatcctataaggtaggtactactgttagtcttattatatagttgagacacagagaggttaaataactagcccaaggtcacacagttaataagtagcagagctgggatttaagccaggcaatctggctccagagctcggtgcctttttttttctttgacagggtttggctctgtcacctgagctggagtgcagtggcacaatcactgctcactgcagtctcgacctcgctcaggtgatcctcccacctcaacctcccaagtagctgggactacaggcacgcaccaccatacccagctagagcccaagctcctaaccgcttctgctgtgcagtaacaagccacgctcagggcatgggcccaacttgagtttcttccatccacgggtccagactggaaaggaagcagcratcttctcttcttttctcactgagtataaggcacccaattcatcttctggcagctgacctggaggacggagtggccctgattttccttttacaggtacaatcactgccaatactaaagcagtgcctgtccctacctgccagggcacccaggatccttgtctccagcagtaacttcatgaggtaggtggctctgggctgagacaggacttgcatattcctagatcccttgactgtgatgtcgaaggtcctctgcccccacccctccttctattccttgtaagcttcacttggcaattgtgtagtttatgtctggtacaggaatgaaggataaggtcaaatgaagctcaaagccaggagctagatagtcatgatatatcaaataaagttttggaacaagaacacaatgggattaatttgccaatcaaaacagcgcttggcaacttgactgtaagccaagatctctcatggcaagagcagctgaagggcctgtgattgtccagctcctggggagcctccctggcctaaccgtggtcagatgccagcatcacagcccccttagctgggtaaggattctcctagtgctacctctgggagagaaagaaaaaaatctagtctgagaatgacaccagcagacagcagctctgccaggtgtttgaagggtgaaggtcatgggactctgtttttactaccctggtcaccccaattgtttcggggtattttccatagacaagaggatgccccagtcagctgtcttccgtgattcaagacccagtctactgtcttctgtgattcaagacctgtttcctcttgtgccgatcagaggccttatttggaggcatcggcctttatgtggcatggaatgtaagccctctgagctttaacagagataggaagagtcctagaacatggcagggaagagggtcggaacctctgtcctccagcacagtagaaggatgctggcttgaatgtcaggagagcccagagtttctacctggatgcatggtttggggcatgtcaggtggcctttctgggtcccagtttcttcaactgtgacataaggaaggtagactagatcatcactaccaataaaaggtccctggtccttggggagcagtggttggagtgggagaagggcatcgcccagctattttccaacacatcgtaaaagatatcgcacaggacaactgaatgttgacttggtttgcttacctgtggaattctatccacttggtgtggtaaaacggattctcgccagagaactggaagtgtagatgggtggtgttacctatatccttgattgataagagaaggaaaatgaatttttcctcaataagtacaggttgtttgaaatgcaggctgggtgcagcgacgctgcatggtctccaggcgccttgtgtttctaaccctcttgctggacaacttggcctccacagggtagtccccagggaacccttggccatctccggcctgaaggaatcagggaagaccttccggacatgccaagtctccctgagaccctgctccatgagggctggctccctccccgacctggtcttttggttcaaagtcagtcctggagttatgtctgccaattgaccccaacctccagaaaactcagaaacagcctgtcctctcaggcctgcaaaccaggagcagccaggcccagccctgacttatgcaagtaactaccacagaaggcctgctgtgcagcctatgcckctcaacctggatcaagggcaatgtggagaaaccacattattgcttgactrtagtgcagtattccaacaatcattttaaatgtgcactygtgtaaccatgatcaccatcaagatgtaggatatttccatctctctttagagattcccttttgccctttgctagttaatccccaccccattccctggacccaggaaatcactgatctgctctcaatcacaatagctttgcttttccagaacgtcctgtaaatggaatcacacagtttgtacccttttaaatctagcttctttcacttagctttatgcattttagatgtatccatgttctggcatgtgtcagcaattgttcctttttcctgctgagtagtattccattggatggatatgcgacaatttgtttatccatttaccagttgatagatatttgggttgtttcagatttggggttattatgaataaagctgccatgaacatttgaatatttatgtggacatatgtttccatttctcttgagtaaacgcttgaagtttactgggtcctatagtaagtgtacatttgcctttaaagaacttgtcaaacggttttccaaagaaagtattttttgttctcaccagcaatctatgaggagttctacccggttttgtcagtctttttaattttagccattctaaagggagagaagtgatattccgttgtgttttaaatttgcatttctcccaygactaatgatgttaagcacattttcttgtacacatgtgccctttgtgtatcttcttttaaggatatctgttcagttctctcaccctaccttgaacctacacagggtggaatgtgcctatgacctcggaaggactttagggaagcaagccccactttccccagagaggattccagtacaaacggaaagctcttctgaatggcatactctttcataaccagatttcttaaaagaaaaaaatcattctgattctagcctgaagtgcagtagaattcaagagaatttaagagaaaagtttagaaggaaaaaatttttggcaagaaaaaagactctacttacttttttccctgggatccacaaaagaagaagttgtggcctcaggctacagtagtatggagccaaaatggactcaaaaaaaaaaaaaaaaaaaaaaccccagaataaatcagacatgaaaataactttccttccatcccgtatctcattttcttatttgacaaaaaaatagtaaagagcaactacaacaacaaagaagaggtgaaacaagaatgcaaaaaatgatgggaagatggcaacctccaaaatgtaataaattaatttcagcagctttaaacctaaagctatttgtaaagaatagctagaaaagaaacccactcaagacaaacttaggaatttcttctgagttcaaaacaatatcttaatgacctgaaaaattaccacggctttacaaagcacctcattcactccttaggagtgaattataccttgggtaattgaggttcgacattatagtgaagtgatgctagggtgtcacaagaggtgaaggacaatacaaagtttagtaactattgtgcacattcagaaattgagacacagaattactttcaagaaaaaagkaaatgggagggtcaggtgtccaggtcagggcaaaattcaagatggtgggagtgggagaaacattcctcaccatggccttgggcagaatctgcttatctccagacaaagctcagcaacagctaggagctgaatctgtaaggtccagcagtgactaaattcccacacaaatgtttccatctttccatcgtgcaagaaattctgaagccaacattgcccagctacagatcattggcctgaccacagaagccagggacagagctgcggttacatttattacataggattgttccatcctgagcagagtacatggcctggagagttttcagggcaattatgaaatttcggtcttccagaggacccttgccaggtctaggaatattttcagcagtggatgtttacaaagcaaaagcccccccacacacacattagcaaattaaataatgcatgttgtatgaaaaaccttgtgaggggcatagcaatacccgaggcttctttcttatgcacttgtgtgcccagtaccagccaatacatggaaagggctcaacaaacactgaactgagcaacagcttctagcccaggcatcatgggcgggaggcagatcctgactccaatcaggcctcctatggtagaatccctggttctctcccatggaaggtgccccacctcaattgcctgcagtcacccatctgctgatgtccttacccaaaagaaaatgaaataatttcttcttgtatgaaatatcaggaaccctcaaacctaggagttaactaggaatagaaaaatcacttgctgtaagaaataatattagaaatgtaatggctggacccagcttctccttctaactaattttaaggattgttttgctgctctaggaacttactgtcatacagaggacaaccccaagcctccctagtccatcaaccccttttcctggatacaggggctgaatcccttgatggatttgatcacttacctcaatttaatattcctcctcctaaaaccacagtatcatccccagattcttatcactggtgtgactacctcttctgaagacatgagaaaagctccagtttcagaaggtatgcttggagaatgtgctgcttctagcttatccaatatggaaccaatttcttcactcatagctaaagcatatcctttcctcacagcttatcatagagtggccaggtttaaatgagtcaatacaaataagactgctggaaaagtgcctggcacagagaaagcattcaatatatatcagcttttaaaaatgctgaagatcaatttgaatatatatgtatatataaagagatataaataggatcacaygtaaggaactgattctacttttaggaaactacactaagaaaatactaatagattccgataaatatttatacataaagaacatcatcagagaattgtttgtaatagggcaaataaaaccttgaaacagcatacattttcaacaatagtggartaagtaaataaattacggcactttttccaagtatgttttgaagaatttttgatgctatgagaaaatgataatgataagtgaagaaggatttaaaaccatttatgtaacatgatctcaattatacacactgtaaataagaatctatggaacaaatatctccataagaaaacattatgaagatatactccaaatgttatttgtgtttttttctaaataataatattctttattttttcagcacttttcaaattatactgaaatatattttcagcatacatacaatgagcatcccttaattctacaaaaagcaaaataaaatatgaaacagttaaaagtctattgcaacactataatttgaaggggaaaaaaaaggctaaggacmtacagtaggccactgggcagacaaaggagatcattctgagcctgagtcctcagtatttggtgacccagtagagaggcaagagagggcataagctctaagctttccaccttgggcatagagatgaatgacggtgttatgaaccacaataggaaacgtaggaagaaaggaagaagaatgggttgggaggaaggaaaatacatttagtttggccttgctgagtctgtagtgcccaaagagtacccaggcaaagatgcccagtcgagagctggtgatgtgcaaagctaaaacttgtaggaagaaactgcagtaaaggtatgagggtgggcacagcagtgagtccttgaagccacgggcttcccttaggatgcccaagtgtcctaagtgttctaggaataagcgacagactctgatctcatggaggctcagacccctgggcttcagggctctattccttccacccctaaaygtgacctgaagtggcccctgcctccctcagtcctagaggctgctgctcaattacagtgaagaatctcttatagactcacggtgacttaaacgctatttggtgctgtggctgctatttcactgaagattacagggctctcagagttaaccacataaaacttgctgctatatatttgtaacctcctttttcaataacacatagggaaaccatcttgggtttcaggaccaaaaaagtgtgagtgcctggccaccaggaatgctataactgatcccgcttccctctttgatgtggccaaaaagaagctcagaaaaaaatctgtggcccatcttcagcagccttataagatcacatagtgtacatttttgggtgttaatattgacattcctatctttattgttttactgcccttattttctctttgtcccaagttcttcaactatgaatttttgccaactacttcaagttaaaaatgttcttccatgtcatgcccacccagtgattctgtttgtttctacctcttgaagttacacaaaataagtctagtctaccttctccacaacagcccttcaactctcatgtcatcctcccaatcttatttttataggcaccagagccccactttctttaacaattgctcgtggatatgagctcttaaagagtctttcctccatctagacttgactgatgctttatcttctctcgacctcttccctaaagcccctacgcagggcattcctccgctgcaacacagcaaccacttttaatagttgcttttcaagcttgcatcccccaccccaccatggggctggggactcctgaaaggagccacatgctgtctttgcctccaactagtacctagccagggggcctggggcataatacatgcttaataagtgtttgttgaggaagtgaataaatgaatgagcacatacctgtatacagtatacagcttcctcgctcatacacatgttaaagagagctaaagcctccgggaagggagaaaagagagggccctgttcagtccagttgtttgtggggctttccatctgacaactgttttccatggtctctcctgaacagcctcgaagcctcagccacctgggctggagcgtatctcacagctaaatccagagtaaatatacacaagacagaattggtcctatgaggacaactggggtgaatttccacagaaagaaaggatttcactgatcagaaatgtaagatgctagatgctccaattggtacttattctaacaacgctctcttctctaggttctaattacatgtcaggcattgttctgagctctttacaaatatcttatttaatcctcmtaacaacctcataagataggcactatttttatccccattttattttcatatgaccctcttaacatttgaggcagctatcctaaaatgaagaaaggtgtagtgtttcagtctctgaataaaagaaaatgagctacattaggtccaatgtataaatggctgaagattgagtgccagcctttgatccaagatctggatctggcaggacacctcaccgctcactaacatttattgagcacccaccattgtgcccagkgctaccctccatgagttcgctgacaggtggaggaagcacacacctggataaataaatcaccccgctgcagggcaagtgtattaggatcagggaggcagtacggtgctgagagcaagaaggagtaattatctctgactagatgagaaggcttcctggaggctgtgaagtctcagttccattttaatgaatggagcagcagagacagagcaggaggtgaggtgcaaaggtaccggcatccaaaagggcatttgggaactgttggtagcaggagaacgaaaagagaggaggaggtgggggatgagggatcatcactcaggtggtggccttggctgcaataccatgaagctgaaagtcactaacaggtattgtcatttctgttttagactctttgagcagctgtgtgcaggaggacagagagaccaagcagagagagaccagttaggaggctgctgtaataaaccaagcaagacacagtgtgcacgggaactaaggcacaggattctagggatatttaggaaacctgaagctttggactgatcgagaagctggcatagcagtgcaaggtgacaccccggcttctgacttagacaggagggcagccagtgaaatcagcaggctaggttggaagcaggcttccaggagtgagggcaagctgagactctctataagctcagaaaagccaaagagagcggcagaaattttcttcattatctcagaaaagttattcaaattcttgctcacacctccttttaataaaatatgatgcatttcattctgtcttcatagtgaaaaatcattgccctttgctgagaattaataaccttttgagttaataccctttgggtaggaaaattggtttcattaacacctccccttgcactttgtaggttcatcatctcttggtcctgctgtcccctgaaaccaaaagcccaagacatattatttgagaagcctgaatgattttattctcagaaagaatgatcagggtccttattaawtgggctgaattgagttcactgaccaaaaaggtcagagcggccttgtgtctgctcctcagccgcaggggagcccaccttctaccagaaggaagggatgagagcttcctctcccagctcttggcctgatccctaatcttggcagaaaagatgcgcccatcttgacatgccacgccatggaaacgcgccaccttgccaggctctaccaggcctcttggcagaggtgtccgtctctggtscagcaccacagacaggacagctgtcgggctgcctggcagagttggatggccactcacccacccctccaaagtggctcatggtcatagtgaggctcccccagaagagaggctggaaggcccttcggtcaaacaacagaaggtgatatgttaaaaacaatcttcctctccttttccacctcccacggccttggaaagcctccgaatggacattcctctactcttttctgttgcaaactctttagcagcagcctggcatctggagcatgaagcccagactcttcagcatcccagggccctccatgctctggcctgcctggccttgtctcctgcctctttatgtatgcaaggttgcatgcctgtgagcctcgactcatgttgctccctcagccacccctgacccccgcaacaaaacacacacacacactcaatcatcctgcaaggccrgggtcaacatcacattccctgaaaagccctccctgaatgccacaccctccctcaagcggcatccactactccctctgtgattcccccaaccctgccccacactcacccctgtaccttgtccctgcaaggcttacctgatataatctgtctgcacgtgaggacaagttgagcctcaggagctaatacatagtgtcacccagctaagatgctctattcactgtctctctaggtagggatgtagggatgaaattggagacagcgacacctgggttcaaatcctgtctctatcagtttttggcagtgtgatttggggtgaggtgcttatccaccgagcctccaaaactgccttgcctatattccttatgacctagagggtgactctagtgcttgattggctggtcactgggataacaggctagaggatctggtgatctcaacctcctaggccaccctccatcacttggccattccactggaaacagtctttggggctccccacagttgtggctcattctgatctccagcatctcccagtaacctctttggcttgtgcttgtagaagcagcctttgagaagacggagggcttcagatgaagcagatgccaggctaagcaccgtccccaatcttatattgcagagccatttggaagaagagctcaagctgttgaaacaaacaaaacgctgcatgagatgaagaccagattcctgctctttggagaaaccmatcagggctgtcagattcgaatcaatcatccggacacgttacaggagtgcggcttcaactcctccctgcctctggtgatgataatccacgggtggtcggtaggaaatgctgacatgccgtttttctctccgatttcacattttctttttttctttctagcgtgttcatgttcataaaaagatagggagctggtgataacaactccatgcataatgtttatgaagcacgttctaattttccaagtgcttccccacgcattagctcattgattatctcgattccatgagtaagcagcgtgagaaaatataattatctccatgtttcagatagaatgtggctcaaagaggycacacagcccattggggcccacaagggattgcagtccgtgcaggaagaagcctccttcctgaatctgcatgttacacacagggggacataggaagccagaagaatggactcccaatgaaatgttgtatcagcaaggtttaagttcagcagcaaataacagagactcaaattagcagtggttcaaagaaaacagaaatttgttttcatttcgcaaaatattccaaagatatatgtaacccaaaaaccggctagacagctttggtcagtgargtcctccaggccccagctccttccagttcactgctctgccatcttggggtgtgaccctcatcctcatagtccaagatggcagctagaggactagccatcacatctttattccaggaagcacaatgtwgtaaaagatgtacacaaaggagtcaaaagcaaggtttttacaagagcttyattgagatataatttacaaagcgtacaamttatccatttcaagtttacacaattcaatggcttttggtataaaagagtgttttttaggtgtcccagagcctctgtgaaattctcccagttacatccattgaccatatctaagtggaaaggtggctgagaagtataggctgttaaagaaaatgtagccttttagtgatgctaaaaattctattactatggaagaaggagagaaaggatattattggcaatagatgaagtcaaaccatgtgagaacttgtctccargaggaaatcctgcctccccagtgtctagcccacccatgatttcaagcatagttcacaatttgaaccctccagagattttggtgtctacttcatgacttagaaacctttccctgccatctagttgaaaagtactcttgaaacccccatctatcctatcctggagaggaaaatgaacccttccatcacctgcctcccctcacctctccctgcctcccacatgacgttccagcaacatctaactgcttgtattaatagcttcctccacaccccatgcacctgccttctctcttcttggtcttggcttagtctgtgccctctgcctagagtgttctttctcctcctcttttcctgattaactcccacttttcctgtaagacacagtcccaaacaggtcctcctgcaagccrttgctgccttcatcccagcactcccacagggcrttcagtgtcaccgggagttcccgtgtggccctgagcactctccaccactgctctgcagctcggctttctaattgtctgtgtttctctgctctrctaggccgtaagcttctccctgggaaggattctgtcctattctcatctaatagactactgtgggccactatccattatgtaatcagtgctccaaaatgtttgttaactgaattaaagatcaaatgaatgagtcttgtttataaatgcaacatgaggaccacaggagcctcttaccaggatgcttttaccaaaatgcactcttcattatcaaaattctgtccaacctagtatatgtctcctcctcctattactgctaatattaataacaacaacaactgcagtaacraacatttgttgagtccttactatgttccagacactgctctaagygctttagatctattaacgtatttctccttcataacaatcctggaaggagagcattattaaccccattttccaggtgagaaaactgaagcacagagaaaaataacttgcccaaggttactcagctagaaactaggagagcctagatttgaacccaagatgcyccatgcacatagaaggcacttggtaaatatctagtaaaggaatgcatcttaccctggaatggcatgacaggccctcaggggagctctccagcttcacccgctattgtcaagccttcacctcctattgtctagccttcacctcaccaactttcctcctctcccctgacataccacactgccctttcatgattctgtgactctgcacgcactgttccttctgcctgggatgccctagacctcaccactaccacattcacctgcccacctgtattctttttgtttctttgttttgttttgttgcgatagggtctcactctatcgcccaggctggagggcagtgtgatctcagctcactgcagactcgacctcctaggctcaagccatcctcccacctcagactctggagtagctggggctagaggcatgcaccatcacacctggctaacttttgtattttttgtggagatggggtttcaccatgttccccaggctggtcttaaactcctaggctcaagcaatccccctgccttggcctcccaaagtgctaggagtacaagcatgagccaccgcgcccagcccccacccatattcgtcttactggactcctattgatcctttaaggcccagcacaagtgtctttgctctgtaaatccattaggagtgccctgcaaattggttctcaaacaaggcacacacacagaacaattctctgtaaacawtttttacctcctactatgtcaggctcacagtgcccatcccgctaagtccagcataacgcagtctgcagggcagagccagtgctatgggtttaggggtgaggtggggcagctgcacgcagaaggaggcgtacaaatggccctaagggacaggtcagcttccaggacctgatttacacatatttctccactgttttaaggtttagaaagtccctaagaggaaaaacattaagataattgttctcgggagggggcgggggggaacrtttggaaaaatctggagacatttttggttttcaaaacctggggcagtgggtgggtgttgctggcatctagttggtgaaggccaggaatgctgctaaacatcgtacaatgcccaagacagcccccacaacaaggaattctctggcccaaaatgtcaactgtgcatggctgagaaacgtcatagcaagcccttcctccagcattatccaggagctggagaaggaagaagggtgagcrgggagaaaggaaactagtgcgaccctccctctgtcccctcctcaggtggacggcrtgctagaaaactggatctggcagatggtggccgcgctgaagtctcagccggcccagccagtgaacgtggggctggtggactggatcaccctggcccacgaccactacaccatcgccgtccgcaacacccgccttgtgggcaaggaggtcgcggctcttctccggtggctggaggtaccgacctgccccatccttccttcacctcccttccctcctttcccttcctctgagagtgaatgaattaagctggtctccaacagcagcccaggcaggagaagcactaatgctcagctcacaggaatgagaaggcacaggactgacaccagaccccagggctctctcagacgcctcccttgaacccctgtttcacagaaccaccttcycccctctcctcatccrctattcctcttatgctcacccccttagacatgctaagggatacaaacacaccctgtaagctatcaagcccccacacaaatgagtgggatcacttctgtagggcattagtgtccaggggaagacaggcaggcaggaggctgcagctaccaggcgaggtcacaggtacctgagtcccaggagagtcagccagttgagagattagtttcagtttggagtgtgaataaggcacctcatttctgagcaggcacgaagaacagggtgggcgccacaacacactggaccgcaaaaggctttcatccaggcagctcttctcctgcccccatccygctgctgtcttccaggaatctgtkcaactctctcgaagccatgttcacctaattgggtacagcctgggtgcacacgtgtcaggatttgccggcagttccatcggtggaacgcacaagattgggagaatcacaggtaaccatgcctaataactcacacactgatctccactccataggggcatccaacaaggacctgcttttccaacaggctyatcattaaaacaccccaacacttattgtgagggatcagcgctcatgagaggacttgtgacattctttcaaacatgaccaatgtcatggattgctgttccagagaattcagagcaaattatagcctcaattcctattgcctgccctcaaacgaatacctcatgttggtgtgccaaatgggactaaaagatggayttttctagcaagaaagagtcttattttttaatctataatttacaaagtccaatttgggcgagttaaggagtgaagaatcacagccttaatttgctgtaattcatcagccacgttagtgcctccgtttccacatttgtgaaacgtgtatgttttagtctgggacccatttgggttgagggagggagctctgcatcmaaaacttcaccccaaactccatacacactcagaaatggcccaagatatccaggaaggtctgcacatgtgcgaggaaggccttcctcccaggcttccgtgacaccaaccccacccttcacactgccaggcattggatccaaaaacacacagctggtgagattgttccccagtccaagtctgaggcccactgataccacaggtataaaacccgggaggcacaggcaaggcctttctcggwgtggaagccccagagtgccccagcctctcctcctgctgatcccttcccatagctctaggcttcaacgacacaaggtttttctctacttcacaaacacaccatggcctcttgtgcctctgggcctttgcatgcactgtttgctttgcccaccactcagccactcaaactcctcctcatccttcaagacccagcaggctcaaacaatatttcacaggccaaaacaaagagcattttacatgaataacaaagttgttgcgaatttatattttatcaagtgaggacatttttttttcttttgagacggagtttcgctcttgttgcccaggctggtgtgcaatggcatgatgttaactcaccgcaacctctgcctcccgggttcaagcgattctcctgccttagcctcccgagtagctaagccacacccagctaatttttttgtatttttagtagatacggggtttcaccatattggtcaggctggtctcgaactcccaacctcaggtgatccaccatctcggcctcccaaagtgctgggattacagacgtgagccaccacggccggccatgaggacatttttacaaacaactactatctgctattaccattcctttataaaagaatttcttttaacttgagaaagaatggggataatggcagacgtttcaacagaatacacttgtgattatgacagctcatttcctcatgcttttttgttcatcttgctggtcactggggaagcctggtcacagacyggcgtgtggcccccatggatttaacccacaatagcctggggatgagcagccctcccactgaagaagcagggccagaggtcagagtccacacccagcgaggcagcctcaggcccaaggcccagaaccctctccatccaactggtgctgtgggtcacattaggcgtatcagctgggcccacccacctcagagacagcaggaaagctcaacaccctcttgccgtcttgtcatcagcctgataaagaaaggaacagaaatcatatcaggacatttttctttttctctttcttttttttttttttttttttgagacagagtctcattctgttgcccaggctacagggcagtggcatgatcttggctcactgcagcctccacctccctggttcaagtgattctcctgcctcagcttcccaagtagctgggactacaggtgtccaccaccacgcccggctaatttttgtatttttagtagaaacggggttttgtcatgttgcccaggttggtctcgaactcctgacctcaggtgatctgccagactcagcctcccaaagtgctgggattaccaggcgtgagccaccgcacccggccaaggacatttttcatttgtcactgtgggtagggctggagaacrggtgatctcacggctcactctcaattccttcgccccccaagtagggaaggaaaccagggctggggtgggacaccagagggtcctccagagaaggcagaggaagaaagacagggaaaaaaaacttggagcgcataaatactccccaaccacrgtcagccaggaggtgccaccttacttcatgcacagacatctgtcacttgaggcccagagctttgagctcccctacttgcacacaacattttcacatacagtgaaatgtcccgcggctgttctggacgttctaatgaaatgacatcttaggagaaaaatcagcttgtttagggaaattattgacaacatacaggcaaataaatttcattctttgataggtaggttggaactacttataatgagcatattggctttttttgtatgcaaacagatggtcttgaaagtagcttgagaggtactcaaaaytgatttgctcaagtaaatcaagcattccctcataaccttattcctttttttttttctttttgagacaggatctccctctgttgcctagactgggtcacagtggtgcagtcatgattcgctsctacctcaaactcctgggctcaagcaaccctcctgccacagcctcctgagtggctgaaactacaggcacaggccaccacatccacataayttttgtattcttttttattttagagatggggtttcactatgctgcccaggcctcctggcctcaggcatcataaccttgtgtctaccactggagagtttccgcaaacctctttccccrctagctaatgcccagcctgtgtgtcattgttagcaccatgarctactgtggttttactgagaaaaggttacggcgaggttttctagggaaggatcagccctacgtgtttcttcttcctgctagttcactgatgtataataatatccaaaagctaaaaagcacatctctcttcccctctccttgctccygcgtaacccttacccctgctttmccattagggctggatgccgcgggrcctttgtttgagggaagtgcccccagcaatcgtctttctccagatgatgccarttttgtggatgccattcatacctttacscgggagcacatgggcctgagcgtgggcatcaaacagcccataggacactatgacttctatcccaacgggggctccttccagcctggctgccacttcctagagctctacagacatattgcccagcacggcttcaatggtgagaatgaagtcatgggccgggagcaccggcctacatttcaatggggcctctggaattcagcggaatctascaacatacgggactcagggaagagttcagcaaggataggggcccagggtgtatggtcaccaagcccacccagagagaaggaatgctggagtgggcaagggtgcctgtcccccagcaggccactcctggcaacaggccaacgccacgccctgaggatgaacagagggcaccaacaggaaccyccacttctcacyccagccccatgtgcccaggcaaaccctctcccggggtaccagctcttctgagagttgagtccggatgcctgtggttattcttccttctctggaagtttcctcgttccagggaccgcctctattctgaaccacatraggatccacttaataggttgtggcttctcgatgaaggtctcactcttcatcccaccccatcagtttaattgaggaaattactcagactctcccaatgggaaattcagcttcaaatatgtccttgttatgccctttacctcagggcagacacggaatgtgctgttatctgggttgtgatcccacttctctctcaagtcctaaaaccgaaatattaacatgcacattgataatatgcacaggattaaagaacaaaaatgtcagcagaagcagcacattccacgggcattccaaatttcttgctattataaaatatcaccctgattaagacatgccaatcactccaagccaagtagagccctccacccctacaagccacctcaccctgatcatccaacactcagctgagaacacactctcttgtgatgacaccatcctcgcctctccaatatcagagtgaccttcacactccgcatcatctcattttggctggactcccagccttccaccgcccaggcctgagagagccttctgggaacttgcccttatcattgcttacatccctcccacctcccccactccaacacctcccctccagccaccagcagttcccagctgaccatccagccctcatcccaaacttcaccccacccaacaaagctcagtacagaccatcaggatggtgtatgggctttatttkcctggtaaacacatttctgaccaatyattaccatttgctcttttgtgctaaacttcaaagtgacrgaaccaaatgtaggtattcagcttgcccaagcttgggctggtttttctcagtcgtcttcacccctgtgtttgaaagggttcctggggtagttctcccagccacagctgcacaggggctcactggataactgcagattcaccttcactacctcctgggtggatgagcttgggtgagttagtggatgtcttggaagctcagttttctcgtcgaaaacagyggcctcaaggagctgcagtgaagatgcaggcagtggaggagcggagggcacgcagcatacacagcctcctagtaggtgcccaaggaatgcagccgctagcgtccaaggactgcagtgactaatcttggcatttagcctccagacaactggggaaatagcttttggcaaagtcacctgtgctgtccctttacagcaagtgtttcacatatcttgtggtggttcctcaacatcccttgagaattatttaccacagattaggttaaaatttggagagttaaaaaaaaaaaaaaaaggtcaaatccttagtagatcaacctcataagcttgttttgggggtgaggcctgtccagatctggttactgggcaatgtccttccaaatccaattcttgtgctggtttcacaggcctgttacctaagggatgcaatggctgctttgggacacaaggtagacattgtcgagaggcctcagcgttctccagaccatcagagtgccacgggattgtctcgtgtatctagttatattaagagaagaggagtcccacrcaagcctgttccagaaaacccaccctccaggcatcagcacctgggcattttaaattatctcatttgagatagaaatatttctataataaattacactaacctgctctcttaatgaatttgatctttccttagtgacttgggtgcctattaaaatgcctactgtaacacgctgtcataaaggagtgctctcaggatcccggcagtgcccrggattttgcctgacactacatgactcagagggtctacttcccttagtttcagtcagttgtcacatcctgctcttgtcaaggggtctgccttgacaagcccacccttgcctgttctgtgtgctactgctaacctcctgtgggmtgagaaccaaggtgatcctctgagttgaggctgctttgggttaaggggtgataacgtccttcttgccctgtgttccagccatcacccagaccataaaatgctcccacgagcgatcggtgcaccttttcatcgactycttgctgcacgccggcacgcagagcatggcctacccgtgtggtgacatgaacagcttcakccagggcctgtgcctgagctgcaagaagggccgctgcaacacgctgggctaccacgtccgccaggagccgcggagcaagagcaagaggctcttcctcgtaacgcgagcccagtcccccttcaaaggtgagtgtggagctggggagccttcagaagggcaggatgcagtcccctgtccaaagggctcagaagtccccttggcttctttcctggaggtgcttcagctctgctgttgcsgtgtttctgaaactgtgcaggctccagacagcaacgttgwcacagccyttctcctgtcccaagagtgtggccaccttgccgccaagggctaggaggagaaacctcgaccatttctgaaacgatccttgggttggcctctctgtccattttcatgctcccctagaatgttagatctgcaaggccacacgcagtttacctgggccacccggatctcactgtacagggacgtcaggcatctccaaacacatcctagaacccagttctttcatctctgttcacggcccccatgaaaaaactggattctagactgcatttcatttcttctaagatttgaatcagctgatctgataggacatgatattcaccctgaggcactcccaagacaagattcagcttccagtgtttcccagccagatttttaaccacagggcagaaagtgggcccagcagctctctggattgaatggaagattgtagaaagggctgtgaccacgtcttaggctgaggccagcagagaaatactccactgaaacctaaatcctcctggagggaacaagccgacatctgttgccattaacatttctgcctaatccctaaaacagctcgggagtgctttagcatctcactgtttcatcgcacagcctctccagtgctgggagaagaaatctgatgtgctgtttgactattaccaggcagatatttgtatctggagaatgtaaacaggccgtcaccaccactttgcttttagggagcattttacacaaaacattcgatgcagccatcagctccttgtggttctcccaacagccaggcgaggatggcagggctggttattatcccattctaaagaggaggaaagcaaaactcgcgtggggtgcccacagctgtgcagctgtaaggagacctggaacagggccacctgactctcagtcgtgagttcaaactcccaggcagcttatttttgaggcacaggatttctctgtgtatcggaacttttgctctccagtcaggtttccctcccttgagtcaagcaggtctaggaatgacagaaatttcttgtgggtgcgcacrgcatctgaagagtagttggtgtgagggcaggatctttcgggccaaagggtccctccactggctgtcccttagggctggaggagatggcagcacgcaggtgagggaatttggaagtcctcctgcttcggggagctcctccgctgcaggctgccaattaaagactcatttgggtgaaccagctcctcttttaaatggcaatgccgcctggagtgattaagcctcttagataatcacatttcactggatctattttaatcatggaatgttcgcatcatgaggagcagttcaaccctgccgtttttcagatggggaaaccaaggcctaggcagggaaaattatttgtccagagacaaaaagctcttggcagacctggcatttagacctggggcctccaaagagtgagcagagtgatttttaaaaactcctaaacctgccgctggtctgtttatggggataagaggggtatggaagagaagggtgggggaattgctttctccttgaaatcacctgggaagaaaagaggtcatttttcatcttccagggctaaactgggcacttcatctgatttggcccagccctaggacatctactggggacttggagattgggaagggaagcatcaagagaaggaagaaggggaaacaagagcagtaggcatgaaccaggctgagcttctcccatttgccaacggccccactgcccgaccaccatrcactgctgatgtgaactcacaaggatccctttgttattaaggaagaccaaagaattgcattagggcatcattatctcacccaccagctaccaaaaccaacgtactcatccatccgtatattcttcaaacacagtcctaccctcagggggctcggtggagactaacccacgatgagttccttggagaccacatttgtgtctctttattaccgactacttatcttgctcctgggacatctagtgaggaggaggttaagggcaggactgactgaaactggtcaggaaccgaaagccccaggctggagggaggttccagtgccgagctgtggcttgtaccacaccctctccttttctttcttactttttttttttttttttttttttttgagaccaagtctcactctgtcgcccaggctggagtgcagtggcgtgatcttggctcactgcaacctccacctgcagggttcaagtgattctcctgcctcagcctcctaagtaggtgggattaccagcgtgcaccaccacgcccagctaatttttgtatttttagtagagacggggtttcgccaygttggccaggctggtctcgaactcctgacctcaagtgatccacccgcctctgcctcccaaagtgctggaattacaggtgtgagctactgtgcccagcccataccctctccttttctgctcccccacaaattctccccagttctcctgcagcccctccagtgagcaaagtcctcacccgctcaacccagtttcacttgctagtggaaagtaacgtctctgtggtcacatcaagccaccctgggcatggctggaaagtgcactcatgcgagactcgcctgtttgaagcagctgctcatgggatactgctatctatataatgttatgttatccaatgtggtagccacaaaccatatgtggctayttaaatccaaatctaagttactttaaattaaatggaaccaaaaattcagtttgtcagttacacaagccacctttcaagtgctcaaatacgtggctgctgcatcagagaacacagaaataaaacatttccatcgccgcggagagttctactggtgatgctgggatgaagattttaatctaggccaccacagctacaccactccctgcccatcacaaccgtgatcataactgacttgggcccccaaagcctattccaccagccacctccagcattttgatgaatacatattacactcttaaaagagcagacttgcccaaccccggcctacagagaaaccacaatccccatttttcaaaaacatctaattgtacaatgtattttagtgcagggtctggttgggcaagataaacatcgcctcctgattgtagtttcacaaaggatgactaacttggcctgaattcctctggctcccaagatatttcgacaaaaccatcaaaggatctattttctacaactgtacaccagaactcgggtaaacactgcgagagtacagcagtagcaagagagaattgggaaacagtcgccgagtgaaacgaggcaatttatcgcccacttycattctcactctctcacaaggaacctttaccagtttgggagcctgtttttaagggagggggagggaaacggatctgtacggagtaaatcctgtttcgccagtgcctcctctcatttcatcctcagagcagtcagatgaggtaaccgggtggagaggagggaaggggccctcggggggcactctgcccgggcactgggctggatgtgttgtacacgttagctcatttcccatttgatcctcacagcaacccccagacagggagagacacacgcacacacagagacacggtcagggcaaagtcacacaatttgtgagcaggaagcrtcgcattgaatcccagcctttgctccttttactgcacttggcctcggcgtaggaccaaggccctcgactgagtgcctctccctcctgcggcattccagctgcatgtcccgcctcctcctctctgccctccttccacactccctcttccatatctcctccactcttctcctgtcttccccgtgctgcccttccccctcccccgccccctcacccacggccctgcactccaggctccctgggtcgggggtgaggggcacttgcttctgctgctcgccgcagccatgagagcacccttccttgctggtcggcgagatgacgagccaagctgtgactcgggcagtcggtctgtttttggcttctctcagctacttctttggaaggtttccactgacttcagggagagttccagaagaagcagggggtgtcgtagacagcacaggcttggggttgggataaggagtgtcaagaatcttggccttgctgccaaccacttatgtgaccttgacctaatgacaaaacctatgtgggcaccaaggaagaggtgtgaatagacatggggatgaaccactagcacgggacctgcaggtgggtctcaaaacctgccccggtcagttcagtgtggaggaaggaagtagatgacacccgattaacaccttctggaaggcaggcattttttcatcgccatcttatcacatttttacagcgacactacaagaaagttcctaacctgcattcacagatgaggaaatcgagccccagaaaggctatgtggtctccagatcacaaggaagcaggcatcagagaggactcaaaccctgggctctgtctatccgttgagggcccttattccacccacagcacaaagagctggcaacaggacgccagtcagcacaacagtcctggccgcacacacacactcccccatctccaccgctcgcaggcagcaacagacccccacagaaggggcaggcattggccaggcacggtggctcacacctgaagtcccaacactctgggaggccaaggtgggaggatctcttgagcccaggcgttccaaaccagctcgggcaacaaagcaagacgccatctctacaaaagaattaaaaattagccaggtagagtggtgcatgtctgtagtcccagctacttgggagactgcaggagggttgcttgagcctagaaggtcaaggctgcagtgagacatgatggtgccactgcactctagcctgggtgacagagtgagaccctgtttcaaaaaaattcaatttaattttaaaaagaaaggggcaagcatccagtctcgtgacatcagggcatcacttaaatgggactgtactgttaaaccaaaatgtggccacgaaaataccgacacatacaggtgttacatacaaaggctaacaaaatcactttccctttttcttcytcactcgcgcctgctctgagttaattcactttcattcagccttgccggcactggctgccttctttgggcagcaacaccctggacaacaccatcctgggcccctcaatcctatgatcttcagcttccctctgagttagaggcatttcgggtctaggaacaagccctctgggcttggagaaaacacaagaggtctcattcctaccatctccatgagagaaatccatacacggagggggaaaaaaaaaaagccctctttgatgtttgcaaagagagtcataatatctcccagagccaacatctaatgattcagaatcattgtttctgggaggcaaaaaatagaaagaaatatattctcttttcataaattcaataacctgatcttgtgaaaagaaaatgtaagttttttcttttttaaatggcaccagcagggtccacacagggttacaatccaggatttttcctagtgaggagactctccggaggcctcagatttctgctgtaaatggagtttccctgatcacattcgaggtcaatggactatttcatgcctttcatctttaagacctgaaataatttctcctgccagaacttgggagtatgttgtactggtctctttgcagtcacaggattaaaagcgttttccccaaatcattttttaacgtccttattaaacatgtcataaggtaaagtgggcaaaatcactcacacttttttccttaatctttgtaatagcatcattgtgctgggggtggcagggtagaatgataggcaaattgtcttttcttttcttcctttttttttttttaaagaaaaacacttacaaaaatccaaataagagtaaataattaggactgsgtgtggcggctcacacctgtaatcctaacactttgggaggccaakgcaggaggattgtgtgagcccaggattttgagaccagcctgagcaacatacagacctcatctctacaaaagaggaggaggaagaagaagaaggaggaggaggaggaactagttctcagcaggaaccagttctcagcctgaaagactcatttatatttaaagttaatttcatttaaagatttctccaaaaaagggcagtcatgcaagattctccgtgcagacatggagtttctcaggagtgctcctgcaaactcaagggtgcctcagccatcagcgcaggttccgtccccagcccgttccctggtgagcctcagaaagcatgctggcttggctcttcacagcccacacaccttggcacgttccatcctcctgcagagatgctactctagggacacatgttgtagaaataggcaattctcattcataggatgtgcaagctaaaggggcctttgcatcctctaaagctgactcctgggttttacacaagcactttctcctaaaatcgtggaaccatagcatctcaaatgcagaaatcaatctcctcctactcacaatttaagaaaaagggaagaaaaagtgtatcgccaagacaagggcatgaaacattttccccggctcaggggccagacgtttaggggacaggagagcgtcctttgtggcagcgatagcccaggatggatgtcaaggggtcagagctggcaggcagtttgtcttggtggcttcattagaagcaggtgttgaaccacagcttttcttcaggggctgttggccatttgctttcaagggacagactcagcttgcagaacgaaaacagcaggcgatatagaaagagtcttttggaattagacacacctggctttgaatcctgctccactgaactatctggataactataggtctccaaacctccacttccttatttatattcaccaggataattaacactgtgtcggtctaggtctcagcagaaaacaggactccactggcctggatcagctgaagaaagcaagtgggactccttacaacagggtgggcagtgttaaggaaaccaacaaggactgaggcgrctccctgcctctaacagcaggacagatggagccagggaagggactagctgtgggaaaaccagagccatggaggaggggctgctgataatcgtgggagggcagtggctgcacagtcaggctccagagcacgggggagcagagggaaaatgcccctgcctctctcttctccgccctgatctcctgctagtgcctctccctccagtggtcacacccaaccagaaaccaatcgacaagggagcccggcagatgcagcctaagggatcccatcctggggctcagagctgagcagtggagggcagagtggatgaggacagcaggggtagagggagcagatgggcactacccagcagggcatcattatttagcctgttatgaggagaaagatgatgtatgtaaaacacttagtatgtagcttaacacatagtaggatctcaacaaatgggagctattttatcatccttggtgtctttaatgcagttatatatgcatgttgttcttcactcagagagcctgtgaagtactccttggaggcctagtgtgtgctgtgcccttgtggagatacaagcagtagtgtggttccgagatggcctttggggagataagacatggacacagatgcccgtgagacaaggcagaggccacaaaggaccacaacttctagttctcttttttttccttttcaatacttgtaaaagctctttctttttccaataggattccaattagaatacacgtttactgcagaaaatgtgaaacttgcagaagaacataaagaagagaataaaaatgaccactctgccctctccagagataagcactgttaatatttttgtgaattcccctacttctatgcattctgttttgcagagttggtctcatactagacagtttcgtagcctgtgtttttttgtttttgttttctttttcacttctttcataagcattgaaatcattccaaaaatagcttttaatggcttcataagagtaaatcacatgtttgggacaatgaactgagaatcagcagactaacttctaattgcagcttcatcagttattagccacgtgacaacgacaagttacttaactttttctgagcctcagcttcttcctttgcaaaatgatgtgggagggaagataaagtaggcatcttataaagttgttgtaaagagaaatgagataattatatgaaactattagctcaatgtctgggacatagtgaagcgctaaatagtagttatcataattgctgttattagttcatagccatccctctattactgaatatttcaggtgttttcagtgtatttttacacaaatgttaggacattttttaactgaaatctctttccacaattcaactttttccttagaatatataaagctagtggtcctgggtataaacatgtaaaagttcaagttctggagtcaggttgtgtgagccgacgccccagccatataygacttactagctgtgtgatccgagaaaagtcacttaacttctctgtccttcagtttcctcttctctaaaatgagataataatcgtatcatttgtttgagggtcaagtgagatgacagaagcaaagcacttggcaaaaaccaaaatagatattagccaatgttattatcatgcatactgccattatatgctcttttttttttttttttttttttttgagacgtagtcttgctctgtcacccaggctggagcgcagtggcgcgatctcagctcactgtaagctccacctcctgggttcacrccattctcctgcctcagcctccccagcagctgagactacaggcacccaccaccacgccccgctaattttttgtatttttagtagagaacggggtttcaccgtgttagccaggatggtctcgatctgttgacctcgtgatccgcccccctcagcctcccaaagtgctgggattacaggcgtgagccaccgygcccggcctcattatatgcttttaattgcatttagcactgggctaaacacacagtagacttccaattaatacatatcatattaaactgaattgaagatcggttactatgagtgttccttgagaactctggaaggtaccctgactattcataaggaggttaacccaaggccagtcctcccacatcttaccccctcccccactttggaaagaactttctttttgtctcagtttgacttacaagactgttcatttgttacagagtttccttgacaaacccccaaatagtgtaagacctctccagaggcttctgggatgacaggctaagtccctctctccagtggtgccacccaagagtttagggacccttcccaggacttgcgcctatagctcttttctttttttttttttcttttttgagacagactcttgccctgtcaccaggctggagtgcagtggtgcaatctcagctcactgcaacctctgcctcctgggttcaagcaattctcctacctcagcctcccgagtagctgggactacaggcgcccaccaccacacccagctaatttttgtatttttagtagagacggggtttcaccatgttggccaggatggtctcaatctcttgaccttgtgatccacctgcctcggctcccaaagtgctgggattacaggtgcaagccaccgtgcccagccagctgttttcttacttctcacccacagcctcttttgctgtcttgagggcatcacattgctttattccaggcttgggatttgagcatctattgtattacagcaggggtccccaacccccgagctacagacagtgggcaattaggatccgggcctcacagccagaggcgagcagtgggcgagcaagcataaccgcctgagctccgcctgtcagagcagtggcaacataagatcctcatagcagcgcaaaccctattgtgaactgcacatgctagagatctaggttgcatgctccttatgagaatctaatgcctgatgatctgaggtggaacagtttcatcctgaagctatsccccctgcccccacactggtccatggaaaaactgtcttccatgaaacccatccctgatgcccaaaatgttggggactgctggtgtatagggtactgtagtaggcaccagatactacctgagctagctcttatctaaagcagaaaactcttggccaataaatcaactcttagtatttggctcttgttgtgaacataaataaacatttggtgcttcagagataacccctttagtaaacccaagagatatccccactcacatgagcaaattatatacaaaatccmaatgggaagattagtttatgccaaggataggattgtgtaatctagaaacttggcaatacaggcataccaggacactggagctggcagtaccctctgctgggcttgctgtatagctaccaacctccggtagaaatagtaccatttaggagttagtagattgattgatgaagagatgaatttccacatgctgggtacaaggratggatagtcaagtggctagttaccgtgatctaattttttgaaattctcctatgacaaagcttgaaactcaggtcttgaatcctcagaggtgatttccatgttgttagatgttaatgtgcattgtgatacgtcacccccaagcaaaccatcagttcattcatcccacaaaagtttattaagcacctactgtgtgcaaggcactgttaggattcgtggattaaccattgtctaaacaggaaaggcaaataygcagcaagtattccataaatcccttatccttttcccaaaccagacactcatcttgccmcaagccyggacatggcctcagaatccatctcaacagagggatccaggcagttcttatcaatcaaatggaattaacatgccgtattaaacctgtttgcaatcttggagctagaacactgtagatgcttagagaatatggagacaagagagctcaggaggtcaaggctgcagtaagccaaggtggcactgcacccaagcctcagtgacagagagagaccctgtctcataaaaaaaaaaaacaaaaaaaaaacccaaaacaaaaacaaaagccaatcctggtctggaagctggaccctgcatccaaccctggggaatccactggggagaatatggagacaagagaaagaagtccaagcagtaatcagccattttggaatgaggtaggataattttcaaaacagctccatagctgtgccaccatgcaagctaagcaaacaccatctagggtgagggaagctaagagcacagatgctgctatttgaccttaagcaagtcactttcatctatctgagctccagttttcttatttataaaatgggggtgatamtaacwatgcctacatcatagcgttgtgatgagtaaatgagatgatgcaatgcattcaacaatgcaaaaatgtattatcatttaacgatgccatgtatttaacaacgcctgtctaatagtaagccatttgctttcagtaactaaatgtagactgtattaggtaaagaagaataaaataaattatcctcttccaaccaacccatcagtaggaggacattccagacatgtgataaaacagaaagcttttaggcccaagttctagaactacagttatcttatttccattaggaaatacacttattgaaactcacagagcttgtttccaggaactgccccggaatataaacgcttggtcactagggcatatatttcttggctggagctctgccccaccctgaaacacaccccatcagagagcggcaataatgtaaaatggcaatgtgttctcccttgccttgtcaaatgcctaaaaggcatatattctttgatttacgaaaggagaccctcaccaaacacatgaaatattacagcagaacttgcatctagaactcagtgagaatgccagatgtcctatactcctattctgccatcttttgttggtgaatatttatcattattacattacaaacacaatataagtcctgaatagacatttaggaaatacagagaaggaaaaacaagaagataaaccaccatttaggagcaaaaaaatgttgttaacatattaatatctatccaaactcttccctctgcatgtttaaattttaagaaataagagatttttaaatttaaaatcactgcttaaattatcwctctctttctctctctgtctctctctctagtttatcattaccagttmaagatccagttcatcaaccaaactgagacrccaatacaaacaacttttaccatgtcactactcggaacaaaagagaaaatgcagaaaattcccatcactctgtgagtaggaggtgtagccccctagggtgaygacatttatttttcttgcagaacataaatggactctgtaattttcaagagtcaggccagctacaactactttattccagacgcaaaccaaaaactatctgagacacatgtcaatcaatttagtttattttgccaaggttaaagacattaycgtgacacagcctcaggaggtcctggtgacctgtatccaaggtggtcaggctacagcttggytttatacattataggaagatataagacatcaatcagtacttgtaagatgtacactggtttggtccagaaaggcaggagaactcaaagtggtttggggttggaggtgcaggggagcttccaagtcatgggtgcattcaaagattttctgattggcattggttgaatgagtttatctaaagatctagaatcaatagaagggagtgtctggattaagataaggggttgtggagaccaaggttcttattatgcagaagaagcctccaggtagcaggcttcagagacaattgattgtaaatgttwcttatcagacttaaaaaggtgccagacttagttcattctctcccagatcagtgaaaagacctggatagkgaagggaattctctacagaatgtagattttcccaccacaagacagctgttcagggccctttcaaaatatgtcaaagaaatatattttagggtaaaatagtttaatttctttcagggcctgctgtctgtcatgtgatgctatactagagtcaggctggaatttggtgtcttattgctacaaaaagtctgcttcatcagtcttaaaatctgggttttaatgttaatgctggtcagttgtgcctgaattccaaagggaggagagtataaagaggcgtgtcccacctccccttcccaccatggcttgaactttggaatgcccttggctgagaggaggggtccattcagatggttggagggcttagaattttatttttagtttacatgggcttgagcatttaagcaccaatcacatacagggcactgtgrtaggcgccagatactacctgagctagctcttacctacagcagaaaactcttggtccacaagacaactcttagtgtttggttctttttgtgaacataaataaatatttggtgcttcagaaacaacccctttagtaaacacagcccatcccacatggccatcctggtcagacaggacatccacccaagcccgaaccctcaggtccctcctcagcctctccagttcccaccaactgctcaatgttatgcactgtgggctgagcagacagggaagccagagatggccccaccacggcctgcagtgcagaggcaggtggtgaggggcggagcaggtgttcccaagaggtcccaagagcctttccagtgagttcgtaacccagaaattcaagtggtatcttttgacttggcacagatttccaatttcaatcagcctgctctgccagcctccccatctgtccttcaccctgttacccacctgctcactctgaggctccccagcctctctggcctctcaaccctcagcatggactctccctggaaagtgacactagcccctcacccactccagagatgatcctgagcttcccgaaaattgcccccagctttggatctctgatcatcacactgattcagtcattcagcaagcatttgttgatgctctgtccaacacctacctaaggatacagaggaccctagcctctggatgctcacaacctggcagggcggggggattcctaaacaattcttcacagcatactcgggaagagctatgccaagccacacaagggacccccccccaaccccaccatccatctgcctcgccctaaatccactgctgcctctgcactgccaaaaatctctcccaggggatggttctcaatagtggaaagggcatctcgctgctctgtcaacgttgggatattttagtgtcttggagattagtgagtaaagctgatcatgatacctcagagtctgcatttaaatcttgctctaaatyggtgcatcctttttatgtgtagtttttctattactgttatgcctcactgttttaacagaggtttctatttatatggggggaggagcattacttgggagagagtgcatgctgcaggcatactatgttaaacctacagagagctgaactgtccagacrccgttgccaaagccccactgtctccacagcggcttcttcctagaagctaagctagagaaagttaactagatttgttatagtgggacttctcggagcctttttgatgtgttagccagaaaatagtatagttttcgcaattttattatctggaaatcccttttttatcctggcacacctactgctaactctatcaatagtctgttgaacactagtttgggaaatgcagcaaaaatcccaagtcattcagggaaacacaacacatcctgaatgtgtgtgaccgtcactttgctgttacgactaaactgattgtgtctgattttctttgtgtattcaaggggcaaaggaattgctagtaataaaacgtattcctttcttatcaygctggatgtggatatcggcgagctgatcatgatcaagttcaagtgggaaaacagtgcagtgtgggccaatgtctgggacacggtccagaccatcatcccatggarcacagggccgcgccactcaggcctcgttctgaagacgatcagagtcaaagcaggagaaacccagcaaaggtgactgctgattcaatctcctattaaygtccattaagcacccacttgtgccaggcagtctcacaatttaatactcacattcatcatgtgaggtgagtattattaggcccnagtgatggagtacagaagctcagaaaggtgaagtgactatcccaactttacayagccacaggtgccaggacaaggattcacacccaggtctttgaatacacaccagggtctccccactgcccgtggctaacgctgcctgcctctggagcctgaggaccaccacactaaccccaggcttctcaagcttcagtgcaggtgaatcaccaggtgatgtcagtgctgccagtccaaggtgctgtggtagatgcaacatcttttttttattgtttgcccaaagtaaatcttttaacagatcacaatatcaaaaatctcaatgtatctctctctctctctctctctctctctctctgtggtcgtatctttcaaatgtcagttgccaaagaatcactgggaagccaaacacatttgcagaattcctggacctacccgcagattcatggtgggcttgggaaggggtccaggatgcctgttgttgaataagagccctaagaaactccaatgtagaacaatgggtcacccataagaaatgctgctgtgtttgatttaacatctcccgtggccccaaagtctccagggatacgaaggagctggggtggggagcaaagaaaaggaaggacagagctgggcgtggtggctcacacctgtaatcccagcactttgggaggcctttggcgggcggatcacctgaggtcaggagttcaagaccagcctggccgacatggtgaaatcccgtctctacaaaaatacaaaaattagctgggcgtggtggcgcacamtggtagtcccagctactcggggggctgaggcagaagaatcagttgaacccaggaggtggaggttgcagttagccragatcgcggcattgcactccagcctggatgacagagagagagactccgtctcaaaaaataataataataatagaaaagaaaaggaaggatgctccagcgctcctgaagtcctcccagcaraagaaagggctgcccagcacaccctgccatagcaaccgtgcttttcggtcatccgtggttctccacggcagaattccaggcatccccgggccctctcctctctcttcccttctctattcaggaaacggtctctcctctcccaccttcacttgtcgcgaaggccatgtttctctttggcttgtcctcagagaggtggaaaacagcaggtttctaacctctgaactaccctcttccstcaccccctgggtttcactgccaggtgccggcctgtggcagatgtatgcccctgagtccctttatacaaccgcactctgagattttatctccctgggatgcaaaatcctggcaattactgagagcatactctgccgtctgccaacagatctcccaacaggatcaatctgggaagattaaactgctcgctcctcttctgcactgagctcttctcacatgactctttggcccattggagcagcgctgcttctgagctctgaccctgcccagatgctcttagctggagagtaattcctcagtttaggtggctgctcaccctgacaatcccatgtggcttgacctgaaagggtggctaaagcacaacactaccttctccactggggcacacccatgtggtacggaagaagaaatgaggagagggaggggcctggcccttccagggctcccacacggggtgagcattgaagcaggtgctccatggcattggtctcacgtgatctttgctgtgatcctgaaatgggtagtattggctgtgcagattaggaacctgaggctcacagaagttacacagcttgaggacattgctcaaaattgtcccagtcyagatttgactgggatttgtctgatttattacccatttgttgggggtgtgctgtttccaacagttccttcttccattagttttggttccattaatctgaattttctcagtctawtctagcagagttgcagtgctggacattaacatatgtatgcatcaaacccatccttagggctgtaggaggtactgcatgcaggttatgggagctataattttttttaggttgtaaataccgagtgcctcctctgtgtctacacagtgccaggtactatcggagaatacaaaaaaaaaaaaaaaaatctgagttgtggctcttggtagaaataaactccaggacctaaccaggaaaataagatgaattaattttactaacggtgtggtccatcccagggcttctcaaactttcacgagcatacaaagcatctgggaatcatgttaaaatgcaggttctgctttagtgagtctggggtgagcctgatgttctgcatttctaacaagcgaccaggcaatgctgttgctgcaggtcaacagaccacactttgaatagtgagagtccagcattacacaacccgggaagtgtaagaagaaagttcagacccgtacacttggggctgtgctgcaacatgctttgaggaggccaagaggtgttcccagggagacaggcagccggcaaagcaatatggctggcaggatcggatggactccagtgtcagccagtcctaaactcacattttaacttcactgctcacaatctgtgtagcctcaaacaataacttcactcttcaagactcagttgtttagtgataaacgagaatcataatatacatttcatgagactaataacaactactaattttttagtgccttttgcagaccaaaatcccagaatcgggatgggaacattaaactctacactcgtaatatcgctgctaagtgcaagtgggaaaagaagtaggttaagtaacttgctctgtgcctccatggaagaaattcagtggaaggtggttttcttcccccaaaggcacaaaatcagggatgagtagggttgtggagatggtgaagagaaagagaagaaattaytggccctacagcaagaccaagtataataactggctaaacctaatgagaagacattcaatttccacagtactcatataaatgcaaaataaaatcaaagaaattatcactggttactcattagtttggcaggaattcaaaaacggacaacacccagagttagtaaagatgtggagaaacgggcattctcatacactattagtgagagtgtaaattacaggcattttgtaggggaatttcattcaacaactaacgtttagtgagtacctaccttatgccagacaatgttgtggacaccagatgtataatagtgaacagacaggctgggctaaaatacaaaaaaattagccgggcgtggtggcgcatgcctataatcccagctactcgggaggctgaggcaaaggaatcgcttgaacccaggaggcagaggttgcggtgagctgagatcacaccactgcactccagcctggcgacagagcgagactccgtctcaaaaaaaataaaaaatatatatatatatatgtatatatgtgtgtgtgtgtatatatatatgtatatgtgtgtgtgtgtgtgtatatatatatacatatatatatacatatatatgtatatgtgtatatatatatatatgtatatgtayatatatatatgtatatgtatatatatatatagtgaacagacagagtccttggtctcatgaagtttacattatcacatgtttaaatatgcatactactttgagccagaattttatttctaggtgtcttatcatctttctggagtatctgtgcacataatcaaaatatgcacaaaggctatatatgaatacatatgtacagaatgtttgttgcagtactattaaataaatactatacataataagtaaatagtaaactcttgagaaaatcttaatgtctaacagtaggaaaatgcattgtggttcatccttaaaatggaatgtcatgaagcaggtgaaaaatagtgaaatagacttctacctactgatatgagcaagtctctgagtaccattttctggtaacaggaaaaattgcaggaaaacatacacaacatgatgccactcaatatatgtaaatgcataggaacaagtctggaaatgcataaaccaaatcataaatgtagagaggggagtgatgttagtgaaggccgatggtgaagaggttctttattatttggcttcatttattcctttaccatttgaattttcaagaatgcattcacaaattactcatagcatttttaaattttaaaagtccagtttagtgaagacttgaccttagacgcaattcaaagaaaaaagaagtaataaactagaatttttctacagatatatctatagatatatatttaacagatgcaattggaaataataacacaaaatggtatctcgggccaagccaacagccaaagcagtctagttgttgtttccaaaacacatagtrgtgtcctctttagtggacaatgtcagctccaatatgaggaaggggcagggcttacagggctgagccaggcagaaaccgatgacactggcctcatgccaaggacctttaagaacagcatttacaaactggagcttgtccaaggagggaaggctgaggaggtaagcttgccttaggaggaagggttgaggaactagaaatgtttgccctgaagtcaaggcaaatgtggtcaaggaaacaatagtcaccctcaaatcttcgatgagctgtcataggggagaacaaaggagggctgccccaggactttccttcttacagaactgaaatcaccccagtgwagaactccaggaagtcttacactgatggctttcactgacttgggttttgtttttctctgaagttacaaaaatatttgcgaacataagaatctaacttaaaaaaagacatcacatgccttacacaaattgagtgaaatttgataaagaatgaaacacttcaataagctccacctaaaacttaatgctgtgtttgcttcctgttttctattcagaatgacattttgttcagaaaacacagatgacctactacttcgcccaacmcaggaaaaaatcttcgtgaaatgtgaaataaagtctaaaacatcaaagcgaaagatcagatgagatttaatgaagacccagtgtaaagaataaatgaatcttactccttatctggaatggctgcyttatttagaagccaaaattacataaagaatctcacacaaagcttaaataaagtttagatttaaggggggtatgtttcactctcataaactgagcttttaaaaacgatatgatataactattttccagtatcagtacaaccaaaaatgtcccaattttatctctggttaaatgttaatatatgcaaataagtacaaatgcaagagccattttagatctgttgttctaatttacaatgtcttttataattaagtttcccacatgtccttgctagtttattatgacccatttttgaaccatgctagaaagatacttttttattaggtaactagtgcttcaataaagcaagattctaattaatcaccactagttgtgtataccaaatacacatcctttaagacaatacagttcttaaaagaagaaaaattataattattctaatatttatacaaatcatataacgatttcacagaaccaaacacttacaagtagaattctactaaaactacttgtgataacagtgaaagctagacaygtggtcattttaataatggaattacaaattaaataaacataattattatatcttactaatgcttgcaacaaaagctaattttaaaaacttggaatgtctcaaagcatttgctatggactgaatgtttgagtcaccccaaaattcatatgctgaaatctaatccccaatgtgatggtgtttggaggtggggcctttgggaggtgaycaggtcatgagggtggagccctcataagtgggattagtgcccttataggggataaaggatcagaactctctgccatgtgcggatatgagaaggcaactatatgcaaaccaggaagttgaccctcacctggaagtagactaccagatctgctggcacctttatcttggacttctcagcttccagaactgtgagaaataaatgtttcttgtttaagccatccagactatggtaatttgctatagaagcctgaactaactgagagagttagatgtcaaatttcaaactgtccaataagtgaaataataatgttttgaccagcaaattccatcacaaagcacatggtgacaatggacgctaaatatggtaatcagttagatatgtgttttacataattcagagaggaggaacatgttatgcacattaaacaagctaacctaacttgcacttaggctcagctatatacagaccataattcatattctcttcaccaaagcggggtaaactggggctcatgaaaacaaaaatcctggaaagatgtctgcctctgactaatcaatttaaaattatcttgcatgattcacttttatttccctttgaaagacctagaaatctaaaacttatggggtggtgggataggaagaacagctggtcaatgtttccaaatgaagcattctgtcctgaatgctaatcttacctgcaaaagtatttgaccctacttttagggaatgtgtgtgagtgtgtgtctaaaattgatagataataaaatgaacatttcccattatgtctaaaatactaaggtttacaataaaatgtttgcattggattgccaggttttatcattaatgatccagaaggaatttagaatatcacttttgaaaaacaacagggaaacactctttgctgtatatgcaacagagtccatgcatatgtattccaggagacatgtatgtgagccttgaaatcatcgcagccagaaacagcccaaatgtctgccagtacgatgcagaaatgaactgggttatagtcttgctaatggactgtcgtacaaccgtaagaaagataagccaaagctacacacacaaaagaacagagctggggccagcgtgaggcagcgagacatctagggagcaacatttaaggaagcactcatgcatttttcgtttgcacaaagacacaaaaaaaggtatagtatgatacaaacaatggataaacacctgtaatcccagcactttgggaggctgaggcaggctgatcaattgaggtcaggagttcgagaccagcctggccaacatggtgaaacccggtctctactaaaaatacaaaaattagctgggcatggtggcgcatgcctgtaatcccagctacttgggaggctgaggcacaagaatcccttgaacccgggaggcagaggttgcagtgatctgagatcgcgacactgcactccagcctgggcaatagggtaagactccgtctcaaaaaaaaaaaaaaaaaaaaccaaaaggaaacaaaacaataaaatcattatcacaaaagtgaggctgtgataatcccaggaaagaggaagggcaccctggagttccaggtgccagcaatagtctacttcttattccaggtggtgggtacacacacgttcactgatttaaccgttctatatacatctacatttcacgcactttttagtatgaatgtcacctttcacaatgtgaaaattaaaaagggaaaataaagggcagagttaaacaaacatgtttctactatagtgtgatatgtttcaaaagtaatatagtttcacaagcaatataattagaaattatttcatctttagtaagaaaacttgaagtgccacaatacatggtaacattttgggcagagaattcaacaagcatccaacgtgacaagtggttaactggaacatttgaaactcctcttggcatgtccaaatctggttgccaattctgttgtcggtggattattttcacttggagggatgtgttcatcgacatcacattttcttaagtatattcgagtagggaagtcaaattgggaaactgaataatgcagtcacatctgttcgttgcacatgcaaaatgctggctcgtgaactgattatacacacctctctccaaagaatctgcatttatgagcccactcaggaaagataacactagcatcttgccttttaggcaaaagcttatttgtgcttctcttgtaagagagcactgggaaagaaatggaatgtcgattacactgcagctgggctctttgaggtgagtaagtcagagagagaaggaaacaagcactccattcaacattaaaatgaacgcactctgctgcatcgcaaagctccctgtcctcaatgttcaccttgagtcatgtcggccgcaaatactgcaaaagcttggattgcaatacacgtctgtggggcagcaaggcaaggggtaaagctgcccagtgctgtgcttgccctcccacagaggctggaccaaagtaaagtcagagggatgggaaatagacaagcaagatgaagactaaagaaagtcagtcccaaaagggaccatttacatggtcccataatacatacttctatttgaatcccaatgatccgtacatgattaatggctcccgacacatctcattccttcccttctcttatcccttcctccttttcttttctcccctggaattgctctgcctaacttagtcctatttatctacccaggcccagttattttcaccagttgcctcctagcctggccaggccacagagatctttctctcttctgagcgcctggcaatcacataagtgacgctctccgccatccacttggcctttagttatttgtgccccgctgattcccctccaacctcccagcctccctgctgctccctgccctccattcaaccattccaggggagcccagacctccttccctactcgcacgtttctctctttataggcaatctcacccactcctatggctttatttatgatcaaccacataggccaaccattctcagtgtagagctccagcctgggccttctctccagacccgtattcccatatattatgcaattgtccattccacagttcccgctgtgtcatctctccctgcatccaaaaatgaatgcatgatgtttcttgcccctggaacctgctcatccccattctctctgttgtttatctccttgaaggtcattaccacccacccagttgctggtggtggactctggggagtcatccattatgtgtcctcccctttggcccctcacaatccaatgatcaccatattccatgaattctactcttatttcttaagcgtgtctatgtctccccacctctactgccatcaacccagcccaagccgaactatcgcttacccagacatttgcaacaactttccaactcatccctcagacaccctcctccctctcaatcccttcccctcacagcgaccagagtgatcttaaaaaaaaaaaaaaaaaaaaaaagttatatcattttcctgcataaagccctcccaatgacctcccacgttttttggaaaaagtccaaaataattaccctggccttcaaggctcccagtcaagcccctacttttctccccagtcttgcctcccattactctctgtctgtcactcactaggccattgtccagctccacccacggagtgtccgcccagcctgcattttatttttaatttttatttatttatatatttattggagacaaagtctcactctgtcacccaggctggaatgcagtggtgcaatcacagtcattgcagccttgacctcctggggctcaaacaattctcccagctcatccttccgagtacctgggactacaagtgcacactgccacatccatctaattcctaaatgttttgtagagacaggggtctcactatgttgcccaggtttagcgtgcactttagaaatgcctgaggagctttaaaaactagccctgcctcagccccacacctagagattttttacttaattggactagggcagggcccggagattaagactgttgaaagctccccaggtgatcctaatatgcactaagtttgaaacccagaggtctagacaacaccagccacctcagttccttcaaaagcgcaaagctctctccttggccccttctgttgcttacactcccacctctcctccattgcatgcttgcagctccaagttaggtgttactgcttgggagatcatttaacaattatctcatcctacccgagcttcaagcagctcaccctgccatccatagtcaatgtttttttattctcctggtgaaatgatttgtggccatgccatgcagagccacattggagcctgaggcaaaaggaaaaatcagtaatagtgaacctgtstttatttatatatttattttttagatgggtctcactctgctacccagactggagtgcagtaacatgatcacagcccattgcagcctcaacctcctgagctcgagggatcctcccaccttagcctcccaagtagctaggactacaggtgcatgccaccaagcccagataatttttatattttctataaagacaagggttgcccaggctagtcttgaactcctgggttcaagcaatccaccctccttaccttcccaaagtgctgggattacaggagtgagccactgcacccagcctgatcttgctgtcacctaggctggagtgcagtggccaaatcagagctcactgcagcctcaacctcctggacacaagcaatcttccggcctcagccttccaagtcactgggattagatgtgagccaccatgacagcaaaatgtttatattttatgtatcatagatttttgcattcatttccattagaaaaatttttgcattaaaaattttcttgataactgagtttttggagcccccttacatttttgcactcaaggcaagtgcttcactagctttaccctagccgtaggcctgatctttgaaatggtttctttactgcctttctcccccactggccttgaagcttggtgaagtcagggagaggctctcattgttcactgcattattcccagtgctcagcctatcacctggtacagagttggcatcctgtaaatgcttgctgagttaataagtgacagttatctcttcttatctgtatttttttcctcttgattaaatcagaagcttcagctaccacacctgtccaagatagagttcactgcttcctcattcagcttagaaacaaagccaggttggcgaggcggttgacttcctccctccctcatctcttggccctgccggcctcctcts

SEQ ID NO: 95821 - DNA, 65131 bp, Homo sapiens
tttgttttcctacaactgaggctgagaccttcctccttggcccccagcccaggtggtccctccagggaccagcctgagggtaggaggagtgtcccaaccccagtcacccaaaagccaaagtcaagggcaaaacacgtaccaggaggccctcacccggcccaaggctggtcaagactgcatggcagtcgcgacggtatagacgtgggtggcattggtgtggactcccttctccagcccccttacctgaggggtgcctctcccagcctcgcggcctcagctgagcacccactggctctgtgaccttggcaagtggcctcatgtccctggggctcagcctccccatctgtaaggagaggcccacagagctgctgttggattataagagatgtgactgacaagggctcagcacgcagaccttgcccatagggtgattattgttgtcaaagacacagcctgaggccctgggtggagcacagcctccagcccagcaggtgtgagccataccccatcccgtctgctgacagaaatgtgcctccctcttttctgctggcctgaacagcaccacagcacttgtcaccagcccaggccttcagccaggtggacgacctggtgtaccacacacccatggtgtgaccctgtccctggatgctctgagaatagaggagatgctgttgctgccccataggccctgggcccagagaaggacgcagactcctcccaccaggagccaaggttaccctcccccaaccctgagtgtctaattcccacgaactctccttcttaaaggagggcagggagagaaacgaacagcaagaaccatagctatttggtgcaaaaagaaacgtggtcactgagagattccaggaagtgtcaaggccagccaggtttaccgctgccgtgctgagccctggcctaggracaggtgagccccctccccacagtgccacaggggcgggcagggcctgctccataaagccatcattgtgtcccacctctgtgcccccacccagggcccgggtcccaccaaggccctggggccctgcccaagaagaagcttccatcagaacagtcaactgacttgtcaagccaactgtaatctagcaagagggcgactctttaatagcagtggcgatgaatggaggtaaaaagagcaggacctggtgacgaggagcatgggggccggccatcatcctccaggaagggcactggcaccaagtgaattccacagacagaggggtggccagtccagccagcagagagtggagcagagtgggagctggtcccgagccccaacgatcaggcaaggctgcctggagggcactgaccatgcccttctaggcatcagggcccaggactgaggccaccttcttccacctgtgccccggcccctggtggcttaggcagctggggtgggagcagcaagcaccccatggttgagtgacttttctcggactagaacatttcaccctcaaaagagccgccatccaccccacagtggagcttgtcaagctgctcagtgccctctctggtggctcccccgacccggccgagtcggaacccctctgggcagtgaatgacagccatctgggaggagacccactggccaccggaagctgcgagcagtcaccccccaccccatccaggctgtgatcccgcctccaccctagtcgtctaaagacatgtcccttgggaagtttcaagcagaagaaccaggacgatgcccttggggcaacgttaccaggtccctgtcctgcctcccaagctggcagaacccgccaggcctgcccacagtcccgctgcccggggaggagggtgggctccactggacagactccgaatcccggccaggcagcagtccaagccccccacttgccaacaaccccacgtcacacgcgagggcagggggccagccagggggaggtcaccgagccagcagggcggsgggggcgggcaagggccggggaagcccaggaccacgctgcccctacgaattgctcaggttctcctcttctgtttatcctaccctcttcccctaaggactgaagcgggcctggagggcctagagaaagggcacaaagaacagcgaggccctgggcgggcgtggagggaggggaatggcccttccgaagccccgggcctcttccagcgcggtcctcgaaccgaaccgcaggacccctgctgtccccgggcagcggccggagcgcgtccctcgggtcctgggaagacstgccgcgtctgcgggctgcctgggagcccaggcgccccgcggtgctgggggaggagcccggcacggggccgctgggcggcaaaggggccgcgggctccctggaggaggcggctgcggacggggcctggcgacctcggagaaggtggcgtccacggcgcgcagcccggcgccccaagcctgccgccgggtcggggtcggggccggggccgggccccgcgggtccgcgcgagccggagtcccctctaaaagtttgtccccaaacgaaacccctctctctgccccgcgtgggcagcggggccagccccacgggaggctctgaggacagacacgactgccctcctccaccccttggcaaacaacaatgggcggccgccggacgaacgacgagggaagcgagtgtggaaaatcccccaattttttgcaaagtcaaccgcgggcgctcgggggccgggccgcgtgctgcccccgcgcggccgtccgcgggactgtgcgccgggagggggcgccgctgttgatctcgtggttctcagactctgagaccgcacggtgggccgggaatgaggcttcattcctgaagccgaatgttaatgcctcttctgggatcatcacagcctgccactaagccgtgttcttttacttttctttgccattaagtcagagatcacgcattaaagaattggtgaagtggatcttcaggggacaaagccactgagcagaagagctgccagtgcttttccttggaccccacaagcagtcagggccagaagctgcccctagcaaacacttagctcatatgcactctcggggctggggcaaaccttggccacgcaggagatcacccagggaagaaaggaaacagcgcgcagagcgcgcctcctgagaccctggctgtgtccgctgacctcctggaaccccacgccagccccagactgtgcgtttctatccattttccaagacatgacactgaggactcatcgcggggagtagcgggaagtggtggggagtagcgtgatgcaagctgccccgccaacgagggctcgagctgccttccactcggctcaagtgtccactgattgatgggtggctcatctgacttgactttcagagcccagaaactcacctacagccttagggtctcaggtgcctgtgcagggcttcaatcaaagtggaagactgagcaaagtcctgtagccagccaggcagatttccctcctcttaaaagaattctagaaagaaagggcttcctggctaatgtgagtgcttcccatcagccagtgtggcaggtatgaagttggattaaatagcttgttctgggagatgttgctccatgggtcaggctgctctggctcccattcaagggtgggaccttatcacaggcacttcgtccctgcctgggcctcagtttcccccttgggacagtgagatcatcacagggtggagccatggcccaagtaccgatggcttcgttggccttcggagctgctccagctttcccttgaacactctgggcccacgttcccccttggtggcagtgacggtcaccaggctctcaggagtggcccctgtagacgctctcatccctggcctagggagctggggcaagtgcagaggtggggaaggggagggttctggggctcacagcaggaatcaggatcccagctctgctgactctcatggggtgagagtggttgaccttggaaccagggtcttaacccctttgaacctcagttttctcttctgtaaatggatatcacagcctacccccgcagatttgctgatggaattggaaatgacacctctacaatgcctggcacccagcargtctccaaaagagcagccttaattatgatgtagcacgaggatccttatctgggtaaggacatctggggggtggacccggggcagctgtgctcccctaggccacacaggaaggctccccagggctcaggcacagactgcgtcaaggggctgcaggcaggtccaagcacactgcagggcggccccacctgtgtcccatggggactgcacccccactcctataggaatgagtcacttctggaaaagcttgtccaagctgcccccaggaccctcgggccagggacagttttaaagcagcctacaagatgagcaggggctttggggccctaggtcccactgaggaccccacaccatggactccagggtgcgctgggctgtgttgagggttctgcacccgcctgtccacagcggatattcctgcggtccctttggaaaatgcatgccgcccgctcagctgggtttggggtgttggtttttccagctctctgggtttgcttccaggagggctttctggtgtgatgttgtctacgtttaacagctttactgaggcataattgacaccccatgatcgcttccggtccctaacagaacggaaggcagggcaccaccccgcctcccccccccaccccgtccccggcagggcttgacgtggacactgggagcccacgcctggcagccagactcgctcccagagccctcgctggcctgaaccaacacactagggcccaccgcggccggccctgcagctgtgagatcctggcaggtcccagccccactcctgcgcttccgacgggctgcagcctccgagtactgccagagcccaagcagtgtgagtgggcacctggcgggaccccccgccccacgaatgccgcgcgtgcttgccaggctgggcggcggcgagtgaggagcccgcaccacccggcccacacacgagccaacgtggagcgagccctccgcagccaggttgggcccgggccgctggactctccaaccaacccacgaaagacagaatatttggtgggcactcacgattcttaagaattggctcaatgttttataactctttcattggagtataataaacatggatgggggaaaatgcacctcgtctgatattcctttcaaacaaggaggaagccataaagccgctccgcaggcctctgcagacagcccaacatctcttcaatgcggggctgcggggcactgtcccaaagccagccgcaggggtgagggggtcgagcaggaaaggaaagcctcgctttccctctcggtcctggtggtgggcggcccccgccgccctggtccctggaagtgcagcccagtaggctagcgtctaacttcagcgccccagcgtgcaaggtcaaggcctttcctcccgcgcgggctgcggggacgtgggcggctgggacttggggaggagggggtacggacccaggctccagaagcgccagccgccgmgccccctcaccgcggcccccgccaggagagcctcccacgcctcggctccgcactgccggttggtcccccactcccctgagggcggaatcacttcccagtcgctggctgcccgcctgctagcggcctcgccaccgcagcagacccaggtcccgcgcccagcacccgcggcgaaccccggcactccggaggcggggccgaggatcggcgcgggcggcgacggcaagagacgccacgggggcgggccaggggcggaccggggcggggcggcggcggcggactgcggagacgcggcggcgcgcggggcggcgcagagcgttctcggcgcggagtggagcggagcgggctggtgctgggggcgcggagagcgctgtgctggccggggccgggagcggggccgagcgggagcggagtcgggcgtcgggcccggggagccggggccgggcggggagcagccatggcaccgcggagggtcggggcccgcgccgctgcgggcggcctgggcgccgagtagccgggccgggccggagcgcgggcggcggcggaggcagctgcgcccgcgcctcctgccctcccaggccccgcgccccgcgcccgggccccggcgatggtgacacatgcggcggcggcgcgccagcggcaggaccatggttgagcgcgccagcaagttcgtgctggtggtggcgggcccggtgtgcttcatgctcatcttgtaccagtacgcgggcccaggactgagcctgggcgcgcccggcggcggcgcgccgcccgacgacctgkacctgttccccacrcccgaccccsactacgagaagaakyactacttcccggtccgygagctggagcgctcgctgcgcttcgacatgaagggcgacgamgtgatcgtcttcctgcacatccagaagacgggcggcaccaccttcggccgccacctcgtgcagaacgtacgcctcgaggkgccgtgygactgccggcccggccagaagaagtgcacctgctaccggcccaaccgccgcgagacttggctcttctcccgcttctccaccggctggagctgcgggctgcacgccgactggaccgagctcaccaactgcgtgcccggcgtgctggaccgccgcgactccgccgcgctgcgcacgcccaggtgagcgcccgggcggcgggatcctcgcgcagctgcgcccccgaggccgggccgtatgcccgccgtgctgtactgggtcggccctgccttccctacccccttctgccctcttgggggcccccactcgccggcacccctcccgacctgccgagcgcccgaggctcccagctcctctgggtgagccggctgtcaccgcgctttctgacctcgctctcactctcttccttgccttgtgctgccctactgccggcttgactgcgcagcgcccgggttttctccagggtccccgcccgctgccctcgggccaccttacctgctgtgcgccgtgaggtctggcccgccggacttggggacgcgggcttctgggtgtgtgcgtggcctacctggagtgttggcttccccgtgccgcttcggtgctgtggtcccaaaagtggaagtgagagtagtgaggtgccgcccctgtgcctggagtgcctgccttcagagggtgggggagctgccagggaagggggctggctctgcccgcctgcctgccggtgtgtgcaggtagaacaaaggccctgttgacctggggctgggggcggggaggaggcagtaccgcctgtcctcccagtggggcctgccagccgaattcttccaggcacaggcttgcctggagagaggaacaaaagccacccgatgggggaccaccttccccaggaagctaccagccaggttgggggtagttgagctggtccagggaacctgtgctgccacaccccttctctggggtcccccagccccatgtcagagctgagctgcgtgaggacacagagcatgggaggggtgccggggcagctcttctgggaagccgtttgtaggggaacctggggtgctgctgggtttccagcagttaaagttggggttattttyctcctgttcctgttggtgcccattcgtcctgcagggatgccctgcggggcctttctccccaaagtctgggctgggaagggccaggagcagggcttcttgtctgccttttgtttctcttccaaatttgccttaggactgaatttgcagacaggctggtggtaggaggctgggcggttgtaggcgtgttggctggcactcttgggtccagaggctgtaggctctcaggtgtgcctggggagcctggaaggtccagccagcctggagctgagcagagtccgagacactgctcccctgcacagacctcaatccttgctctgtggtctttctcaggctgtcaggaaattggggtcctagagttggaggggcatcttcccacttttctttctcccccctcccccaactgtacacacacacacccacacacacacacacactgcagctcccagcctgggaggtgatgttctgagcctcttacagccacattctacacttggcggtcacagagctgcctgtctagggcccctgaaggattgcttccggcccagcacttagtctgctctgcacagatgcacgttcctgctgcagggcccccctaaccctggtccagcttctctgtgctaggctcagctgtgcctgggaccacagccatgcccccacccacccttccaccagtcagagcagtaggctcccagagttggtcactgaccaataccaacagacgcctccctacctgtggkgggtgcaaggatgggggtcaccccctttgccagagggacttagctcggcagcctaagaggattgcgtggaagcttcgggccgccaagaagccggagcttttgaaacaagcctgctcagcagaggccacctcagccctagattgcaaccaggatgctcttcctgcagccccgcacgcctgtgggtccccagggtgaagagccttggcctcctttctctggagtttgtccatgagagtgggaggaccaggtggggccgatggggccccaggtgctacaccaggaaggccmggctccccctgcccagggagcatgtgtggagcaagaatggaaaacgcagatgcctctggcggaggtgggctgccagcctggaaattgctagctcagcagcatgcgscagggttgggaggggcttccagggccgtcaggaggccccctctgccacccactctggaagtgggttgtgctaccgggcaggtgacagcaccccaccctccgagtccctcttctccgcctccactcccttcagttctgttgcaggcactaggtagattgcttttttaatgagcttcatcaggaggccaaggtaatcttgcctttgtgctcgcagggccaagctgcactgaggtccacctgctgagcgctgccccgccacctgagtcttctggcccaggctggagctgggctaagctgctctgctgtggcggttgggatgcacttcccccatctgcccagggacccagcaactctctatcaggggcagtgcccatccctgctggggtgcctcatgttaagtgggcttggtgtcaggagactcaggtgtcaccctggccctcctgcgatgtcttcactctggctctgcactgccatctccgtgttctctggggactgagaccctcttttccttctatctctgcctgcctccctgcccaaggctggctcctggaacctctccaccaagcccctcccattccctgctgcggtttgggagggtctcagtgggcctgtggtgcgcgtaagagaggtggggctcttcccggctgccagcctccccattgcacagtatcagcctgggctgctctgagctgggcatccatggagatggacaggtttttgatgtcttcctggaatatggtttggaacttctagtggctgttagtgcttggctgccttggtagaaaggaacaagagtgagcagagcattggcgggtccctstttagtcctgtgttcaccatgggggctgcctcatctgccgacatcagccagggtgcttgtaagactccactggaaggacgtttgctggctggccttaaagaggtgtggccatccccaggcagcagccaaatggccagccattccagggaccactcggttagaatgtctcagcaccccacactccgctgtcactcagagggtccagatggtgctccagagccagaacctccctccttcctcttcccgtctgcctgaaggcaacgcaagaacaggcatggtcaaggtcttgcccgggccaccctggaaatgtccctgaaatcatgtgggcttcatttggggccacggagggcatctggagcccaagtgtggcatctgggccaccttggccsggaacccgggaccagctcacatcctctctgcaccagggcctctctggagcccttagtgggctcgcagcctctgtgacgttgccctgcagagaccagtgcttccttgctggagggatggcgcaggagcccgcagcctcgcctttgacctgccctccgtgatcctgaagccttctcagactccagaaatccgcctggtgctggacctgtgtgccgtccacctggtgtgcctgctctcctctcccacttttctgcctgctcctcccctcccttcagtctgctcagatgccccttcctccaggaaatcttccctggctttctgttcctaggctcccctgttgccttaggcgcctcgactgctgtcccatctgacaccgtgccaccttggcactgccctcatgctggcaccatgggaatttttttttcctggactctgcaggatctgggctctgtccctgccctttccctgtgactcaggttcacggagtcagtcttgagtgtcatggtgttccctgagaacctggggactccttggtggggcagaccaggtaggggtgggcttggatgagagccttcgtttctgtggcaygcgacagtttccaccttaccttcataatcgctttcttctttgagatcaagggagaaaccctcatctgctgtgatggggacagatgttacccagagcatgtgactggggccaatgaacaggacctggggaccaggctgggggtgtcactgtgcctacattgcctagagaggcctttggttaagatgagaagggaatctgtggtcaagatgctcctagattttcactaaaaatagataaaaaatcctttttttttttttttaagcaaacacatgataaggcaaacttacgaatggttgggtgacaggatcgttttagatggtcctctagcttgggggatcatttctgccatgctgctctggtggtcttcaagccacagcttcctgtcctaggcacttcacgcataaaactggggcctggggactcctgctcctggatcagagagcccagtcccagagagtgcagtgcccaccttggtccctagggccagggaatccaggtttctttctcagcaggagttctggctgccacacgggggagtggccaccttgggtctggcatcctccagggcccaggagggaggaggagaaggggcctggtcttgtcgtccttcggggagttggaggcttttgctctcacaccccgctttgttgtggttataatgattgtttggtagatgagtgggaggaaagtatgaggcagagggagaaaaggaaaatcatccattccccatgcatggtttttccactgtaattgaagccatcatataaatttcaccataaatgttgtctgttgtcattaaaaacttaatatttgagtggctgcagctgctccgctctgagtgtgccaccgctggttggcagtgggtgagtgcrcaggttgctcattctgtactctgtggggactgctgcaggactgctccttgtgtgtaaatgttctgcatagctctgatttcctctggagattcctaggagtggaatttctgagttgaatagtctgaatgtctttactgctcttggtacaaatgttaccttcctcttcagaacacccactcctggtatgctcccacctgtggtctgtgagcacccatgtcagtggcacactcattggtactgaatagcatgtgaattttttttttgagatggagtctcactctgtccggtgcagtctggacaatgatggcacgatctcagctcactgcaacctctgcctaccagtttcaagcgattgtccgacctcagcctcccacgtagctgggattacaggtgcccgtcactacacttggctaattttttttatatttttagtaaagacggggtttcaccatgttggccaggctagtctcgaactcgggacctcaggtgatctgcccgacttcgcctgccaaagtgctgggatgacaggtgtgagccaccgcaccagcctattgtgaatttttttttaaatttattctcttaaatcaccgaaaagtgctaatcttatggtttttattgcaaagccttgcccaatgagtacacccttggggtggcccatctatgtagggcacttgggagcagccatgcccagtcacccacatgtcgccacctgctcacaggtggctgagtttcacccctgctgagagaggggtgcagctcccaggggcctggggtgcaccctytctgggtgcccatcaccatcccatgtggcattttgcrggactgaattccgcctctatgaggaacaggcgtgacaagccatgggggcatgtagagaggctggcagggtgactcttgtcccctgcacacttagcaggcacttggaatgggtcatcttgtttggacccaacactcccccaagacaagtatatgaagagcagccccattttccacacaaggaagtcaggccccagagaaggtggagaatgtgtcagtccctcagcctggagggccaggagctagcatgtggacatctgtctgtctgtcctgaaggctgtatgccgcacccagccctctgctcccagcaacccctgcatgckcatggaaggctgtctgcaggtgggggcgattgccgctggcccagaccagccagatgtagaacactagggcttctgagacctgggcagacatgggcagtttcacatktaggcctgtgtcgttgcgtttactggaagacacctggcagccttcactcagagcagaaggacaggcatcatgcctgggctctgggctctgcaaaggtagtgctggcaaggctgcctgagagtcggcccctggcagcagagactgcccatggcggtgcttggctcctggcgcagtgtggccaccccttctgccacctcccccataagattgggctgttttcaggtactcctctggtcctgcaccaccgatgccaccaccggcccagggaggatcagccctgcaggaggcagtgctgtgagcctgtgtgggtgcaggtggrtctaggccatccctctgctccagtgtccttgctctgccccagtgaatgctggagggtgaggagatgggaaacccaggagtctccccaacccctcagcttccctctctgggtgccatcaccatcccatgtggcattttgtggggctgcataccccctctatgaaagactgtggggtgtttctaggtcagacctcaagcatcacggaggcagcaggactgggctcaatccccacttggtggtagcgtgtggtgggtctttgggtttgaggcgggaagagcatgagaagccgagctctggggagcagttactgagtggtagcatgtggggcccagtcagatgggagccccactggaagggctgcatgattcaggcgggaggcagactcgggccatcccctgccagcacttttcgggcacttctctgcagccacctggacactcactggcacctgctctcctctccttgaggcccactccacagcagtatttataggtgaggtgacattttgtttgcaagaaggttttcatctcttaagactgttcttgccttctcagaaactcagttggctctgtgaagatttgctgtctgttttgggtttgggtggggtatgttatgctgaaaaaaatagtcctagacctaggggatgaggttgctccagccaaatgacagtgagctggtggtagccagaggtgtgggctgcagtgccctgagggagtggaaaagcctcccacacacagggttttgcaggatgagcaggggtgtggagtggaagcagcactcagaaagcacagttgggtttcagacacatcatgcgagaccccgccactcacagcaagggggggcagtggagatgggacggcatgagtggagaggggcccctgcaagcaggccagttgctttctgactgtgggacttgtggcctaatctctttgttcctttcctgaaagtgcccctttcctgatagggcattgtcccaagtccccagcttgcaagggatgttgttttggaaaaacatggcaggtacacgcccacacaggagtgttcaagtgctgatcccagaccacccaacccagggtggaggctgttagaggacatttaggatccrcaggtgggcagagggaggatgtccagccaccagagaccacacacatcctaccccagccgtggtgtgaagatggggctgttttccttgaccatggagcaaaaascatccaggacagctctccccctccatgccaccagttgctcctgagccagctctgtgggtgctgggagctgcgctaaggattkgcacctgtccccaccagcttgtggccttctgctgccgcggtgcctctgccctgaactccctctagggctcaggacctttggggcctcacacctaccccactgttggtccttgattccttgactcacacagcgtgtggtctggggctggggctggggcccagctcactgcggggggatgcctgtgggggtgacacgccgcaagttccacggggccacctcgggagstcttgggtcctctctgtgcagaccaggcgctgaggctgcggtggagggcagggaatccatagggattcagctgcctgctcaggccctgggctgtgtgttgggtgggcttctggaaagctctgctgggagyccaaggaagagaggagygccctgggcagcccctcctaccttgtggctggagccggtgggtctcatgggcccagatagatacctgtctgagcctcagtcttcccatctctaaaaggggggtggcagtctgccatttggttctgtagaggaaccagtgacttattaactgtgaccgtggtgaccgcatgatccctcagccacggactgtgtccatgtcttatgggagccatggccactcataaccccttagcattctgcagcctagtgcaggcccagttcytcatctggagagcgagccgtcagcagctgtccgcgtgccatggggagactgaccgcggggccagggcttcagtgagaggcagctcccgacagcctgcacctggcctgcctttgaaggccacacgtgaccagcacagctgcctaggattatttacacagagaacgttaaaaggcccaacaggagggccatcagagcaaatcactaattgtctggaaagatacaaactggagagattgaaactctggagttaattgtttacgaagctttgaaggccacagaggtcagtggccgtgggtgaccgcccccggtggtcatgggcaggggcaggggcctgttrtctccctgtgacagggcctcctgctggggcaggcctggtccttgtccaggatcccagctgttccctaggaggggctctccactggtcagcccaggccgctgctcagaagctgtatcaggtggacatctctggggccagcccagtttgcattctagctctggccccattcctgcctggagaagttgggaacattcaacctcattttcttttcccacctcacggagtggtaggagatgagagttcactctgtaagctccacactatccttcaccctccacagcaaactaggacagaaggttctatgggtaacccagcaacaaggagggcaggtgaggctggccaagacccacctcggggctgggraaccccgggaccataccaggggtgtcagcagagcaaaagagaggccccaggcttgcagtcagaccagctgggccaaatcctggctttgcatctcacaggcttctgcagctcaggttccccatctgtaaaatgggcatactcatagtgcctgtgcaggaggtagacagttggaattatacccacagttccactgtggcctctgtactataagaggctagaatctgacccatctgtcctggagacagggaagagacctccagagccagctaggaagtcagytcttgttctcactccatgaattagttggtttgcagggagcttccctcaaagcagctgaagtctgtgcaggttgggtcctgttatctgggacatcaccaagtgtcatcactggccttccaaggtgatgacctggagcatgctgtgttttggctgtgggggtctcctgctcaccttgggmtatggccttgggaccacccagtgccttcctgactgtgcccatttgacaaaaggctgtctctaccaggatctccagaaagctctggccctctctggccagcagccaggatgtagagactgtgcacatctgtcctggtgcccaggtcgtgagaccctgtgggtggcagcctgaccccacccccagccatctgagaacctcgagacccaaccaagaggaacccagggtcaagaggaggaaggggtggatgccacgtgatgctggccctgcacagaggctcgcctggctgagrgcccaggccttgttcctcggatgcagtggttcctcccttccctagaccccaccagctgctatcaccccctacatggtatctccaggggtgtaactggggagccttgtggagtttcacctctgttcccactgcaggcttagctgggtgcggctcgcaggtgaagaccccatgcactgtgctccaccccacccctgcctccctgcagcctcgctcagcaccactgtcctgcgtttcacatgtttcctgcccttgtgtttatgctttcgctgtagatgtgtgtattccttaaatgatacacagtgctgttttgatgttactaactttccagaacccttatcaaactctgcttgaccttctgcaacttgccgtcttcactcagccttgttttgagatttatccctgttggtccctgacatgcgtgtttaattcattgactgctggacttaacatcaaggtagtccagacggatctctgcttggttctaatgcagctgcggggagcaattcactttggccatcacagtccaggtgcggccacggtgctcgctcatggtccctatgtgtccctaggagtgtgtcagagggaggttctcctcaccaccatgctgtgcccgtggttcccgattgtttgggcgggcactcttggctcatttctgccaggccaggagccaggaaatgggacctctgtgctcttagtgcatgtttccccatggcagagagatagcatcttaccatgtgtttatcggtcagtgaggtctcttccaccgacctgttcaygtctttggcctgttttcccctacagggttgtttgtgcttcgcgtattggttcgtaagcgttctttatgtgtcctggtgccaggttccatgggtagcatgctccccgcttctctcctcctgttcatcatttctccatgtgtggacttgggcctgtggcatcccggtgcctgcaccaggtagggccaggctggcccaggtacatcccatcttccagctgagtcacatgccaagaagaggtatgcctgctgacctctgaaccccatgggaccctgctggtggtgagagctcagcygggggcttgttagtgtgagcrggtggacagatggcagctgaccagcatcctccctgcagcgtgcaccccccagggccttccctggagatcctcagcagtgcccacggtggcacctgcacagccctgagcccaggaaggccagacaagcagacagttcctcacgtgccagggcccctcacagcgattttgccgcatgtgttggagtccctttgagattgagttggaaggaaacccaactaaaaccgcctaaaaccagagcctggaacccacggctctgaagtcacagggaccccccsaccccaactcccagtgaaaatctgggtgggcgtttcccagagggaagcctgcctgtgtcaccccccaagcccggccaaagagctgaatgtccacgccctgtgcctcagcctccccccatgacagtgacgacactgctgtctgtgcctccagcctggtgcctggccctgccctcactccccaggccccttgggcaccgtctgctgcgggcgcacccagggctgtccctgtggggcactgctgtatggataaagcttttcgcaccccctcagaaaggagcatgggggtggtagccccctcatcatcccagccttggaatgtgcccccaccccatgtgaccccagccccatatttgcagtacccctgctgccatgcccccactggcttgggacagaagggcctacacatcaccatccacctgagaattagaaagcgccttctgctgcagggcttgcaggaacaaatgtttacagcccctaggcggcagggggagcatctcccctctgagttatgagctttagaggctcctgtgtaaatatttacctctctagagcattggtgaccgtgggagatcgggatctgtaagcactgaggttttctgtttgcgtcatcgtggccagggtggggtgggggtgtcgtcctggagcagggagccaggctgtggagcgtgcagctgcgttctccctggaatcctggtccacattccctggcagagaaatcttcgcagcggcgcrgccacgtcctccagcccgaccacagttgatggagggaaagccagggaaggcactgtcctgtggagtgacaccagcgtgctagccctgctgaggagcggaggcacaaaggagggcattcctgtcccgagggtgcagtctgggagcagggaggggctgtgacagtctcattcaggcctcactgtcaggggcgctgttttgcagatgagtaaactgagactcaaagagcctaaataactcatcacctaaggtcaccggtggcagagctgggattcacacacaggcctgtgcctgcaggatttcccccaaactcctcccagtgacaagtcgcaggcaggtcactccccagagtgggggagccaggcgtgtggctcatgtccgccacagtgcctgcctctgggagggtaacgcagctgctctgcgagcaggtgggctcgccagggagtccaggatggtgcagggaacctgggcaggtcctgagggactgctggcccaccctcctcaaggtccagctgaatgagtggcctgctggaagcagctgtcaccaggtgtgatgcttcagctcccctgagaggatcaagggcaggcagagcagatggtctcccgggggagttgagagggttgtgatgtcacccgtaaggagaggctctgcccaggcactaagccggggagaaggtaggccccagagtgagagtgggttccagctctgcctggagaacaagggcctcagccagccgggctccaacccttgccacagcctccttccttcccgcccactgcagaccccagggctcccggttggaggggctcrgcccctcctcttctgcctctgttccctcctggcaggcaggaaggtgagcaggtctgagcagttggtttagctcacgcaagtccaggcagggccgcttgtcggcacacgtcctgaaccctgcaaaagttcaggcctcccaagtcatgctttaaaactgtccaagcaggcccatcgggaagccaggcccagcaaggaggggtttgttactctgctttcctggaagckgggctggcaacgttcccagcagagaacatcattcttacaaagtagaggggtgtcaggtttcagccaagtgggtaaaaggcaggtattgggattggtgtggctgttccaggacaggagcaaacccccatccttcagcaagtgggtcaaatggggacccaggcaggcaatgggtcaggccagcaaaggctggagaatccagaatggagagcttaggaggccctcatagcagggagctgcctcctgcatgacactgaccctgtgcattccacacagatcacaggcactgccctgggccaccaggaaggccctggggaccatgttccatgggttgccacagagccaggggatgatggcctgcaagtgtgtgtgggtgctcagtcacccgccctccccagtgcagcccagcccagctgcaggagaggaaggtagccattcctgagtgtcatgagatgctgagtgctccagggtgggtcctctcactgacccagtgagggctgccactgctgtgcgacactgctgtgagcactctgatgggacacagtgtcactgtcmctgttctctggtacatgggtgcctccatatcttcccagtggcagagggtttttggccagcatctgactacagcggctgtgtgcattgctgcagtgctgggctctcccgagaggggacccacgggcagaggtcaccagcagacggggagggccagggtttgcaccagccaacccagggacctttctggagtcctgtgcagctgtccattagcaaggcagcctccgagggatgccagggccttacagtctgtgacaggtacttgtttcgtcctcctgccccttagccaaagacagcttagtgcccaggcagtggtcctggtcctgaggggctagaggccctcctctcaccaggcctgtaccatgcaccatctctgtccctggggagcacccacacagggagacccrgtttctaaaggctcggacacacttcaagaggacgagcatggctggcagcatcccccagcgtaggggtcggggagggggagctatattagggttctccagagggacagaacttataggatatatagagacaggtgaaagaggatttattgggggaataggcttatgcaattagggagactaagatgacccgagatctgccatctgcaagctggagaaccagggaagccagcgagcaggcttagtccaaggccaaaggcctgagaacctgggggctgtggtgttaggtcccagagcccaaaggcccgagaacctggagttctgatgtccaagggcaagaagatgagtgtcccagctccagaagagagaggagattcacccttcctccaccttcctgttctgttgaggcgtgcggtagattggaagatctctgctcacgctggagaagtcagtcttcttttctcartccacccattcaaatgccaatcacagacatacccagaaacaaagctttaccagcaatcttggtgtcttttaacccagtgaagttgacacctaaaagtagccaccacagtggcctttgggtgaggacctgggcacccacactgggctgcagtagcgttctcccaagggagcctcagccatttatttctaggcacctcccagatgtcccctttagcaggcagcctggatgtcatgaagcagaaggatgttggccaacaggtggcaagtgcccacttgacggggttggccagccagtgtccccccaccatgtatggaggagcatctgggcccagacaggtgcgtgtgcaggtgggactttaagctcagggttttgcatgattgggtgctagatctggaaactacgttttaggtacttctcttcggttttgttcttactgtaacagtaatgcatgctgattctagaacttgttctcaagcacagaggcactacatagagctgtcctcagccctcagggtggccccatgggtgttgtgctgttagggtcagggtcagcctgctcccagctcctctgcatggccccrtgtccctgagcacttcacatgccctcctggccctgcctttactgtcctctgtgatgctgcaaagcacctcttggctgcatgtttggtctgcatcttggggcatcctttcagagaacrtcgagagtggaggtgtcctggctgtgtgcctcgcccttgggcatcaggggtggggcaggcccaggccccagaaaagcctggcatttcctcctgggaatgggcagcaggtcggatgtgtgggcctggctcctggggtttagactgtgggggaccagagaaacatgtggtcagcactttggaggaacacacagggaggggtgaggacaggagggcgttgcaggcagaagatgccgtgagcaaggacctcaagggcaggccgtcgggggagaagaggctggagcagctgagaggccaggccttgccctgtacagagcagggaactggccggctgtcttcccaaaagaggccttgggagggtggactcagatgggggccgttgcggaagaggccccaccacagagccgttggaatggaagacctagccacaatgggagacctagcctcaagggctgggcctgaatcaggaaatgccttgaagccccgtggtggcaggggcttggtggggagcatcccaagtgcagcttgagggagtgaggggaggggagccagccaccaggcacaggagtagcagggggtttgggagggagccaccatgtcaaggagccactcagtcaccagcacctgcgtgcagagctattcctgggccccaagagaggactgggtccacccttggggaaccgttagccctacacctagaggagctgcagatggtcacagggctggggctgggagggagtggatcagatgggagtgtcttcagctggatgcttagtgagagagtcccacacatgcactcccacatgtgaacacaccacgtacacatcagtaaacatgcagacacacatgcacgccagccttggctgcacagcyccagctcagcctgacccatgtgtgctgcccatggcattctttgacctcaaggtccccagtttagcaggcggccagtgagtcatggggcctgagaccaggtatcctcccctagttacacctctcagactccctgaggcagcagcgccagcttggagcacagcacctggccagaagtccccatgcacagcctccactctggtcacactgagcagtgacacctactgcctcagggtgtcctgagggatgggactggcttcagggctctggcgggaatgtcttctcattggggcatgactttatccagggagaggagctggcggyaccatggagagcccagtcctctgccttccctcccctcaggccaagctggagcctctgagctgttcccactagggagacaccggccagcatggtgtccctgactgtctggcagccgtgatgcctgcgtgagccagtggggcccaggaacacatgctgcccgatgtccatgagtgccggggaccccatggaggctgggcccagcgggcaggatcagctgcaggcttcaaaccagcacacatgtacccctgagggtgagaggctggagaactcccagggttgaccaggggctgacaaagcacgcacgctctcccacacacgcacgctcacgctcatatacacacatccccrgcagtagctcatgctttggcgccagtggtgactcagaaacattctggaacaagaattccttttttccttacaagyggttggcacttggggatgtttcttcgtatttgaaattccttcccactggtccctttaagagctgagcaattttccattctgagctgggctgctcttccatcctgagctctcagaagtctttgaaatggtcccaggatattagaggagatgcttttccaaagacgatctgctgtcattgcagacacaggaagggtagcctggagccacatggcccctgggaacccctgcctgacacacagggcgcaggagccatgcagcccctggggatctctgcccaacacagaggggtacaggagccatgcagccctgcctcacacagaggggtggctagagctacgcagcccccgggaacccctgcccctcacagaggagtggctagagccatgcagcccccggcgaccccagtcccacacagaggggcggctagagctacgcagcccccagaaacccctgcccctcacagagggagggaaggctggtttctatagaccattcaggaggctgttgctgcatgtacccaagcacccaaaagcccagactcctcaaactttgtgacccagggctcccattcctttcttttsccctccccagctaatgacaatgacagaggcactcatttcttaggcatgtgccattgcacccacccccaccacacacagcacacggtggcggctctcccttgagaaagatactggcggaggctcagacggggtgtggggctagctgctctggagggtgagacacgcccagagcagctgggaggagggtctgccctaggcatctcatggattgactgtgggcacagctggcatggcaggggccctgggtgtggccaggtgatgctgccgggcagaagttgggcccagtcctgggcatcctcgtcctccacctgcgtaactcaaggtggtccgcccaccctgcccttagttacagcctcccccgaagagattaattacaacaggtgctagacagacagtcctatgggggtcccagctgtccctccctacttgctgggagagggactggagctgctcagcttcagggcccaagaacccagagatacccccgtgcacacagcgccccaggtagacacctccgcgaacacacggcccccttgacgtggcccaggtgcagggctgggggcaggcgtactgtggaagccacacctggtcaccagcatggcccaaggcggygctggtttgggagagggtgggtggtccccccctcttctccagtgtcccatccctgccagggtccaggtagggatggtagctgtgtcctggggctgcaggccctctccggagggcaggctccgctgtgtgggcctcctgcacagcctcgtccatgccagctatgccctcagcttaatgccgtgggttggggatgggcctgtagttctggttgcaggagcttggagtgtgcttggaactttggagaagccccccattttacagaggaagccgctggggtccttggtttggtgaattcagcagtataagcagagtgtcacccgggtccaggcctgactctcccatgctgccccagcctgggcttcacaagacaatctgagtgctgatgggaagcggctggcaagaccccggcctggaggtggggtagccctctgcccaccagagccaccctgccttgctggcgctggtgtttgtgctgccacaagctgtgtttcctccgtctgctcagagcccaggggtctgctgycctcgccwgcacccccagcctccgcctggcagatgggctgtgttagcagggccgggatgggggaggggttatgagcctctcagccacagctccctaccctgtgtgcctctgtctctccgccagctggggtccttccaggcaggcctggcccactgtgattaccctctgtgccccagctttctgccgggggcctggcacaggtcacgcgtggccttcaaagacagagatccactgtgctcctcaccggcttgtgagctctctgcttcagtttcctcatccaccacatggggctgggcctcaatgtgccttcagctgctgctgtggctcttcctcattgggcctggagtgtccagcgtaggggtctggaggatagggcatgacctgccatccactcagtytccccacatgtcacactgagactggggccagcagagcctcagcagcataatttgcaatctgtgttgtgttgacctcttatagtttgctaagagygggccggccagggcrgagggctcgctcctgctgatgggcctgtgtccragggtgcagctgtggcctcagtttgctcctttggaggacgggagagcagaacaccacctcccatgctgttggggtgcgtcggggagttgtggtgcagagcaaggagggagctgtgtgctctctgctgcatggcaggaggcaggcacttgcgaagcctgctctgtccctgcaaagaacagaaactgggtccttggctaggtcacacctcggccctgggccacgtccaggtgtgtttctgccccatctgaggccgattctggtgcccttggcctctggtcctctcattccgagagccgaggagtaccccacacagtcatgcaggagggagagggagtgaggggtgggttaggcctgggccagccccaytggtgggcccagggtggccgcgcccagggacgtgctgctttccctcctgagaagctgttgggacttggctcttgaggacactcgttgtgggaaagcctttttttgttttttattgtggtgaagtatgcataacataaaatttaccattctaaccatttttgagtgtacagttcagtggcatgaagtacattcacattgtacagtcatcaccatcatccgtctccagaactttttcatcttcccaaactgagctctgaccccattaaacacgaactcctcattcccctccctccagcctctcacgccgtccatcctacttcctgactatgaatttggctactctagatagcggatttaagtggaattatatgatactgtcttttcacgactggcttagcataatgtctttaaggttcatccatattttatcctgtgtcagaatcgccttcctttttagggctgagtaatactccatcgtctatatgtaccatattttgctcatcatcccttcatctgtcagtggactcttggctgctcccttcttgctattrtgaatgatgctgctgggaacatgggtgtacaaatatctgtttaagtctctgcttttagattgtttgggaatatatctaaaagaggaattgctagatcatatggtaattctgtatctcattttttttgagaaaccaccatactgctttctacagtagctgtaccattttaccttcccaccagcactgcagaagggttccagtttctctacatccttgctaacatttcttcctgttttttgataatagccagtctgatggatgtgaagtggaatctcattgtggtattgatttgcatttccctaatggctaacgatgttcatcttatatctgcttgttggccattggtctgtcttctttggggaaatgtctactcaaatgtcgcacattttttaattgggttgttaagttataggagttctttatatattctggatattaatctcttatcagatatatgatttacaaatattttcttccattctgtgggttgcgtttcactctgttgatactatcctttgatgcacaaatattttcaattttttgttttgttttgtttttgaaacagagtttcactcttgttgcccaggctgtagtgcaatggtgtcatctcggctcaccgcaacctctgcttcccaggttcaagcgattctcgtgcctcagcctcctgagtcgctgggattacaggcatgtgccaccacgcccagctaatttctgtatttttagtagagacggggtttctccatgttggtcaggctggtctcgaactcctgacctcatgatcaggtggatcacccacctcggcctcccaaagtgctagaattataggcataagccaccatgcccagcctaaatgtttttaattttgatgaagcccaattaatctagcttttcttttgttacctgtgtttggatgtcatattcaagagatcattgccaaatctagtatcataaagcttttttcctgtgttctaagagttgacagttttaggtcttaccattggtcattaatccattttgagttaatttctatgtataatgttagataagggtccaatttccttcttttacatgtggaaatccagtttccccagcaccatttgttgaaaagagtgtgttttccccattgaatggtcttggcaccatttgaccatatatgcaagggttgatttctgggctctttatcgtattccattggtctatatgcctatctttatgacagtaccacactgatttgactaccatagctttgtagttaagttttgaaatcaggaaatgggagtccaactttgttttgtatttgttttggtttggggttttttttgtttgtttttgagacagggtctcgctttgtcatccaggctaaggtgcagtgatgtgaacctggctcactgcagccttaacctcccaggctcaaacaatcctccctcattggcctcccaaagtgctgggattacagacatgagccattcttttttgtcaagtactttagctattcaaaatcccttgaaatttcatatgaattttaggttaagttactctatttatgcagcaaatactgttggggttgtgatagggatttcattaaatctgtagattacatgagtagtatttacatcttaatgatagtaggtctttcagttcatggacatgggatgattttccatttactggggttgtctttaatttctttcatcagtgttttgtagtttttagtttacaagtatttcacttcattggttaagtctcctcctaaatattttacactttctgatgccaacaaaaacataattgttttgttaatttccttcttgtattgtttgttgctagtgaatagaaatacaactgatttcttttaatttttactttaacaacattgttaagttagtttattagctctaacaggtwtttgtgtgtggaagtggattctttagcattatctacatataagattatgtcatctgagaagagagataactttccttttttctttccaatctgaataccttttacttatttttcttacctgattgctcaggctagaacttccggtactctgatgaatagctgtggcaaaagtagacatctttgccttgttcccaatgtagaggaaagcttttggtgtttcaccattgaatatgatgttaactgtgagtttttcatatctggctgtcttagctcagcctctattacaaacactatagcctgggtggctcaagcagcaagtgtttatttctcacagttcttgagacccaagtcccagatgaaggagccagcagatgtggaactggtgagggcttgttgcctgtcttgtatcccctgcatctcccatggccaagagagaagaaatcatctctcatgtcttctcttatgaagccactggtcccattcattatggctccaccctcatgacctaattacctctcagagtcgccacctccaaatgccatcacgttggagattaggacttcaacatgagttttggtggaacacacacattcagtccatagcaatggcctttattacactgaggtagtttccttctggttctagtttgttgaaagtttttattatgcaggtgcattgaattttgtcaaatgatgtttctgcatcagttgagatgatcatgtgtttttttccttcattctgttaatgtggcatactacattgattttcatattttgaaccatcctttcattctagggataaatctcacttggtcatgatacataatcatttttatatgctgttcaattcaatttgcaagtattttgctgaggatattttcatcagtatttataaaggacatcagtgtgtaattttcttgttatatctttgtctggctttgatatcaggataatactgacctcatagaatgagttaggaagtattcttttcacttcagatttttggaaaagtttgggaaagatttgtgttagtcccaggagagcctctcaggtcccagcatgtgctgggagcctagtcacaagccctggcagtcaagggtgtggacacccaggcagctgcctagctgtgtggccctgagcaagggccttcacctcactgtgcctgactcctcaactataaacggagaggagtggtaccccctgccctgaagtggagagaagaatggtacccattgccctggagtgaggagagaaccaaatgagccagtatgggtgtgcccagcacaggggaggcagcaaggatgctgcctgtgccatcagccggcaacatctcacggtgttcacagtagcccttcaggacagagggacccagggctcagagggcactggatctgcgcatggtcactcrgttgctggttcctcactgggcacatccagacccctctgccttcagactcctgcatttctgccttgccacacaggaaaaccaagagggggaggtggtttggagtaggtcatggggcccactgagccttgggtatcctggcaactgcttcttattttccttgttccttggagcctctctgggggtgctagggctgtgtccatggagaatcagcacaaatgtgcctgaaggaaggagtttcaggaagcaggaggctccagggcctgcccacccaggctgacacccctgtaccttgtgggccacagtcaggaaatcccagagcctgggtgtgggagggtggtccgaagacctcttttgtctccccctccacacacacacacacacacacacacacacacacacacacacgcctcccttctttgcggtggagcctctttactgcccagtagcccaccttcttctcccagctctccaggccccagagcacttgtcctcagaggggccgcagctcccaggtgggagtgtgacagcgtctccatcctacctgggccaccaacctattgaaactggtgtcatcttaaggacagccagcgcctcttgactctgacaggctgccccagggtgaacaagtttctaaaggtggcaagtcccacctacccagtagacaggctgagaacaaaggaagacccaagcactagcaaggagagccctcccctccctcggggactgcggcacttcatgggcagggcccggggccctccatcacagcccaccccgccctgtgccccctctgatgcagtagagtcagtgaattgtcactagcctggtgcaggccatccagagcacagtgccagggccgggcacagggcgtgtatgacagaagagccatgtggggtctcaggaggaggctgtcaagtccaggctcagaagctgtgatgtgaaggacagtgcttcatggagtttggggcaggtttccagcagagggtctgggccagcagggcaggtgcagagaggagagggcagggccctgccctcaaggaggtacagagccaagcctactggcttcgggacccacatggtgcccctgtgtccctgcagcrtggtctcagcatggacccccaacctgtggtgaaaccattgccctgggatgttcagcaggactgggtcagcttctgcctggctcagcatggccattccacacttagaggctgaccacaggactaactggatcctatgtggccacagaccctgctcacatagcactggccttctgagctggtggttaatccaaccttcctcatcccccagaggacccccaaaacaggtgcttggtataaatgtaactcgccttccttcactggtgacctgaggccacctgatggtctctctttgccctctgtcccygtgggccccaaagaatctgggagcatgttcctcctctgactccgggccctccaggccataccagcccctggttttgctaaacatcccccaaagctgtggccccgggaagcgcccctcggaccatggtctgctgctgctctccttccaacttcgaaggtcccctcccgtcctggggtatgaggaacrgtggtttctgggaaatctggagccaccccagtgtttgcaaggaaagtgcccagcaggtggtggcagccgccacagttactcctcagactagctttactcatggctttagggagtgacggtcatgcttcattccaggcctcaaagccttagccatycccaggccttgctctgcccaggcccaggctggcccttggscaggcttatggggagccaggccagaagaggagaaaagcgccatattgtgtgacatgcccctggctcagagcgggctgtgcctgggagcrgtgcccttccgcaggagacagggtgtgcgggtgggacgctggagtgcctggctggtttgggccccactgcatgcagagcaaggcccagcctttggggagggaggcctggtgtggcggagcagagcagggaccagctccaccaggcccatgggtggaaccacacaggctgtgggcagcggggggctgcagccacgscaaggaccccagacccagggtggtctccagggctcttttgcagtaggagtggcaacagagttggggaggctgacaagtgggaggcctgcctaggctctccccgaccgctgccytcccccacaccccatgtctcaggtgccctcctgtgagtcgagccgtcttttccagcaggagcccgtcagctgatagcacccctgcctgcccttcctgctgcccttgttcctctgcccrcccccatggccttgtgagtcaccgcccctcccctccgccccattccccccgtgccatttgccctggcctgctgcacactgaatgccctgaatctggagccactgcacagggcactgccctcccggcttcccacagcccttgctgggctgtccctgcccactcacatgcccacatgccacagcctccccgtgagcctggccgccctccctgaggcaggggtgggcccaccaccaccctccacatcctcgccgggatgcctggctggttccttccagcttctgggaagcaaggtcccagagcgccggggtgaggagcacagtcttctccagtacgtgtctcgccccgggttgttctgtgtccagactggtgtgggcgtccctgccctgagaaggtgttgggtgggtagctgggcgtggaacacagggcccaccttacctcctcaggagcccagccacagttaaagccgctccaagccagggtcctgccaggcgtgggccctatggaaggatacacatggtgtgagcaggcccagactgcctggcatggaccctctggggatccctctccccacaccttcaccaggtggtctctgtggcactgagagggcctagagctgggcagggccaggaatccctggcactcttgctgggcccagcccccccggcctcagttcaccctcctcactgttgccctgtgccgcctcccctgccggctccatccaggcccctctcctggcatccaggggccttctcctgagccggacccttccccacacagccaccctaggatggaggagcttggcagggtctcccctggcgttgagaagagtgtgcattcagaggagcctgtcagccctgagcagggagggtgttggacggaaggaatggagggcaagaagcacctatagggaagcctgtgtatgcccttggggaagagcctgtggacagatgcccgccggcgcccctgcacagctgttagccacatccttgctgggttgcctccgtgaggtctgtccagggcctccccgtggaaagaggaggggccaagtgatggaaagcagcaggactggtatgaggcaacaagagccccaggctggagaggccaggccaggtgaggcacacagcctgtgccctggctcccttgaggtccaccttgccccaggcatggcgtcagcctgtggaggacccaggtcctgcagccaggggctctccctcaggccctggtgagctcatttagaagccagctgctcccgctgacgcaccttctgagctcacccagtgcctggggccctccctgccagaggtctagcccccaagagacacagtgaggatccagactgaggaggctaatgcttccttctgctgctccagtgccatggccgccccaaacctccaggactcacacctcactgagcgcaaacccacagccttaactatggggtgctctggacccagggcaagggcagtgggcaagaaaagtagccctcccccatgccgggactccggctgtctgagagggtgtgtgaagcccccagcctagtaatgcctgcacggggtactcactaaagacaagaaggacaggcaaggggactctactgggacagttaggtccctagttcctccgtgttttattgtgtcagctgagatccccagtacatgcagaattgccttagagagagtggacatctttgtcttattcatgatcttagagggaatgcatctgactcttccccatggggaccatgcttgctctaggttttggggatactttatcaaattaaggaastttttttttaatttgagacagtttcactcttttgcccaggctggagtgctatgacacgatctccgctcactgcaacctccacttcctgggttcaagtgattcttacgcctcagcctctttataggtgcgtgccaycatgcatgctaaattttttttttttttttttttttttttttgkatttttagtagagacggtgtttcgccatgttggcaaggctggtcttgaactcctgacctcaagtcatccacctgcctcagcctcccaaagtgctgggattacaagtgtgagctaccacgcctggccaaattaagggacttctattcctagtttcctgagagtttttattatgaatagtgtttttagcagatgcttcttacacatttactgagctctgtagtctgttgctgtgatgagtcacatgtatggattttctcctgttaagccatccttgcatacctggggttactaagtatggtcgtagtgtaatatcttttatatgctcaattgggttggatttgataagatttttgttgaggaatttttgtatctatatttgaactctgagcttagcagatgtgtccaccaggctgcaattttcctctcttgtgcatttgtccaacttcggtattaggattatgttggcctcatagaatgaattgggagtgtccactgctttactcttgtctaggagggtttgcttacaaaaatctggttcttttaaaatttggtagaaatagcccagcactttctttgtaggaattttacccctaactttttatcttgaaaaatgtcaaacttacaaagtcgttgaaatggtagtaaagtgaacctcatacctttcaccgagacccactgcttgttaacattttgcaatatttgtgcttgtgagtgggtgctctcacttgctgtttacatatatgtatatctgtagatacatgtgtacttacatgtatatttatatatgtagttatatacatgcttttgcattttagtagaatcatttgaatgtaagctgcaggcatttcctcaatattttaggaagattttaaactactgctttgatttttgctttttgagattatcgggctatttgtgacttatatttggacattttatacaaataatttgactgacagctatcctctctctatctcttacatgttctcctggtgcctctggcctgtggttggtgaaagcaggtaggtctgttccggcagcttcctctctttccctgccagctggggtgggcccatcctcatgccgagcgtcatgctgtgacctccaggaggcatattgtcttgttttgtgcaaggaggaaacagatgacagatgcattccttggggaactcgtcagggccacacagctgctggatggcagatcccttagcaagctggagacctgttttctggtgctgccaatggcgcgccgggttctcctgggagcttcgtgctgctcatctcagggaccgtgcacgtgggtgagcagcagacatgccttgtggcctatgaagtcagacacctctggtatctgggagactttggctgcagaaggatctctgagtctccatttgcccatctgcagggggatctaatagtggcgaccgtaccggggttgcaggaataaaatgagcaaatgcctgctgggccctaaccttttttggaggcaccaaccacagaagtgcttgatggggggccataaaatggctggttctggagagtcagcattcccgagtccccagggtcactgctcaggtgacagctttctcagtgcatcacccggagctgtcgccctccttgtaagtagagccagggccatgggagtatagagttggatactgcagttagcttgggcacagaatggcttatctctggggtgggctgtttaggctctgaatttccctgtctggggaagaatagtctacattcaagagcatgcaaggccatctctccgcggccgcctctgtgtttatatggactcgggggttgagggagcaggtgtcagcccctcttcgctgcagagaggctctgtggggtcgtgggtgagaaccaggactttgcctcggaccctgacatgagttgctgtggggtcagcaggaggtggagcctggaggggtcccagggacacccccagtgatcctcagatgagctctcgccctcctgaccccgagaaaggctgattactggtgatgatcctgtggctttggagatgtcctgagaggctgctggggaggccctgagcctcccaggcctccctgactctcctacctcctgtgagaaagtcagattagattgttttgtttgtttgtttgttttctaatacatgcatggttatataaaatcggaaaaatacagaaaaagtaaaagaaaaaatggcccagggcactaggcccagggcacctggcgcgggttgcatttctgctccatctctccagttgatgtgttttccagagttggcatcaggctgtacccacaagctttgatgtggctcttttgcccattgtgcacacagatatgagcttctgtgttaatgcagagtccccagaagggctgtgcttttctactgccatggagtcaccgggcgtaggtatcaagtcgtgctggctggcctcagggccctgagcactttctcacctggcagggacagtttcatagcagggtacaaatactgcacaccccggcaggacctgacgctgccgccagcctccctctcgggcctccacgtctctcttggtgggcccaagcagccatggtggatgtgtagttacaggctgtaaggaagaggaagggccacgtgagtcctcrcaatagcctcagcaaaaggcctagaagcagaaggagtgagccccagagctcttggccaggacaagaggaggccatggctctggagacaggtctcaggccgagccagcccgcccctagtcagctgccctgctgctcgactgcgtgccctgtgaagaagcagggcactgtcaccttctcctgrccccaaggtatgagtgtgtgcgttcaggcataagtgacatctcgcctgccggtgtcagaagccagaaagtgccaggcaggcaggtgtgaaatatgaatgggcagccttcatgrccggcgagcagccccgcagggccctcatggccttgctggagccctgccttggagcagcaggcaggagagtctgaagggcagtgggacacaggtgaggaggtggtcctcaccccttctgctcatggaagacctcggcagagccccattccaggtgtccagtcagcagcatctgggcccgggctgctcacagccatgctgggcttttggacagggtcaagctcccagaaagccatccgcctgttctcccctcattgaagagggctggtgcagagcacccctggacccggcgtctctagctggccctgctgggaggacattgtcagcacctcctcttgtggcccctaccctgggggtgacttctaggacctccagaagtcacagccttacctgacacctgctaggtggaggcagtcctaagcctcacatcccggctctctgcccagttctctgtgcacccccacttcagtgctgttggagaagcagcccgtcaggggacctgctgggggtctcgttcaccctcactgagtagggggggcagctgtccctgcccacagctgggcagtgcatctcaggggaaggggcctcacctgcaccttctctgggggagtgccctgggccctggatatatccactgaggtgctcttgcagggggactgccctggtcaggaatgggagtgaccattcctgggaccaggaggggttgggcgcttccttcccatcagtgcctttgtggaggtgtggcgggtgtggcctgcatggcaccccacagtgtgtgtccacctgatggctaagccaccccctgccccagagggttccttgtcagggcgcaatgagatcatgcaggtcagggggctttgaaggaaaagctttgggcttcccccagtgtggggcctctgcttcctggtcacttgctccccgaccaccccaaggggaaggtgggagtctcaggctcctaggaggcattcagaggggcctcctgctttgggggatgctgttccccaggcaaccaggtggggccttggtttctctatctgggtgggcacagctttgcaggaggcaaggcgtatcgtggccagcagcctgctctgttttctgaaacctttgctgaccttgtttgtaaagccagcaaagattttcacccgcttgcagacgttgttagggaaggggctgaggaggtatttcctaaacctacgctaataaagccttttgttttttattttttaacaagtcagtattttgacacaaggtcagaagttttcctttttcccaccatttaatagcagtgtcctgtccttgaaaccatgaactcatttcctcttctgaccaacccgtgcatttggatggcctgcaaagcctgggcgtgcagtgcaagctcccaggggccctgcccggcctcctgcctgtcctctgctgctctgcaggtttgtctggaattcattccccagcccccttgccaggcctgctcctcctcgtcctccaagctcctgacctgcagtctgatgaggccccctgacccacccctccctggcgcttgcttgcctgggtctttagtgtctatgttcctggccctgcaggatgctgtgagagcaggaccctggctccagcccgcagacctcggccacgatagattccccctgggagggaggaataggaatggcagattggatgggacagggactgtgacaaggtgagatcacacagctcacatctgctgcacctgctggggtcccccacgccagtcctgggctggatgagccctcacccctgcagggtgctgtaggctctaagtctccctacatacgccacacaccagatcgccagtctgggaagtggctttctgtctacgagttttatggagacagtccctggggctcagaggggccagggtgactgtccccaggccacacaggacagctggcagagcaggaatcccacctgttcatccatctgacactgggacctgtgtcccctctggctgtctcatccaattcctcagcccccttgccggacagagctattttggggcagacggcacctgtcccactgccggcctgagggtggggtggaggccctcagctcccagtaccacccatcagtggagaaaggccctggcccatggggatggttgtccgagccagctgggagcagtaactggcaggcagggacacccaccatgggaagggagacagtgtatggacccccaggcaggagtcagcctggcagggtggaggcagagacaggggtgccacagacgggcctttcctcgagcctcactggcccaggtgctgggcagacagccctgcccatcccccaaggcttcccctggtcctagaaccttccctgcacagtgcagctgagtcctcagggtagcagagctgggccgtagcggcaggcatccaggtgagcagcttggctgtgaggtgggacaaggccttgggagactgggtacacaggcgcccagtgcagggcaaggcagggcctcacgttgttgggccccagtggggtctgtggaccctgccaccacggcaggctagagagggagccacctgcccttcccacgtagggagtggggtgcgcccagaacctgggggctgccttattctcccctcctccataccacatccaagggcacaggacagaggagtcagacctccaccagacccctggctgggaggctacaaagaagaagggtagaacccagagagcgtggaacactcatttcccttactggaaaacaggctagatggggactgctgccccagggcttggctggtggtcggcgacctagagcacgcagtaggcactccatcagcgtgtgttctctggcatgcckcctgtttcctggaggccagaggtcgggtcgcagcacagggtgctctggtgaggcccgggcaccaggcctgccagtggggccacagtgatgacatcctggaagcctccaaggaggagcactggcaggtccagaaaaactgagctcagcatttaggcccaaaccaccaggtggggggtgggggtctgcagccgtggggtccctctccgtttctggctctggccctgggaaagtcacaacctctcaggggctcagtcagccccgttaagagggacgatggggctgggcacagtggctcacgcctgtaatcccagcactttgggaggctgaggcaggtggatcacctgaagtcaggagttcaagaccagcttggccaacatggcaaaaccccatctctactaaaaatacaaaaattagctgggtatcatggagccttakcctcggaaggctgaagcaggagaattgcttgagcccaggaggcaaaggttgcagtgaccaagatcacgccactgcattccagcctgggcgacaaagcaagactccgtctcaaaaaaaaaaaaaaagaaaaaagggacgatgtcacctccacagtatggtaggcgttgctgtgtgcacagcacctgggacaaagggatgagtagctggggcacaggctggtgtgtgcccatgggtgtaatgtgggagggatggcagagacttggggccttgtgtgactggggacaggtggcaacaggtgggagggaggcaagagaaggcccctagggtggggggccgcctgtggatgaggggaccaggtgcctgtgttggcaacctgggcacgggccatcggagggtggagccgagatgcctaagctgggtgcccctgccctgtctgagcacctagttgcagagttggctgtgggagcctgagagcagggtccagccaggaagcctacatccttgcaggaaagcccccgggaacagggccggcaggagggtggctgtggggccctggaagtggggtgagggtggggggctgccccgtgggtctgactcagcccccctgctccagctccgtccaggcctgtgtccctcggcaggtgaaagggccacccagcctccatttcttgacctggaatgtgggatttacagttgtggggtccatttttgccatttttgtatccaaatctccacagtcccaggagtcagttgcattttaacccaggcttgcagtgggagagatgtttcggcaggagtggcgatagctctagaactcaggaagcccccaagagctccctgcatcttcctcaggagggagctgaggacttcctgccagcaggcacctcacccacaggggtagacccacactccagcagcctggccaaagcccacccctgccatccctataatgggggagggaggagcgagggggaggccgaggctgcagaagacatgctcacgaggaccaggacatggggcccaacaacctccagctgtcacagagttccaggtgtaagtggcactgctggaggccaccacctcacctgagagacctggcccggggtcacctcctccatggacacctccctggctgctccaagtggagcagaccatctcacagcatagctgcacagtaactcctaaaccactatgtcctctgccagggggtcactgggattgctccccgtcatttggggtccctgccaccaaggaagaactaggccagtgggaagacagagatgtgagcactgctgagctctggggctggaaacctaccagggccccttctgtccagactgggagctgttgcagtgacagaggcctgcagtgacccctgctgtgagcggatttctgtgcagtgccccagagcccctaagcagtcaccctgggctcgggggacactgccccagcactgtgttggggagccagagagtcctggcctttttcaactgcaggaaagtgggctcgcaggggtggcctgcccaggacacacagctgtgggcctggagccaggtgcttggatctgataggacagctgtttttatttgctggagaggtgactttggaggaggagctgagtgagtcaaagtggagatgacagccccctggcagtgaggatggaatccgtgagcccctccccagggtgtctggtcccctgaggtccagaggccccagatgtggggcggtcagcaccgcctgtgttaggagctgtggcctgcagcacctggagcccaacatgccgggctgggctgtgcgccctgggcacgctcaggcttccaggctgggccctctgctcctccgcagtgcccagctcccctccaggtaggagatcctggcaggcacaagcgtcttccctggattccaggcctccaccggttggtgggagcaggaaggggctggggcagttgcagaggcacagaggtggggctcaagcagccttgtccccaccctgccacttcctgccttgcagggacacacaggcctgcccccgacatgccctcctgcctyggggtctctgcccatctggcttcccagcaggggctggcagtgccattaggacgctggcggagctgccctcagctcctcaggccrcagcccagctctgcacccgcagcgttttcaaccatctgccgcgggccggtgggggctgggtagggctgtgagggaccagacagaccctgtccaggaggccagaggaaggcccgcccagtgacccacagtgaggtaccaccaggttgggccagagtccagggcttcggctctgtccctctggtgctgctggacagccgcagtttctgtttacagtggttcagcccagtactgccgcgtcttcactgcagggctaaaggtggttttttctttatgcagaccactctgactcttcactgatgcactgtgctctaaggaaacgggctgtgatttttgttcctagtcagaaaacaccaccctggccatggtttgggcagtagtcagcagggcgtcctgagcagcattgccaggccattgtatctgcctagcctctggggactggcaaggtcagcctgcccttccagcctggaggctgtggctcagcaggtgaatagttctcttcagtcagtcacagcctgggtccaggtggacatgggctccaatcccagtgctgccctgaccagccatgtggcctgggctagttattgaacctctctgggtctcagtttcctcatctgcagaatgagaataattcatgcctatggggtgactgggtaaagcgccaggagttcagtaaattaataattcagttactcctgagcccaggctgctgccaggccctcctggccccgcccgggagcccaccctgtcatctcattcaggtccctggtgtatctccctgaatagatggattaggttcagaggccaaaacagggcagcagtttattttttatttccctccctttggaagggagcccagcataagcagaccaggctggtggaacgccaaggaaacaccaagaacccaggctctttctcttcgctctacaaagtggggcttctgcctcatggtccaaggtgactgctggtgctccgcggtcacatccgctttccggtcagcagcaggaaaacagggcaaagaaggctgtctctaaggacatcctgatggccggacagtcacacagccacacctggctgcacatcatctcctgggcgtcttcctcctcagggactttctgcactgttttctaagcctctctcttgagggccacatgagcacagagccctgtaccacctggactgcctttccacccatccgtaagaattcagctcccctgggtgaaccaaggaggcacccccaccccccatgccacactttgctagaggtaggcagagcagaagcagcgtcatgaggccagcaggcaccagctggccagtcctgtccagacccaggtgcctccgtctgccagagggggcagggcagggagatgggcctcagccctgctgctcccttcctgccaaggggctgggctgaggctggatctcagctgacccagctccaagcccagcccatgcttgagggggtgagtagccttggcctctctggtgttgcttcctcatctctccagctgggacacgcccaggctgtcaggtcactggtgaggggctccctggggttgggtcagcctcacctgtccatccgggtgtcctgccaaaggtcccatcagctgcaggctctgcctgccctgtgtgtgtcctgaggcaagagggggctctctggaaggggtgtgggcagcacagccttcccaggaagcacatgggtgaggactgccccctgtgcccacacagcacctgaccactgatgtcatggggcccctctccagacctgggtatgtttggaagcagattgagttaatgaaaaaaaaaaaatctgactactcttctacagacgtcaccaagaagggacagccttarcccagcattttctgtgttgcatttgtagaggggctccccagcctgctgccgccagctcagaacttgatgatctgggtttttctgcaggcagaggggaggggctgcctgcccttgggccaagccaggcctggtgctgcggcactgggtcaggtgcaggcacaccagagcggtggggaagccattccctctcaggcagtggctcacatgcctgtgcctcctgggagcgggtcgtctcctctgggctgtctcccaatcccctgccctcctggacctgcaggtgccccctctcagaaggaatgacaccatggacagccagcccrgccttgtggccctggagagctgcgcctgagggctgcttcctgccacaggaaagaggaggcagccacccgccccaagtggggcgctcagcggcttccaccccacagtgggacttggagccaaaatcagacttccactttttctaacaaactgggcagaagccggactgcttggtgctgtcagaggcatgggcaccgggggcccctggtggggttggcagcaggcaatgctgatgagggtgacggtggtgtgttatgccgtgagctcccagctttggcgtcctcctgaaggttctcatttccttcctgtgatgaggatccaggcctcagtgaggcccggtcgctttccggagagagccatcctggtaccctgtggtgtcccatgggtctggggcaaggccagcagtcagggtaggctggggaagcaggtgctgtcgctgagtgtggccgggtgctcacgcggtcctcagaggaatgttctcccaggttgcctctctgaatttctggtgcccttggagtccaggttttgttctgttgagagacaaagtctcgctctgttgcccaggttggagtgcagtcgcacaatcacagctcactgcagccttgaactcctgatcctgagctcaagtgatcctcccacctcagcctccaggtagctgggactacctggaggtgygcatcaccgtgcctgacctggagtagggtttttaaaactaatcactgagatgcaaccttcatggtgtggcctctgtcctcatggtgggacccctggtccctgggagatcaaagcacaccattggaatagagcccctctcagagctttcctcaccasgccatgtccttgtccttgggggctagaatgtgacaggcatgcttgttgtttcgctgaagccggccccccaaggactcttcctctgagccacggaaaaccattcattttctttcagtaactgagtcagaagtaatgcaacagtatttcttaaaaaaaaaaaaaaaaaaaaaaggttctgtcattctgactctaaatgacagcgtcctcacccacatttagggagcttcccctctgttggcactggtataaaaattgccattgtttcagggtctgagtttagaaacttgtgggttagacccttgtttcatggaacccacccccgcacccccatcagcttcgggcatgggaggggaggggcctgaggacagggctcaccctggacaaatgcagtgcaagcaggactggygcggccggccccgtctaatggcccctttgcagcctacaccctgtcccatgcagcggggaggcttttgtgatcttcattacattatttcttataaatcatttcttcttgggtcatatttcctattaggttgtttatgtaatgtttaattacagacaatatagaaatatataaagaaaatgttatggtcacatttgggcttatgggttttcaccgaactctcaactcctgtcagttcaaacatttttatagtaaaatgttgaaaaaaattcattatctcactgccgagacagccactgagtagtccatttctgtcctgggtggtgttttttctgaacatgtatatatcttacaaaaccatgaccacagagtgctgttgtcctgcacattggagggggatagacccttgctcgtggaaccccacagtcagctccaggggttggtgcaggcctttctccacatcttcaggacttgtcagctccccctccgtgagccgcaggaccatccactgtgtgcctgccgtcggcctccgcctgcatggccatgactccctgtgacagctcacactccagtgcacaccctctgaggcagccctgccatgtctcagcccttccctccagggccagcaccttcccagaggtggagttactgcaccagcccctcaccaggctccaatctcctgtgcccctccttcrcccgccccagacttcccacatgccctgaaccaggtttgaagtctcatttctggctggagtcctgagcttccggaaggcagagtcrgcaataagaagatgcaggcatgagtttgggtcagatcagcactcgaaggcagaggagacaaaatgaagccgcctgcagccatgggcatgacccactggaggagtgagagacaggcaccatgggctgcagtgcccggcctggttgatgctggcctcagctcgtgcctgcctgccccgccctcctgcctggaaggcactcagagctcatgggctgtacctgcaggattttccctggggtgctgtatgtttgagtggggctcccaggccagttctaagtttgtcctgtaagaatccagactctggactttagaagtggccacgccctgacagcagtgcctagatcttacctgattgtggggcacactaaaccagtgcccagaaaaatgtcagaacagcttcaggtcacagaaggcattaaaccaagcataattaaatgccgaagtgcatgatccaggcgatcattctgtgggctttcacaagaagctgcagttcgtgcagactagaattatttcatagcgcatttcgagttctttgatgtttcatgcttcatctttgaaatccatgtgagtttcacactcaaggccattactcgttcaacctcgttttcctatagagtgaaccggaccctccttggtctggccctgcctgtgtgccttagcctcactggccatgtcctcaccctcctcggagaagctgccctgttacccacagagggtctcaggggctgacccctcccgctacttgtgagagggagggacgtaggccggctgcacagacacaggtgacccccactacagatagggcgcctcggggatggccacacatcacagctgctgctcactgactggatggtggtagtgagcagccagtggtgcrgacagggtctccccgtcaccctcaagtgaccagtgtgtgccccattcaggggtgaacgctgggagccctgagtctgtcccagtacatggcacgtataggtgtccacagagatctgctatggatgtcagggtgctgtgggggccatgcagcaggaccgcagcttagggctgtgctcacagaagaggccagaggtttgccaccctgaaagaacctcatttgccagcaaagtcactgggcagggtccccagccccccgcatcaggttggcagcaatgagggagatcccttaggagagaagtggccctgtttgcatccccaaggcactcctactcctggacggtgaaccaaccaccagccggatgcttgggccgggcaggacctgtggttccttccagtgtggccacggagcattcagactcattaattcatggttagttactaaacctcagggcaacccccactgccctggaaaccggccacccttgaggtggtcctccttcactgatacccacaggggccctccaccccttttgtggagcctgtcttgctcaccacagcagcgtagctcgtaggaggggaggagaggggagaggaagtgctgaagacgcctggaatctgctgggcctggaggtagcaggggattgcaagcagagcaaagggtagagactggcggggagctctggggacggaggctctggctttacaagactggttcacctggaaggccagctgggcctctcaggctgccttctagagtctcaatttgtctttcttcctttctttaaacttttattcacacgaagtgtttgggacatacaaaagaacttgcataatgtacataggataacagtgaacacctgtacccccagctgctcaccggaggcacgaggacatgatcagcaccacgtaagccactgtgagcacccagcgccatcccagccccacaccccagggctagcctctgacttgaattttcctgtttcagctcatcacttttttaaaaaaacaggccgggctcagtggctcacgcctgtcatcccaacactttgggaggccgaggcaggctaatcacctgaggtcaggagttcgagaccagcctggccaacatggtgaaatcccatctctactaaaaatacgaaaaaattagccggacgtggtggtgcatgccaccacgagtaatcccagctactcgggaggctgaggcgggagaattgattgaacccaggaggcggaggttgcagtgagccaagatcacaccactgcactccagcctgggcaacagagcgagactgtctcaataataataataatttcaacatgtatatgtgtgtccctgaatagtgttttctggggatttgtttgtttttgagaacttgataaaatacacgttaccatcataatccagtcctgatgtgcagtgccttcttcgtcacctttcccatggtgttgtgagtagctactgtttgttcatttttattgctgagtggagtatgccaccgtggaggtgagcacgccaccgtggtgggcatttggcactgttaccagaaggctgctgcagcctccccaacacctcctggtgtgaacagcaaggttcctctgcgacgtgcatctgggagaggactgaccacatcttggggaatgtgtaccttctgctttccagtgaagacacttggagatgactgttctcaccgtctcgttcacatccgtaagcagatcgccctgcattcgtgcctactcttgctgctgcccggctttgccttcccaccgctctcctggtattgcctgtggcttcctgtgcctctgccttggtaactgatgcagtggagcctctttccatacactttgttggtcagtttcctcgttttcttttacttttaatttttttaaagtaattcatacacatacttaaaaacaggtagttccagttggcttatgatgaaagccagcagatccgctttctctttccaacctctccagacaaccatttgtggctttctcagtatacttccggtgtttaccttcatatttctaaataacatatagtgctatttcttaatttattgatttagatattctctgtttactttgtttcgatagatgaaggtgaagcgttcttacaccctcacacagtctgtcctcaccccacccatcacccacatacagttaaaactcacgtttttattaaatcagtaatcactgtttacatgatgatgccttcaaaaccatcatttaccgctgaggcaagtagtgtacttcattttcttttctatgtaactttttgtttttcctggaattaattattgctatgtctttttacttgctttattttctatcttcatggattaattttttccaaatgattccagaatctgccacacacctaccattcattttttcccaccaaatgctcagttgtgtcaggccatctgtccattccccctccaccccaactccttttttttttttttttttttttttttgagacggagtctcgctctgtcacccagatgcgatctcagctcactgcagcctctatctcctgcattcaagtgattctcctgcctcaacctcccaagtagctgggaacacagacatgtgccaccactcccggctaatttttgtatttttagtagagatggggttttgccaccattggccaggctagcctcaaactcctgacctcaagtgatccacccacctcggcctcccaaagtgttgggattacaggtgtgagtcaccacgcctggcctttgccccttttttcctagagcttctgtccccctgctcctgacaggcccagtgggatgttttgctgacatcctggaaccgtcccctgggttggagctcctggcttccaagtttgtttgtttgtttgtttgtkctgttttttcttttccttttttgctaaatgagatgcctactccaggatcttcctaaaataagattcacagaaggtaaatttcctaagtctttgtatgtctgaacacatctctactgtccatacttgattgatagtttggctgggtatgagattggtcattttccttctgccttttgaagaccgtgctccaatggtttctaacatacggcgttgcaatggagaagcatgccatttatgtattgttttttttgtccagatgcttcaagggtcaactttttagtcctctgttcattccccacattcatttgctyrgcacttggtcagccatttcagtctccgtgaatgatgtactccaattctggttatttctgtcatcatctcctctattttctctctcccctctttctggaagccttgctggcaggcacttggagcacctgaatggatagaccctgctggatagtgataggcacaaagcccctgctttgtggggtcccaggtgtcagtgcagggaagactgctctggggcacagacccttcagcaggrggtgcgaggcagggattagatgagcctgggctcctgagggcaggggctggggaccaccgtgagtgtgcagaccattcctcaaacctctgagccrtgagccgcccccttggcacctccagagagcacatgtcagagagctgcctagatctggggtgggccatttggggagtcctctgcacctcgccacaccccgccctcttcctgcttctgtttgacacctccaccccgccttttggcagatgacagactggagagtaaacagcagatgcgtctggcaacgcatgcaatggaggaaagaggacggagcacaggaggtgggacagggcraggcgcagctggggcaccagrccagaggatggccaggacgtgcctgtggccagcagtgcctgcagtgtttggcagagggaaggggacaaggcagaggggaggggagggctctgcgtgttgggcatgggactggacgcctctggctcctaaagagtcccaccggctatggaggggcgtgccaggtagtggyttccataccgttcaggcaggtgtaggtaggaactggacggtggccaagggcaggtcaccctgcctggatcagctgtcacatctgcagaaaggggcaggaacacccacatttggctgctggcctcacaggcagcttctagagtctggctggccctttgtctataccacaggccgtgtctaggggacagaacaaggggacccagggcatggcaatgttctgagcagagaaggtgcacagggagccgtggggacagcgtaagccattgggccttagggcaggggcctcggtcagctcctaaggctcccccaggtgcagtgtccgttgcgccattttattacaagacgcagagccgctgggccagcactgctaatatctttgaacacacccgcctccctggtgtggttccccagcagctgtccctgcagcgggaggccttggtccagaagggttatgtgggacatgggcgcaggaaggacaggtgaggctgacaggcttggtcattccagggaccatgagggytttcgctggctcaggtgcccctttcccctgccgttgcccctgttggtgcctgctagacctcctgtgcacagaaggccttggcagaggagagagccaggcctggggcagtaaaggagaaagcttcccctccagtcctctgagggccccggacttagatggctttcaaatgagtgtctgtcttcagcagctcaccctcccagctttttcagaaaccaargagtaaattgctcacggcttctctaagtggctcacacacaaaaaacccgagtcatttcaatggctggacccagaaaatcgagccctctyctctcctccctgtctctggcccccaactctgcctcagttgccctggggtctcactgtcccctcaagacactgcccctgcaggcgcaggcagagaggcctttgttcccctcagctgtgtcccctcagctgtgtagagaggatgctgccgtcggacacgtggtaactgagcctgctgccacccccacccgtgatggtcagtaggtcgcgtgccatctggggctactagagccggcccactgtgcatactacatgtgcctgctgggtgctctgggctcttctcgcactcctgcactggcaaccgcttatctttttgagctgggtcttaaaggtggagaggtctgaccaaggggcggtcactcacactggcattccagtgaagggcatggcccatgcagagaccaggggtgatatacccgtgtcctcctacctgcagaccgtgacggtgctggggaggggagggggcaccaggccacatcgggagggcagcaggtagacgctccagcccctccacggcagaggccctgagctttgcaggggtgaggaggctgtcattcagaaacgtcgctgccagggagaagggacttagagaagggagccttgtggctgtggcccatggctgccctcaccaccaggctcctgccttcaggtggccaggggccatctgaacgcccaggggacctgggtatggggttggtgtagaccatgtcttggcccttcccaaggtgccggcttcacctccatccctctgtgctctggtgctgacctggcatttgcagttatgtgccctagtggcagccgctcgagcttggctgccaagacccacggtgtggtcagaccactgtgtgcggctgaggaatgagttcctcccaggaggggaaagccctcgggtcaatcggggccctcgtgcccacccgtcactgcaggscaggatcgtggcaggtggcaaccccagctttgagtgctgcgtcttctggggctgcagccgcccactgtgagcaggagggtgagggcaggtagagtctgtcctgccatgaagctggaggctttgacagcaggggcggacagaactgagcagaaacacttcacagcctggccacgagctccccgctttgtgctccctccctcgcatttccccgtgttctgcacccccagagctgaggagccagggcccttgtccaggaacaggctggatcgaggcctggtgcctgcatgcattcccaggtgggagccaggcaggtgacccggaccctccaccagcccagaagcagcccttccaccgaggggcctcacaccacttctgcctgctccctcagtcattaggcccagcgctggctaggtggctccagacatgaccagsaggctctaaggctcatcagcgtcttctggagcctgcacgatacacacacaggcacaggctacaccatgggagaccccatctgcagggtgccaagcccttgcatgcttgggcctctgacgggatctgtccccgctgctaaccaggcacagggcagcttgctctgcaggtcttccagtcagctagcacagaccctggccagtgtcatgactctgtggccctgggcaagtcacacaccctctctgggccatgggcagaggagctcatgatggaggcatgccttgggcttcaggggatggtccctgaatgggtgtggggctggggctgaaggacccgcctgtgggctggggcgctgaaaatgggagaggaactgagccatttgtgtttcccagatggggcctgctgcactgtgcacagcgtgtccttgccctcagagtcacccttggggccagagtccttgtggctgtaactcacagggtcattggctggggctaggagggcaagcttctctgttggtggacacaycacactgtggttttttgtgttcagaagaaacctgccacactggcctgtctccatccatttggtcacrgccccacaggagtggggagcggaggtccatgcggccctatgcctcccctggacacagggtcagctaggaaggatatggatagcctcttctgagcagtcagkgcctcgtgagcctgaggcaggagacagaagcctgccccggccgcctcgggcccttactccctggcccttggtcattattgtttctaaaacgtttgtctcacctgctacctgaagaaggtcccgccctctggcccttgaggccccgagtgcccaggagctgctgccatcagcatggatgggtggtaccaggcaggctgtgggtgcagggtgcttggggagggccaggtgtgccttgggacgtgtgaagtgggagcctggagcagggaaactgaggcctgctctcrcccctgctgcccacagcttatctgccccctggagaccagccgtgcctgaccctggggtcgtcagctcagtcctgctgggtccttcctccaccccatctgctgagagctcctccagggcagggtctgagcctgccaggccacagaaaacactgggcggatgacagctgcctgtcccttcctcggcagtctgcatgcagtagtgctggccttgctgcctgcccctggagccatcactggctaccccgcctgcttcagagctgccacccctggggctttctgacatgtcctcataggcgggggtggcctgcagtggcaccgcaccacttgccaggcactgtgcctccctccctgcagggaggtgtgcggtcagatcaggcagttgccagcggacaccaagaagcgctttgtgctccccggggtcccyccatgccccccacccccacccctgcccagggcagtgtgaggggaggaggggagcagtgtgggtacacttccatgttgccatctggggaatcctggcggggggtcagggcccttctggagctgctcccccgggcagtgaggggccctgtgggctcctaggctgcctgcctggccctggttctacttggcctgaagcccacccaccccagcgtggacaggagccaggaggaggagccctctaagaatgactgcagcctcycccggggctgagcccacacacacacaccgggcatatccacagccgccaccacgttttacccacctgtccagtgtcctsacgcctccagcccagcgtcatagcgagcctggcaaggacatgcttcatgctgggctcctgccgcgcaggggagggtgggaggtggagtcttccttgggtcgtttctcccttgtgcacgcaccgttacatactgtgcaatgcgttggtgtcttgggggacaacccagcaagtagagttggtgtatacgtcatggcttcctctggggtcctgggctggctggtccgctgggcaccccccccccaaccaccaccaggccttggcaggaccctgggactgggactggaggtgaccctcgctggcccctgcccaccttctgttcctgctgagtggctctttgggtggcaccatgcccaggctgtaaacagctggtgaagactgccggcctcaggcggctgtggctctgcgacctctctggatgcggtattggtggctccacccaccagcaggaaaaagtcaggttgtccctccagaggagccaggccaggcgctgcagggcactgtggtggtcatcctgggtagccatgtgaccgtggcatgctccttggcatctctgataccgggttttgaaacgactgagagctaagtgcaggagttggttggcattagaggcgaagcccaaactcctgtagtggggactttgactcagagcagccctggtagcccccctcatgctgcgtcacagccctcacctcctctcccygtctccttgcaggaagttctactacatcaccctgctacgagaccccgtgtcccgctacctgagcgagtggcggcatgtgcagaggggtgccacgtggaagacgtckttgcayatgtgtgatgggcgcacgcccacgcctgaggagctgccgccctgctacgagggcacggactggtcgggctgcacgctacaggagttcatggactgyccgtacaacctggccaacaacmgccaggtgcgcatgctggccgacctgagcctggtgggctgctacaacctgtccttcatccccgagggcaagcgggcccagctgctgctcgagagcgccaagaagaacctgcggggcatggccttcttcggcctgaccgagttccagcgcaagacgcagtacctgttcgagcggacgttcaacctcaagttcatccggcccttcatgcagtacaacagcacgcgggcgggcggcgtggaggtggatgaggacaccatccggcgcatcgaggagctcaacgacctggacatgcagctgtatgactacgccaaggacctcttccagcagcgctaccagtacaagcggcagctggagcgcagggagcagcrcctgaggarccgcgaggagcgtctgctgcaccgggccaaggaggcrctgccgcgggaggaygccgacgagccgggccgcgtgcccaccgaggactacatgakccacatcattgagaagtggtagtggcggtggtggccacggggaggcctcttggggkgtgtgggggataaaacaggacagacgacaggtccacccaagactgtcaagggatgagcatcccaaacctgctccacagaggtagctgcgtcctgaaaaaaaacasagcagggatgtagtggggctgggcagggatgggggcttgagaaatcaacaggtgcagcccagtgggtcagaggaaagcgtgctcgaaggatgccatggtcagggcagggcctccagagcaggtgttgtgcctggagctgctctcctggcctccttggatttatcgcaaaaactgaaggtttgcgcaagagacgaggacagcggaaagtggacctgccaggccgggagtgtgtccctcaccaactatgcacacagcactcgctcttagctcctctgtccgggctactaggagtgagaccagcttctggcaactgccccagctccaggccatcccatagcccctcctcttctggctgcccccaatgccccgaggcctggggagcccccagctcacccatctgtagctccctcaaagtcagggcccaccccatctgaggcagagaagactygagtccagcccccaggaagcctgctcccctctctggcccatggtcctgcttcatgctttgggtcaggaggccaaagctgatgttcaggccccacccactccctacagtcctcagaccaaggaggggtttgggtagtaggcccgagctgcattgccggccttcckygggccaactggcagcccaggagtggggaggctttggccagggatgctgccacttgtgcgtgagtccgcrgctggcccttggaggtgaccatccaggcaggcctggctcagactggaagggctggggaccgagggctcccctgcctctgttctcctttctgacccactgggatttgctagcaggctgccccagccccatcaccgaaacacatactcaagagctcaaataccactgctcccaccagcgtacggattaagttcatcaggcttccatcggctggagcatgggaccatagcccctgcccaggagccgtaccctcggaccacagtggctctgtatggccaggaactgggactcgagctttcagattctcaactagccttggcaaaacagctgtaggtggcctccctgacaacagacactcagccctccccaccctggctctccttgcatttccccatgctccccaccccctggcaaaaggctggccatgctctgttcccagcagccgcgcaggtttccccactggctgcaatggccctacyaaaagccaygttgcatatccgttgtaagcacgtgccctgtgccctgtccccattccttatgccctaggaggccaagctggtgtctctaggagggcccacacrggcaccctggatcccccagagagyagattggtgtgctcaggccgcaggctgactcagagstagggcagtgggctctgcaggccacctggctggggttggtgggggtcctctctcctgccccagcttccactcagccaccacagttgccmcaccatggggtggagacgtgggtcaccacsggcttgggagcaagcgccttctgcagcacaggaagccgaagctggggtcaggtgaggtcgctacccctggaggtctggcataagggccccaccctcaggtctcctacactggccccattttacttyggggtccaaggacaggatggtcaacagggcagggtggacagcgtgccagcgccgcgcagggccacctcccwgggtggatgcatcacactaaggaagygagtgccaaggggatttagtggtgtggttctttcaaaggraggtcagggtmaatgggaatctgctcggmcactcaacatgggggtgggtgcactccttggaggaggaggaacaygttcaggggatygtgaggtcttgcacaagccacgtggggcaccttggcttcccggcaggaggtggacacccagccagaggcctggctcaaggtgacctcaccttcaccatgggcttcctgggtgcgcgggcctgagcrcaggttgttttgtacatattggaatatgtgttaacttatgccccgcatcccaactcacacggaagcacgggtcttgtctcagtctcttcgctgcatttggaaagcagtctcctctcgggccagcgccrggctgaggtgtccagaggcggcggcagctggcagtgccctcagcccccaagtgtccagcctggcacttcccattcaggccacctgctttgggtcaacagttcctttgccagcagcatctcctaaattgtaaggactctgtccaccggggccctcccagggctgtgaggacggaaacaggcagggagtggagctaacagcttagtcaccaggacccccagacctgcaaacgtcccctcctggaaggggaagccaggaacagcagaactgcccmcaaaacaaggctgtgaacttttcgggaactggaactgtttaacttgaacccaggattgtttaaagctttatttatttatagcttcttyttaaaaaaaagtgttgaagaaattttttggttattcatacaaaaaaatgagttgatgatggaaaagcaagtcataatcatctaattgtttttgtctaggtcgagaatgaatgttagctgatgaaataaaccctgacaaggagtggcgggtgtgctgtggtctctgcgggcatagctgcccctcccagtggggtctcacaccacgtcccaagggcggggtgctttgcacargtgcaggaggctcagtgaggaaagtcccattaagtaaggcattctgaaagaaaaaatgggactttgtcatcaccataaagagtaaccgtttattaatcattagtgatagtatttgggaagatgacaccagttgagagggaggcaggtgccactgagttacattctcattaacctcttccctccctgtctttggaaattttgaaagatttcaaatgacaaagagagtggaggaatagttcatggacacccacatgctcttggcctaaatttttcaccttctcttatcctgtgcccacactttctcatacacgcacacacgcgcgcttttctgaaacatctgaaagtaggttgtgatcatcagaatactgcactcctaaatccatcagctcgtgtctcctaaggacgttctgccacaaaactcaaccctgttatcccagccccccccccagattttataacaatacagtattttccaatatccagatcttctggttgtcctagagatgtcttcagagcattttgtagccccaggaccacacggtgccccatgtgcctctcctgtctccttgaatggaggagagggtcccagctaccccttcttttttccgtctttcttaggattgacatatttgactagtagagaccagttgtcttaaaaggtctgctgatgttggccgggcgtggtggctcacacctgtaatcccagcacttggggaggctgaggcgggcggatcacgaggtcaggagatcgagaccatcctggctaacgcggtgaaaccccgtctctactaaaaatacaaaaaattagccgggcttggtggcgggcacctgtagcctcagctactcaggaggctgaggcaggagaatggcatgaacccgggaggcagagcttgcagtgagctgagattgcgccactgcactccagcctgggcaacagagcaagattcctaaaaaaaaaaaaaagaaaaaaaagaaaaaaaactacagatgtcagtttcctagtggtcagattcggtgaaattgggtaggaaggccctcgggtgaggcaccttccatcagcccaggtgtcctgtggctctgttccccagatgagggaagtccagcctccccactcagcccctggggaaacccagccatagtggtcacctgccagctcatacctgccaccatcccagtgacaaaggtcaccagggtgtttctgggagggtcacggcttctacctgccaccatcccagtgacaaaggtcatcaaggtgtttctgggagggtcacggcacaagtagggcaggagtcagaacgtagctgccttcttaaaaccccagtctcagactccacgtcaacacctgctcatgcctaggtagagtgcggaagggaggagcagaggccagacgccaagaggaactcccgagtccttcctggacacttcatgcggaggtttatttggggtgtggaccagccctcagcctggcttctccctcgggggagccaagatggaagcttcctccaccttctgatagtaccactggactctgtagggccagtgtcatgatcaaaggtgaaatcagacctgaaaatacctcacccagaatgggggttttcctcttcctgcttctctttagagttgaaggccacctttttttgtttttaaagacagagtcttgttctgttacctggccgaaggccactttattaaagtccacctgaggccaggtgcggtggctcacgcctgtaatcccagcactttgggaggccgaggcaggcagatcacttgaggtcaggagttcgagaccagcctggccaacatggtaaaaccctgtctctaaccaaaaatatatagtcgggcgtggtggcatgcgcctgtaatcctagctactggagaggctgaggcaggagaatcgcttgaacccaggtggcagaggttgcagtgagcggagatcatgccattgtactccagcctgggcaacagagcaagtctctgtctcaataaataaataaatgaatgaagtccacctgagccaaagactcaggaggctcaggcctgccccctgcccagctctcatccccacttcctgcccactgccacagagtccccactgtgagcgtcaggctcacccgatcctccgaggtcccctgcccccttctatcctgccagggaaacccacatctgcccttgctcccgggcctgtgggtttggacaaaggcagctcctctaccacccagcctcgtggccagcgccatatgcctcatccctcctgccccggcgttctgtcttcacaccagttgctccagccatggccagccacggccctgtccctggatgggcctgttaggcctgctccccactgctccccttgggcttcatgccaaagccatcaggccagtatcagtcctcacaccctgttcagctgggggcacctttgcacacagcgctgggttctcttccttggggaagctgggccccaactaaccctacctagacgtggtctaggtgcctggcttggggcccctggtccccttcattgtggcacagagaggaacccatcctcaggccaccctcgcaaaggtgggagccctaagtcctctcccgggagtgtacacctggactcggggagcttccagcctaggaggactcggagggcacacagtgtattcatgacatgaggacaccttcctaggagggcctcacctcagggctccaaggacacccctggcggggagagcctgggtctgggtcccctgacatgtagcagcagcagcagagaaacctgcaggagtcgctttgtcagatgaggtcttgggttccaagtggaccactggctgctgtttgctcctgtgcctccatttccttctctgtgaaatgggaaggctgggccaggtgtggtggctcacgcctgtaatatcagcactttgggaggccgaggcaggcgggtcatctgaggccaggagttcgaaaccagcctggccaacatggcaaaaccccacctctactaaaaatattaaaaattagccaggagtggtggcgggcacctgtcataccagctactcgggaggctgaggcaggagatcacttgaacccaggaggcggaggttgcagtgagccaagatcacgtcactgcactccagcctggcaacagacttcgtctcaaaaaaataaaaaaaagaaatggaaaggctgctgtgaggatctggctgcatcgggggagccaggcctggccccacacctgcccacaaaggcggacaaaacactgaccacaaatgagccacctgggggcttgttgaaagcacggaatcctggccccacccactgccttgccgctgcccagcaaaaccatgtgggcccagcctctcctgtgggcacacccacacactgtccctctctctcccctttctttcccccaaagggccatgaccgttttccatgcagccctgcccggccctgccatcctgctcccagccccacgctgagaggacacctgtctgcctccctcctgccggccctgctccctgctgcctttcactggcctccagctctgtctgcaccaacactcccagctcagccccgggcctcgggcttcaggggggacttgggctcctggggcagacccagaggagggtctgaattcattcagcactgcccagacttgcccaaaacgtggcctctttaaagaaactacttacatcctgttaagccactcgtcccctagcagggacagggcgctcacacatggtccccctcaccccaccttgtagagggatcattggtctcgccaggaccgccagcttctgccttcagcagctccactgcaggggtgtccagggcggcaggaactcagagtctagtctcttggctcgggcgagacacagagaccccttctggggcccagtctgtcccctctaatggatgccctgccctgagcccccacctcagccccaggtccccctcgcaccccaaccgtgtctgagcgcccactgccgtgtctactgcactgcacccagccaggcctgccagacgcccctcgcaggattccaggtgggcgccacagcccatctcccagcgcccggtcccagcagaggccacagccatggagggctgaggtggggtgtcttccctttcacctgtgccccgagacttccccaccccttgcaccttctcactgtcccctgcgacagggcgtcctgactgccctgtcctcccaccctgctctgtggctcctcggagccctgtgatttctatgcaagaggaagcctggggactttggaaaacacttttctttctcaaacaaaaagccaggcattcaagacaagcctctccaagactccagggagtcagcctggagccgtgtggctcaggctcaggaatgcttctttgttccctgcggtgcccgcccagccccagaagccgagaaggcccgggtcccaacccggggagcaccaggcaacgttgctcgtgagggctgagcgggtgggcccactgctgcacagcgtcctctccgggcagcaccgcctgatgatgcctcaggcacagcaagagctggaaggggccctcggctctgggagaaggacttccaggagagctggctgagctaacaaaggccgcttgtgtgactcacgcccttgcttaggaagcggccctgcacagcctggctgctgcttctgggatctgccgagaagtgccgctcgggaagtggcctgaagtcggtccctttccagcgggcactccatgagggcaggggtttttctacctggaagatctgaaactcaggcatcgtggcagagcctgctagctgtgccttggtagttgttctcctctccttccttagtagtagaaccactacatatcagcggtgacacagcaagccagaatcaagactacacttcccagccccctttacaatgacatgygctgtcactacaccctgtggccaacagtttgcaagaggaaatgttccttgcagctttgggagacaatcctgaaacagaagcaacttcctccctttctcctactgaatggctacaatgaggatgtaatggctggagctcaagcagccatgttggaccatgaagtagatgccatgtggtgagggtggtcgagcaacaagataggtccttgatgattgtggaaccaccctaatagctttgggatgcctaccttaagactttatccatgtaaaatagaaataagtgtgttctggccgggtgcagtggctcacatctgtaatcccagcactttgggaggccaaggcaggtggatcacctgaggtcaggagttaagaacctgaccaatatggtaaaaccccgtctctactaaaactacaaaaattagctgggcgtggtagtgggcacctgtagtcccagctactcaggaggctgaggcaggagaattgcttgaactcaggaggcagaggttgcagtaagccgagattgcaccactgcactccaggctgggtaacagagtgaaactccgtctaaaaaaaaaaaagaaagaaagaaagaaatgtgtaccttgttaaggccactgttgcttggggtttctgtcactctcagctgaacctaatgctaacaatggtccggccactaaagatcaaattcctgcaaagagcatagctggaggctgcagcccatgtaacaacaccttctttccaccaactactcaagacactgctgctgttcctggcttcatttatgtggaagtgttaaaaggcccagagaggggaaaggcgctttttccttttgtaccttttgatttttgaaacatgtgaatgaggccgaatgcagtggctcacacctataatccctgcactttgggaggc

SEQ ID NO: 95822 - DNA, 31723 bp, Homo sapiens
acctaaaaggaaaaacttctgccagcaaaaaataaaaggcaaatgacaaactgagaagaaaaaaataagtgatggtaaagtgcgaccttcctcaatatatatttcatgaatatatacatcagttttaatgaaaaagtaaaaaaaaaaaatccagcaacctgagagtcaaatgggcaaagaccaagcatttcaaacaaaaagaaaaaagcttataaaaattttttaaaaaaaattttaaatgctcaattttactcagctgagataaatgcaaaaggatatgaactatttttcaaggaagtgactgcaaagacaaagtttgatagtataccactttggagagggaatagagacacaagctctattaatgtatggtcagtacagcttctttggaggtaaacattttggcaacagctgtcaaaattgaatatacacataccttttggcccacctctcccatgtctagaaatttaatccattcatatgcttgcacaaatagataaaaacttgcaagatactcgtgttagcatcagtaaacctataaacctaaattacaccagtaagggaatggctgactaaatttatgatacattcatacattggaattccgcgcaacataaaatgaagaatgtcggcctgtgctgatatagctggataaccaagattatctttaaggttcagaagagttgtgtagtgttgtcctttacggtattaaaaaaaaatgtacatgtgaatatggaaaatttctagataaatcataagaaattgcctttgagagtaaaacttggtgggggagggaaaatccttgcttaaaattatcatgtgcatgtattagtttttcagtttaaaaagaaaaatagtggggacacaggaaatagtggacagtagatacctatctcagatccagtcaggaaactagcattgggtatgtggctgattgatgtggataccaagttatttcagacactagaataaacagatttagctggcaactgaagatgcattaaaactaccaagacagctgggcgcggtggctcacccctgtaatgggaggccgaggcgggtgggttgcctgaggtcaggagtttgagaccagcctggctaacatggtaaaaccccatctctactaaaaattcaaaaattagccaggcgtggtggcccacacctgtagtagtccagttactccggagtcttagacaggataatcgcttgaacccaggaggtggaggttgcaatgagccgagatcatgccactgcactccagcctaggtgacagcaagactccatctcaaaaaaaaaaattattaaagcatagaaattatatgtatgcacgtatatacacattatatgtgtgtgagagaacacaacactgcttttgtgattttttttttttagatcaaatcactcttttatggttaaaagcagggactcagtctgaagccaaactgcttgagttagaatttcagctccactacttactagctgagtaaccttgggcaagttatttaacttccctgtgcctcatgttattcatctgtgaaaagcagataatcccacagctgaaaattacatgaattaataaatgtaaagcacatagaacaatggcaggcacataaagtactccctaagtacctgttacataatgtacattaagcagtatgccccatatcatgtagtttcaagcttttcttatgccagaactatactgtcctgttttaggacctgaaggtggcaagacagtagaaagcaggagtaagagtggaaatgaaagcaggtaatagattccctagaactgagttaatgcccctctaaactgttctgatactaccctgtattgaatttatgatggccttagccattctttctccatttgactgctataaaacggagataagggaatgagcaatttatgagctgggaatttattatcagaaaactgaccaatgttatctcttgcagaaggtcctacagtgtaggggaagcaatggaagaacttctacctgatggacaaatatgggctaatatggatccagaagaacgaatgttggcagctgctacagcttttacccacatctgtgcagggcagggtgaaggagatgtcaggagagaagcccaatctatccaatatgatccctacagtaaagcttcagtagccccagggaagcgacctgctcttcctgtgcaactacagtacccacatgtagaaagtaatgtcccttcagaaacagtctctgaggcctcccaaagactccgaaagccagtgatgaagagaaaggtgctgcgcagaaagccagatggggaagtattagtaacagatgagtcgattatcagtgaatcagaatctggtacagaaaatgatcaggatctctgggacttaagacaaaggctgatgaatgtacagttccaggaagacaaggaatcttcatttgatgtttcacaaaaatttaacctaccacatgaataccaaggaatttctcaagatcagctcatttgctctctacaaagagaaggaatgggctctccagcttacgaacaagacctgattgttgccagcagacccaagtcctttattctcccaaagctggaccagttaagccgaaaccggggcaagacagaccgggtagcccggtattttgagtacaaacgggactgggactcaatacgtttacctggtgaagatcatagaaaggaattacgctggggtgtccgagagcagatgctttgtcgagcagaaccccaatccaaacctcagcatatatatgtcccaaacaattatctagtaccaacagagaagaaaaggtctgcactccgttggggtgttcgttgtgaccttgcaaatggtgtcatacccaggaagcttcccttccctctttctccttcttaaatctttttaaacttctttcacaggattgtttgagataacctagctctttatatcttcccttttaaatagaaacaactgtcttgagaagctcttcgaaacattttatggtaaggacttcacctatcattggtctttcctagctatatatcacattggtatcagatgatacttccaaattgccactcaaatccagcaattgcaagataaatcatatcagagaaagaacaacagacctggtctttctattttgtcaaattagtaagggccctttgtgtcctgtaactttttttacctatcaatatgagttgctgtgcttcagtgtgtgttttttaagttgctgggcattacacttaccaattaaagaattttggaaattcatgaacttgaacattatttcatgaaatacttgcctaagatgatcttgaacctgggctatgatgagagctcaaaagaaggaacaagccgggcgcggtggctcacgcctgtaatcccagcactttgggaggctgaggcgggcggatcacgaggtcaggagatcgagaccatcctggctaacacggcgaaaccccgtctctactaaaaatacaaaaaattagccgggcgaggtggcgggcgcctgtagtcccagctactcgggaggctgaggcaggagaatggcgtgaaccccagggggcggggcctgcagtgagccgagattgcgccactgcactccagcctgggcgacagcgagactccgtctcaaaaaaaaaaaaaaaaagaaggaacaaaaacctgccttttacatagtcctaaaggatgggagaggttaacaacatggatagcctcattactaaaggtgtacaacaaatccaagtagctttaaaatactttttaacaaatgccccaaaacagtaccatataacatacaggattcaaacttgttttatttcagaattatttcattaatattttgcctgccagctgttatttctggaataccattctttttataatttgcccctgagatttttgtaggaattatgcatcatttggaagggtattcctactccagtagaaattcaaactagtaacatctggaatcagatgcaaacataaataccaatatgaacctagcctgtttgggtgcagatcaaaataggaattctgctcaccttaaattgtaatttatctgttcttgatatttctgacccaacggggaccatctaaaatctgaaagttgtcagttttaacaccagaggccagaagaatgatagcacagtttgcttgttcacagagaaaaagttctaacataaaggtgaatgaccttgaccgttactatctgcgaaaatcattttccctgtaacatttaaagccacataattcacacattcacccagttctatttgttaggcatttgtctggaaaagaagtaatcaatgactcaggtacatgtaggatatactcaccgcaaaaaagtagaaactgcaaactgtccaccaacagtggaatagtaaatgtctttaaagacattagaatattaaatagtcattgggaatcttgggaaagtaatatgggaaggtgaaattaagtgacatgaatgtatcataaactatacaggatgatctcagtacacacagggaaagatcaaaacctaacgagtagtgggattaaaggtaatttgtatttatacctcgactttttatgaggtcaaaaattacatggtgattttaacatgcaaaacactccagtgattatttggatctcaaagtccaacattaccaaagtctccaaagttcaactcccgtgctaactaaagaactaggccagggagtgagtctagttggtcataaggcagatttgtggcaaaaacaggacttggtacactacagtgctttttccagcacaccttaccctaattcagggtgaagtgcaggagttcccaagcagacgtttaaagtaacaccctggccagggctgcgaagtaaccacagagagggaattcgtgtgtcccctaagcaccaattacaaactaaaacggccatcaccagatgttccatacattgggccaggcgccgtggctcacgcctgtcatcccaacattttgagaggccaagacggggtggtggcgggggggagggggggtcgctcgaagtcaggagttcgagaccaacctgggcaacacagcgagaccgtgtgttaattaaaaaattaaaaactaggctgccaagatggcgcacgcctgcagtcccagctagttggaggctgaggtggaaggatcgcttgagcccaggaggtagaggctgcagtgagcagtgatcacgccacttcactcagcctgggcgacagtcttaaaaaaaaaaaaaaaaaagtcctaatctcaggaaccagtgggttaacacataaatagcattcctcttgataaactttatattaatccaaagggaagaagagggagtactgtccaaaggattagcagacacgcactatgatcactagaaagcaatcgtggtctgtatgtaaggcaatccccaaaataatttgaaaattgctgccacagcctcccacatactcctgggttctcaacttctactgttttatgagcacccaattctaagtggggcagcagagcacttttgtactccacagtacaagtaccactgaagctcccgtcacaacggaattaaagacgaccctactgcggcgagtttccaccgagagctccagaaagtaccaggcacaaaagaaaaatacatggtcttaagcgaggtctcatttccatacggcaatgctttcctgaaaagaccaaagtatgtgaaagagggcaaaaagaagacaacagacaaccgttcagcagtgtgtccatttgtcccttcccctgtggaacccagaaagtaacccactccaaaaatcccacacttactttccggcagccggccgcgccgcgtttccgagaaaggaagctgtcactgtgcgtcttctgcgcaggcgcccgagccctcatgggaggtgtagtccaagtttgtgggaaatgtagttctgagaaccgagcttggtgctagaatctacctgaggttttctagtccagctaccgtttctccgcccacagggcagaatctgggcctgtggcaggacagcaataaaaggaggaattgtagtgctacgctaaaataatagaaaaaaggtaatttttcaaattctgctatccttatacgaaaactaaaagattgaagatcttggctcgattttatacctagttaaatgagaagaaagttaccattgagagacaaaaacatttactattagaattcaaattaaaagctgaaatgaatatgataatctcaaaacaaacgactaggtgccctgagagtgaccgaacagagcggggagcgttgcttcagcaccacggagagatcatsactgcagtttcgtgtgggtttttgtatttttgcccccaattccagaaatgctgatcaaaatctcaaaattacaattagaaaactggggggcgggggggaggtggaatttggttctttcgtccaaattgagcggtcattaaatcattagtaccagggatccagggatctataccggattatgcaaacgcatgtaggacgtagaggttataccgaaaggtaatgtttttaacaagagaccacatttcagaataaaagctttaaaaagcctatgtggaacatcacaggtatctagggcaggaacagcagttagagcttgaacagttctgcttcctttccgcaactgtggcattcgaggtcattcgtcatatcaaattcatcagattttgtctccactttsctaaccaattcgctaacctttctgacatcttgtgatgtggaggcggaaatttccagggaaaccgacacggggcgtaaagcgcggcggggagtcyggggggctcccgcctggagggctgtgtgagcggckggccgcggggcggcgcggggggcgctctccactctgcggaagctgccccctctgccctccggtccgcgccctttcgccccgctctctgccctccgccccsctctctgccctccgccccgctctctgccccccgccccgctctctgccctccgccccttccgcgcgccacccagccttccagcgcctgcgcgccgcaccgcggtggtcgcgggcgcggacgcggacgcctgccccctaaggaagcccattggccagcggatggggccagcaccgcctcgcgccggtggtggaagcacgtgctgggggcgggagcagcaatcgcagccatggcgtcgttactgtggggaggcgacgcaggggcggcggagagcgagcggctgaacagccacgtaaccgccaccgagccggggggccacagccgcgggggtggagctcccactcgcagagggagatcggctgggaggggagggagagcccgcgagcgttcgaagtggggcgtcagatgctggaggggagatgcgggaagggtttggaagagggccacagagggagaccccgtccccacccccacgagaggcaagacctttggttagaaagggcaaaaatgacgacccctggaaatccagggtgggaacgcagctggtagtcccagctagaccccgagttttctactctgcccatttgcccattaagcctcacctcgcttccatccatttgccagcgcactttcctagccaccctccccttgttggtgccgtgagccccaagtactgcccaactctaaactagaggcctaggaaagagaaactgcatgtacagggaatacagaaaatctccaattttagggtaactcatacaggaaacccaaccttgaaaggaatctgctgctacctaatattgcaaaggaagcaatacccgggtgtccttccctgaatccctcccagcccctgtggtagggaagcactgggctgcttgagggcttgcatcctaatattggttgaaatttgtgtctctcaatagttttcaaacctcagccaaccccggaagaacctttggggtattaagagtactgcagtccgaaacataggtgagtgctgttagggcaaagcagagcgacctcaatgattaaaaagtattgttttgctttcatcacgtccctgccaagtgaaacaccgcggattcattagtgtgacattcagcactctccattaccttcccaatcgtttcgtccattcctccatgaaatgactcttcttgccagtagacactgaagagtcaggaagaaaaaattgaatagcatgctttacatttgtgctcagcatttgtctttacttgtattgtttctcttccatcctttccagatggttctattaataacatcaatgaagatgatgaagaagatgtaggtaggagatgaattcatttgcatgtatctactagcattctgtttccgtttataactttaatagtgtgagtgaataatataatctcaattggaaaaggcctgtctttgcttctgttttcttatagtgactatcaggagacacactaaattaggagtaaggtgtatttatttaaaggaagttgaaatggaatatgcagggattgggttcagaacttccatctgtcaaggatttggtctcatggagatggacttaggctactttgaagttagaggatggtgaagtaacagagcgtaagaaactgaatcctcataaagaacgaatcctcagtgctatatcattctttctggaaccctcttttagaggaaaaatgagcgtaggtgcaattgcttggtatacaaccactgaaagagaaagagcaacttatttgatgtcattcaggaagcttgatgtcctcttttttatttttgcttttcyagtggatttggcagctaattcactcttaaacaagttaatccatcaatccttagtagaatccagtcaccgtgtggaagttttacagaaggatcccagctctccactttactcagtaaagacatttgaagagctgcggctgtgagtatttttactcttttaatatgggaaaaatgctgaaaaccacagaacaaacgcatctgcttatagtaaaaaccatcaggatctcctctttgttttctgatattcaatatttttttttgttatttgagacagagtctcactctgtcccccaggctggagtgcagtgatacgatctcggctcactgctctaccttacaggttcaagcgattctcctgcctcagcctcccgagtagctgggactacaggcatgcaccaccacgcccagttaatttttaatattcagtattaaagtgagatttgtacattttccatgcaatcaaaatatagctcaggccaggcacagtggctcattcctataatcccaacacttgggagctgaggagggcagatcgcccgagggtcaggagcttgagaccagcctggccgacatgggaaaaccccctctccactaaaaatacaaaaagtagccgggcatggtggcgcgcacctgtaatcccagctattcgggaggctgaggtaggagaatcgcctgaacccaggaggcagaggttgcagtgagccgagacaccattgcactccaagcctgggtgacagagtgagactccgtctcaaaaaaaaaaaaaaaaaaaggatattctaaagaagaacattaggatactcaagttgcctggcaaattgagaacatttttgatagtaagatattttcatcctgcagtgctcagggggatagatagctaagctaggcacagccagattgcccctctccatatcagaacccagattctgatgacccagacatcctccttcacccactatagataagtcacaaacttttactttcctgattatattttgtttcaaatgatattaaactgaataactttcccaaatgggtttgcattccctagggatttatcatttgacgctaaaaaatgtatttttacagaacragaaaagcactgaaacctacttatgtaaagggtaaaaatccaaaatcctagttcccagacattttctaaatggtagaagaagcctacccatgatttaagatgggctaccagtcctctaccaattaagcacacacaaatgtgcatgtcattaaaagttgaagtgttggccgggcgcggtggctcacgcctataagcccagcactttgggaggccaaggggggcggatcacgaggtcaggagatcgagaccatcctggctaacacagtgaaaccccgtctctactaaaaatacaaaaaattagccaggcgtggtggcrggcgcctgtagtcccagctactcgggaggctgaggcaggagaatggcgtgaacccgggaggtggagcttgcagtgagctgaggtcgcgccactgcactccagcctgggcgacagagcaagactccgtctcaaaaaaaaaaaagttgaagtgttgtagtccacttgatttatcctcattctggcatttttcttaagaccctcaggaaagctgcattttaaaatattgcctcagaaggatggagtaatattgtgtcttctactcctagaaagaactaatataagaatcacctaaataaaaatttgtcttctctgaaaattactgttaaaaatgtcaatatcgttcgtgaaaaggaacaaaacagtaaatgtcacttagttttctgcttaggcagaaaatataactctctkggcaagcagatatattctttttatgcgatgagtttttccatttttgctttgttcaacagaaggtttgacttaaggcctttaccactgtccttcgcctaggcttatggcgtagcttattattttagtggtccagctctacaggcatgattgtttatgtttggaagttgagktatgaatgatctatctccaaatactagttttaaagctcagctgcaaagtgacttaatttagaaatgcacctttcaggtatgtatttctgatgctactgaccaactataatctgtaagtgtttgattttttttttkgacagaaaggaagagttactaaaaggaatctatgcaakgggatttaataggccatctaaaatccaagagatggctctccctatgatgctggcacatccgtgagtttccagggtagtggtattctacttggttaygtttagtttcttattttcagtttatgcccactctctkgtattcagtttatgcccagtggtcttctcttttctacagaccccagaayctcatagcacagagccagtctggaacaggaaagacagcggcatttgtgttggcaatgttaagcagagttaatgccttggaattgttcccacaggtaagggaaggctgagagaagactgggaatgcttgcactaccagtgctaattwaktaataggtgatattcctgtgcaatgatatggttactatggtgatgaaatatttagaaaagacatgttttcataaaatcatagagcattgggtagcagcatgggacagtgatggagaggacaggctttatagtcttgagtggtttcaatgctagcctcccacttactaactgaatgtcttaggcaagttaataaatctgagtctgttaatccttgtctgtaaagatagcatctgtaaaggaatgtatcatagttgatctgttcacccttaaatcctaatacytagcacagtgcctggcttgtagaaaccactcattaaacattgaataaagtcatcatgtggatttaatgaagtaatttacgtttttagcacagtgcctggcataaattaagcatgcaataattatagccatctaactgcaggaccagaaggtcaggtagtccacctcactctagcagaggaggaggctgatgcttggagagggaagtgtctttcttgaggtccccagagagtggctgagtcaagactggcactggtacccggtttaccattctcctagtgtagtttccactcatgaaaagtatctggtcgtctctccctatttgcttgacaagctgagtacccatatgcattaagtgctgtggggaataccaaggctctctcagtaagcttccactctgatcagccaggtcagctataggtaaggcataggaaatcttacgcattttagacaagttcagtgaaatttatgtttagggtttgatattatcaataaaaattatgtaggataagttatgttggagcacattttgaaaaatgtgtgggaaagatatttttagccctttggctatgtttccctatcacagattcctaattgacacatataagtgcattagatattaccgtttttttccatcagcatctttattcatcagcaaccaccatttttatggagtatggaataacagagtttgggggaatattctgcctattatgtattatattatgttatatatatcatattatgtattgtaaagatatagataatataaacagattggatcaagcaaggagtgttcccgaaataggcagtctttttttttttttttgacatggagtctcaccctgtcaactaggctggagtgcagtggcatgatcttggctcactgcaacctttgcccccccgggttcaagtgagtctcctgcctcagcctcccragtagctgggattacaggcacccgccatcacgcctggctaatttttttgtatttgtagtagaggtggkgttttgccattttggccaggctggcctcaaactcctgacttcaggtgatccgcccacctcagcctsccaaagtgctgggattacaggtgtgagccaccgtgcccaacctcaaaaatagacagacttttaatagcaaatgagaggctatgggatagagctcgaactgtaatttgcctcrcattcattgattcccagcttccctacatcccattcttccccctcctatgcctcccccactccaaaaagggtgactagtaacttgtgtttctaaataaccctttagagaggaatatgtaaaaggtagctgtttctccattccttggccccttccccttctcatactcaacattcacctcaaatctgtcamctattaaactgtatccaattaaaaatatttcattcaaccaaaaccttcaatttcctttctgtgcctctccctgtacaaatttttattgyagttgaaatttgaaagatgcctgtaagaacctttctcctcccctcttctctctctatcccacagtgcctctgcctagctcctacttatgaattggctctgcaaactggccgtgtggttgagcagatgggaaaattctgtgtggatgttcaagtgatgtatgccattcgagggaatcgaagtatgtaccagtaagccagtcctggctgatttttcaaatcctggcttcaccaygaataagcattttatataacttcttggcattctcatctctaaatgggggaaataataccactcatgtcatagagttgttattagaattgagatgacgttggtaaagcattktacacaatgcctggcacgtagtaaggacccactaaatgttagccacatcatttccacatcctgcaagaggatgcctttgtccgtaattcaacacttggttgttttgtgcaggacagcttttatttttggatttttcgttaaaatattataagcttataatggggraaaaactttaaaagacaaaaagattaaaagtgaaagttgttcttcattgccttccagaaacgtaatgccmaagatcacatagtaaacaggcaagcctttgtkttttgctttttttttttttgagctcatacatgcacatacaaatgcccatatttatatttgtttycactgagtgtttacaaaaatagaaggactttttttcatactgtttgttcctttgactagctgcccaatatttcatgatttatttaatgtamcctattgatggacattttggttgttttctgtttggggaagtgccatttttcacagttaagaaaaagtcagaaatttatcctaaaaattctgcagaatcaaaaaccacaatgaccctcggggtttccacttggaaaattattacaaactgtatttttgcttatgagctttatattgcactgccctgaactgtgacctgttggagttgtttgcatctgaaggagtgcttaaaacccttttctccccagttcccagaggcaccgacatcactaaacagattataattggcactcctgggactgtcctagattggtgttttaaactaaaattgattgatttgactaagattcgtgtgtttgtcctggatgaagcagatgtgatgattgacactcaaggattctcagatcatagtattcgtattcaaaggtaatcttcagagtcttccyctcttcctcagccttctgtccagatggggaatttcatttgtttactcctccacattatctttattgcttaactcctcaccaccttcacctctaaaataaatttgagtttttacattattttcaccagttcaagggtccctcagactgctatagttttccagcttcttcagtttgtaatcttgcctgagtgctttactttgcaacacagcttacagatggactctattaatatatagtgcatctgcaccaaatttgccaatatgttctatattttggccaaaattctaaagaggatctgttaaagcctagtgagaatacaatggataattgagatagagtagaggacacagtaatgtgggatcaggagactggtaatctagtcctgactttccccctaatttgtaaaaagccgtgtcattttcctaggcctctctatcaggatcacctgagggatttaaaactacagattaccggacgcagcctcagacttactgaatgagagtttctgtaagtgggatttaggaatctgtatcacgtattttttaatgaagtattacatactcaatgttaaattcaattagtattgaaagacttgtaatgaaaaacagtaaccccttgctccaacctgaagagaatacttctcttttctgatattaaccttcatacttgtaaataatattttcatactgctgtttcctgatgtatagtcattgtcaactgatttcccattataggaagtgggaattgagttctttgaaaacaccacccattctacctttcctatccccccatyacctctctgtaattatgtcatgaattaggttacagtaactgtcagtattgatatcatgtgacagtgtaagtattgttcactgctgagccaaacagcgtattattataattacagttgcccctccgtatccacaagggattggttccaggaccccttgcacgtgccaaaatctgtggatgttcaagtccctgatgtaaaatgttgtagtatttgcatgtaacttatacacatcctcttgtgtactktaaatcatttctagattatttataatgacmagaaaaaagtccatatacattcggtacaagcacaattttttccaaatatttttgatccacagttgtttgaatccacagatgcagagcccacagatacagatggcactaatataaagggctgtttttcttgtaaagctttttcttctagaagtaatcattgcttttgctttttttttttcattttgttagtatcackgkgtaaggatctttaattttcccttagctattctatcgtatgtgtcatatgtctgtgatatctccaaatagtaaaataaaatttaaaaatccatccatttctcagctgggcacggtggctcacgccagtagtcccagcactttgggaggccgagacgggtggatcacaaggccaggagatcgagaccatcctggctaacacggtgaawccccatctctactaaaaatacaaaaaaattagctgggcatggtggcagacgcctgtagtcccagctacttgggaggctgaggcaggagaatggcgtgaacccgggaggcggagcttgcagtgagccgagatcacgccactgcactacagcctgggtgacagagcaagactccatttcaaaaaaaaaaaaaaaaaaccatccatttctcttttttcctgccaatattccaagytccctctctccagcttcagtctggtagatctgctgtacagctgtcatcatgggtctttcctttgctcacttaagttttaaatctcctatatcttgggtcgtttttcttggagtacttcctcagtatgctggagtatattttctaatgccttcctgaaaaacaatataaaagagattcatttttcagcccttacatgtctgaagatgtccttattgtacctgtaaatttgatcttttgactaatagtttgcccggataggaatcctgtgtcattctctctctaaattcagagaaatgttgaaaacagaaaagtttttaaaaataacttcaatatataattaatatcctcagcttccactgttgttactgaaaagtttaatgtcaccctgatctccmagcttttgtttatgaccytttttttttctctcgcgagaagcctttggagtcttctttctttatggtattctgaaacttttcagtgacatactttggttcaggtcttttttcattcatcatactagacacatactgcaccctttcattctcaaaacctgggcctgccacttctgggaaaatttcttcagttatctctttccccaaagtgaccaactttttagagagcccatctgggacacaatcataacaatccaaaaaaaaaaatgatataaaatagaagaaataatcatacacagggttattattttgttgtgtgtttccttccatttgtcattaaaataacacagtcattgagcattccgtttctgtctgtctcaatcacactggtggtggtctctgatttttttttatagagcttcctcttcttgcattacagatgcagtatcttcagtkgtctctctgagaacattaattctagtatttaaaaattttttctgttttaacattgtgaattatccaagtttcctttttgtttgctacagcctctttcacagcagaacgttcctctttatatgtggtgacacttggctagcctttcatgatctagggtgagaagctacaattccaacggacagctctgtgtgcatggctggggctgccacttgggaagtcctactgtgtgacgattgtcatctggaggtctttaggactatgtaatgtctctgttctcttttctgggggatagacccttggttgctgacattctgggagcaaggcaggggaacaggctgagagggccgtcccattcggtatgcatattttcacttgatctcctcttttcagccatatgttttgcctccactttctactaaggcttgtatccccaaatctggaatttctgcacagaataaacatctaatcttctgcttccacaggcctagctacctaaagtagggggatccacctgctccttatacgtattttctgcctcagccttcctatttaaaataattttcagcagagatcaaaagaggttcccttcttgtcatcctcttaccaataagttggtttgttttatataatagcaaatgaaaaattcagaactccaggaaatatttagtagtgaaaaagggctttctttttttctgagatggagtctcactgtgtcacccaggctggagtgcagtggcgccaccttggcttactgcaacctttgcctcctgggttcaagcagttctcctgcctcagcctcaagagtagctgtagctgggatcacaggcacgygccaccacacccagctaatttttgtacttttagtaaagatggggtttctccatgttggcyagtttgtttatgaccaaaaaatggtcataaacaaaagcctggatatccgggtgacattaagttcaaggccaggtctcaagttcctggcctcaagtgatccacccgcctcaggctcccaaagtgctgggattacaggtgtgagccaccatgcgtggccccaaaaagggctttctaagaaagtctcttttattttatactcaagagaatattaagtaataattagatagagcatttatgttggttgatcagccgtccattgttatagtcttccttccatttgcttaaaacaggttaaaccagtgatgtccaacagaaacttaatacaagccacatgtataattttaaattttctaatagccacatccaaaaagaaagagatgaaattaataaatatatgttatttaacccattgtatcaaaatatctcttcaacaagttaatcaatataaaaattattagtgacatattttacattcttttttcatactaagtcttcaaaatccagtgtgttctacagaacagccatggttttctttccttatgtattatatacattttttctttgtgagtaacaatccaaactcttaaactttcactaagcttcaaackagactacttctccacaatatttatcccagcaaaatggcccaagccttaggatataaatccttgtgccatctttctccagatgcaggattgtgacccagcaggtggccaagaggctctagcatgtggaatgcagagttttcctcatgttttctaacatatgtcctgttttcagttctttccccctgattctctggttcctgtagctcacagctcctagacctcccggtggttctgagggaacagttagctgcgttttcatcaactctgtgttctgcagtgctcatggtgtagcttcatccactttctcattyaccaccccttccgtcttccaaaaatgtatttagrtaacttatccaccagtttcttctctcccattctccacrttttccgtggattctttttatctctttatgatcacattagtgggatttgggcagctaagaagataacacaggtagacggtctgacatcattgaccagaggtctatcggattgttgtttgatgatcgagaccctaggcttaaaattgagtttgagaatcactggactatatggtctctttcactctcttttagcactaacagtttattcctcaaagtgctctgtctccttctcaaaagagccgatttccctctggtctctctcatttattttgttttaaaaagttaactttttattgatatatgaaatatatacagagaaatacaccaatgataagtgtaccattgagtgatttatcacaagaagccatgctcttgtaacagcagcccagatgaaggaataaaattttaccagcaccctagaattttcttaataacccctttctgctcactggtccctctcttttcccaaggattagcctctatcctaactgctaactccgcagatttatttcacctgttttttaactttatgtgaatcagccctgtattcattctgggttcagaatgggtacatttcagtcactgtactttcccctgttgctcccctttaatttgtatctagttcttcccattctgaatcaagttagttgtggttgttctttccctcccaagatatataatgcctgctgtcaaataactggctctgtttccttcatctccatttacctttgtgtgagattataactataaagagcatctagtctacccttcttgtggctgcgtgagtctgcctctcctaaggaggaagttggcatgagaaatctcagaacctccagaatatatacctaaactttgccctatgcttcacattctgtttatatacttttctaaattcttggtggcaaggaggggcaggaccttggctatctgcctggagatacagctggtcattgcaggcagcacctcacgtggaacaggggtgcgtgcagcggctgatggcagtggcatgaagtgcttgaagaagagtgatgggatggcagcttggtgacagccttctctcctctatcacagagckctaccctccgaatgccaaatgctcctcttttcagcaacctttgaggactctgtgtggcactttgctgagcgaatcatccctgaccctaatgttatcaagttacgcaaagaggagctcacactgaacaacatccggcaatattacgtgctgtgtgagcacaggaaagacaaataccaagctctgtgcaacatttatggcagcatcaccattggtcaggccatcatcttctgccaggtacactctgtggatgtgtcttcatcgagcccagatatgsctacaggccgaggtgggggacgacaataagtgccctagagccaggcaccatgttcagcacttcttgtgtgtctccagtttaatcttcagaacagctctaaacagaaattacctgtattttatgggtgaaatgtaaaaaggttaagtaatggaataggatcttcaaagtgatgttaaacacagggccttcttttagagggactgcttctaacacttccccatttcagcttatgtttattgtaccttgtacagataccctttatcaggtgaaggatrttattcactattaacaamaccccgtttttatgtttgttttttgctttctgacattctcatgttcatctgttttattttctcactaccccgtaaacactttaagcttcaygacagcagggtctcctctctctcattcactcccatatccactgcactagaccagcacctatctggcacatggacagcaccaaaaacatatgtgtagaataaaagaaagctcagctctgccactggctaaccatgcaaccttgggcaagttacataacatttttaagctttgggagttttgtctgtttttaatttttaatttgttttattttttatttttttgtgacagagtctcgctctgttgcccaggctggagtgcaatggcatgatctcagctcactgcaatctccgcctcctgggttcaagcaattctcctgcctcagcttcccgagtagctgagactacaggcgcctgccaccacacctggctaatttttgtatttttttagtagagacggggtttcaccatgctgrccaggctggtctcgaactcccgacctcaggtgatccacccgccttggcctcccaaagtgctgggattacaggtgtgagccaccgcacctggcctgtttttaattttttaaatgaaattaggttgctacttcattaatttgttgtgaaaacacatgacccttaccataatgcacataaagatttcagccagatgcctggcacatgggaagcaagcactcttagagtgtctgttgttgccattgttacatgatatcattttgtcatcatagcacmtgtgaggcagatgtagcacatttatctccatttcatgcgtgagaaagccagaggtctgactggtggagaggatgtgagccttagaaacacaggcggagggaggatgccctgccacattttaaggccctggaggactgagggagaggtgaagctcaactcctctgcagccctctcccacccccgccctgcatgcatggtgtcacaagcacagctaggctgctttgcttaatcttggggtgctgtgttgggttttgcctttttacatagactcgtcgaaacgctaagtggttgaccgtggagatgatacaggatggccaccaggtgtctttgttaagcggggagctgaccgtggagcagcgagcttccatcattcagaggtttcgggatgggaaagagaaggttctcataacaactaatgtttgygcccgaggtgtgtgttaaaagtcaggtcttgagttctaatttgcatatgataaaatgcattccttttaagtgtacagtttcgcgagtttcgacaaacatgcaatcatgcagctatcactgtcatcaaaatacagagcatctccatctccccagtttcctcacactccttttcagccaatctccctttccatcccatggcccctggcaactactgatcagatttctgtctccatatttttggagacacagaatcaaatcatactgtatatagcctttgtgtaacttcctccacctgacataatgctcrtaataatactaatgaatttcattagtattgttccatgcaccagcagttcatttccttttcattgctgatagtattctattgacagttcgtctgtccaccagttgatggacatttggactgctttcagtttgtggctatatttaacaaggcagtaacaaaaattcatgtgcaggtctgtatttagagatatgctttcatttctcttgggtaaatatctaagagtggggttgttgggccctatgataggtgtgcgtttagctttataagaagctgtaaaactcttccagttgctctgcattcttgccagcaattgctaacgtcactcttaattttaaccattctagtggctgtatactgggatctcattgtggttttaagttgcacttctctgataactaatgatgttgagcatctctctggagtttctcatcttaaaagtgttgactactggtgaaaaaaatcctttttttttttttttttcaagagaagggccttccggctttcttcatccctcctaaatcattgcttgcaccccatactcataccacatttcctagttcattcttagtttagcacacagaactgacaacctgccatgctaggagtggatgctgactctgctcttgggaaaggtatcctgaaaaaaggatgatgtctctatcccttaagagctcacagcctaggctcttgcctctctacactggcactattcaacagagctttctgcagtgatggaaatgttctattctgtgctcttcagtgggtagccactagccatatcagctcctgagcacttgaaatgtggctagtgtgattgaggaactgaatttttaattttatttaattgaaatatagccacatggtgctaacatttatcatattggacagcgtaaccctagaccctagaggaaggaaggcacagagagctccaggtcaaggcacagtacaaggagtgcaaggatcctgacccggacagcttgttaatgttgagaaggaaggtacagtggggaggggaagtgcagaagtcttccgaggcagccttcaatctgaaaggggttttgcaggggcgggtgcggtggctcacgcctgtaatcccaacactttgggaggccgaggcgggtggattgcttaaggtcaggagttcaagaccagcctgaccaacatggtgaaaccccatctctactaaaaatacaaaaattagccagccatggtgatgggcacctgtaatcccagctactcgggaggctgagacaggagaatcgcttgaacccgggaggcagaggttgcagtgagccaagatcgtgccactgcactccaacctgggttacagagcgagactccatctcaaaaaaaaaaaagaaaaaagttttgcaggaagggtagcagttcagttgaatgagaatttacgtttgttcaggaaatggccagaccttgactggagtgttgtatttgagagtcaggagagaaagagatgagacttgaggtggcttgcagtcttgaattgcttgtacttttcctgtacaatttgggcagtgggttttgaacgtaagtgtgctggacattgctgtggtgaccatcgtaggagagatgagaggagtaggggaagagagtggtgagaaaccagtctggaagttgttgtaaccactgaggcaagggctcaaaagacctgaccaggacagtagccatgaaacggagcagagccagagccccatgacgggcaagcgggtgtgagactayggggcctgctggggacttggcacagcaggagcagagaggagagggtggctctgtgggcttggtgagggcacctctccaccacacacacacatacacacacacacacacacacacacacacacacacgccttgtgtatatttacatttctgtagcattctctatggacacgctcatctagcatcatagacatcacagcatgcaagcaaacttcctaaccaaagtacctgtctcaattacataagccctggttggatttctaaattttctctataaataggaattcccttggcagaygtggtacttgaatggcccgtgtactgaggaaagcattgcaggaccctacagtgtttttcctcttctagggattgatgtgaagcaggtcacaattgttgtgaactttgatctccctgtaaaacaaggagaggagccggactatgagacctacctccaccgcatagggcggacggggcgctttgggaaaaaaggccttgccttcaacatgattgaagtagatgagctgccctcgctcatgaaaatccaggaccactttagtaagtagcaccaccctcacaatatgaactacagacctgccggtctgacagtgatgatgtgtgctggagagctggagtccaggggctcatgagagtagtagaagcagaatgcatgagctggaaggcttctaattcacaggaccagggttctaatatgagacagatgattaaataatgcttatatggtaattaaaaattattttgatcaagcagaattaatatgagctcaggccgggtgtggyagctcacacctgtaatcccagcactttgggaggccgaggtggtcagatcatgaggtcaggaaatccagaccatcctggccaacatggtaaaaccccatctctactaacaatacaaaaattagctgggcgtggtggcacatgcctgtagtctcakctgctggagaggctgaggcaggagaatcgcttgaacccaggaggcggaggttgcagtgagctgaggtcgcacaactgcactccagcctggcgaaagagtgagactgcgtctcaaaaaaataaaatttgagctcagatttacatgttataactcattctgsagtcagaatttcacatcttgtgaaggcagagcagattacagaagcagattttcgtatcttataaagaaattccctaagcaaagtagtaacatcctttaagattctcttcagttctcctcttttacttacgctttttccctcctcttgcccaccctcccaaacaggaaagtcctaaattctgaagtccgcgacctttcctccagccccccatctaaacaaggcaggctctgatgatggcctgctggaactctggactggcagatttctctgatggaaactcaaaaggtcccatggttcaaattgtcctgtgccccaaagcccatggatgtggctggggagcaggggagaaggaacaccttccaggacagtggtacttaaccttgtagaaagcaataagcgctgtccccagggaagtgcacacaggcacacacatgccatttggaatataattttcacaggttggcagactgagtgtagcacatccaccgacctttcagggaagtaggttaagtgcccctgtgttaggctaactggggaggacagggtgaggaagatgtgttaaggccactgtcgctatggtgagctyctaaggccctggtctcaggaagtgactgcagtagaagagcctcagtccctcccaggctctcctcacttccactctggccttctctgccccagcgtatctagatacatacattccatggtctggtgcatttgatgctgtttgagttagtattggtcagtgattttggcacccttccttccttatgttcctataccaaggctttttatacgaggtatcactgtcttcagaaatatggatggaatgaagttccatttagaccctgacatgagactagttctgttctcttttgttcttttagacagcagtattaagcaactcaacgctgaagacatggatgaaattgaaaagattgactattgaagaaagaactttattgtttgtgcagtatcctagtttatgtgagaatgtctcagtgggttttgaaggtaatttttttatgttgaggctttttcgacgtgaaactgtcacagatggcaaaataaatgtcacggtacttagttttaagacatgaggtctttttgaagccaaattgatgtgaagcttgtgatccttttgaataaaaaaaaggcaagattatttcttattctaatctttgtacaggtaatgtctcaatgtgggctatgggggtgtttttggatttggttgatacaatctgagcagatcgtgcctcttgggagcatcttactgtgtcacaagagggcggtagagcttcgctgattttggaagcggagcgagtaggaaaaagcccatgtcttcagacctcactcacaggtgccctttccagccatttatgcctttccccgctccccgccttaaactcccccatgcatgcacatgcatgttcttaagtgaaagtacagattaaaacttttaaaaagtgaaaccatttgaaagaaagagtattttacttctttaatgtttcaagggacatacagaatttcagagtatttttctattttgcttctcttcaaattaaagatttactccctcatcagttatttcatagtctctaaaagtgtggctgtattatgggcatttcttaaaagcagtcgggagggtaaaaaaaaaacccacataccctattaaagaagtaacattttagagagcaaaagttttttgcttttaagaatttaaaggtatgtcagaatcctggacattttcccacaagacccattgagatactttttaatttttcatatttcctactcaaaagtaaagtgtagtgagcttgagaagatggggtaaatggagagtcccccagaaagccggagcggatcttgtaaccagagcgccggtaccagctctgtcacggcaccaaactgcaccagtggctgcagtgagtggccctgtcatcggtggcatggtggttcctggcatatctattttgatatccctcttccatgtcaccctgcccatgttttctcccggagagcagggctcagaaatacataaaaatcatcacgtggctgggcacagtggctcacacctgtaatcctagcactttgggaggccaaggagggcggatcacgaggtcaggagttaagaccagccttaccaacatggtgaaaccccttctctactaaaaatataaaaattagctgggcgtggtggtacgcgtgcctgtaatcccagctactcaggaggctgaggcaggagaatcacttgaacccaggaggccgagattgcagtgagccgagatcgtgccactgcattccagcctgggcgacagagtgagactctatctcaaaaaaaacgcgctcccctccctcatttagcaacagatatttattgtataccctttatgccaaacaccagggaaaaggaggtgagtgagatacaacagccatgttggaattcagagcctaatggcagagacctagaataagccagcatgataacagactgtgctaaagcaagcgggcccagatcactagtgtagcacagaggagggaccctaacaccatctaggctggctcccagaggagaggacactcaggatctcctacaggagagcaggatgtattcaactgtgccttctcagcatggactttgtaccacccagcaactttctaacctgagtctacgagaggaagtgttccagacccagcttaccataattacctggagagcccggggaaaaaaatacagatttccttccccatgcagatgaaagcagactctccgagggcagagcccagaaatacccacttccataagggagccgcaagtgcaggtagagcagtggtaacgaagatggccgtcccagcgggagaccctcaggcagagaggcccttggggacagaacttgtaacacatggaactcctgctgctcggtgtccatcctggttctccttatcctacatctgcccttctctctggactggaagctggtgatcactcttgtccactcaatacccctaacacagtgcccagtgcattctaagtgcccaaggaacctttgtctttgttgagtaaatttttttttcttttgccacttcctcattcactaataatttttttttaggttttccatcctagttttgaaccccaattacatggcacaggatgaatgagcatgagaagtgtatccagatactttgttctcttactattcgagaatcgagttggaccttccaccgtgctcagctccgccttggggtgtcctaaataaaactttaccactttcctttacagttcaaatctctggtaagatctccgccagttaccctcacaaatgtcctcagtaatttttgtttggcagctgttcccacaggtctgcatgaaccaggtatttttctgcgttcccttttgccccctcctcacgtccctttgtctcaccacctaggaggcagcaaagccatcctgtgtcacagctgcattaacacgaactggctagtttggtgagtcaacaatccaaaggctgttttttgcagggtgcagctcctgtcagagctgtaagcaattttcccgtcttcctgcatggcctggccaaggtcatctctctcagtgcctgcctgaggacagagtagatagagaggcaaggaaacaccaggtgatttcagtgcaactgtgagctgggttcatcagctgtatgtttcttggcaccaaatactaaaccaaatccgttaagtttatcttggccagcttaatactgttagcatattgaaattcatgattacgtagagcaggactgtgatttccagtgggtaagtgaacacctcgcatggaacacggctgctatgatgttaggtgctggatctaaggcaaccattaataataggaaaggcaaataagttggtcatagtctggtaggatgtgtgacagccgcttttcaagagacattattgcttttggtcatgagaaagtgttgatcctcctcagcaaagctcggtcaccatgaaagctgctggcagtctctgcacatatgaccaacagtggaaaatcttagaggagtgatgggggtggtgggtggtgggcagtacctttccagacagcagagagagagaggctggttttgtcaagccttggcttggttcctggtcctctgagaggctcagtctccttccttttgattcaaggcaggacctagattagaaagagaacccctgcagagacagtccagctgttgggatgggcctgcactttgctctctgaaccggggggcattactatgttctcacccacattgtacagacagcccatcatgctcagccttgcaggagggtcttcaggagcccagccatctggcacatactgcttttcccaagggagtaacagaaaggtcagatcctcttcaatcctaaccctctcacttcaactctccactacttctggggaataatgatgtattatccaagaccctcatatcatattaacccacagactatgaaatcatcacagtcttgttctatgctacagggaatacgaactttttgccctagaaagcatccaagaggcactcaaccccaacattttctatacttttgctaatccgtggctgagagaatttgacattttcccttctcttttttttttttttgagatggagtctcactgtgttgcccaggctggagtgcagtggcgtgatctcggctcactgcaaactctgcctccccggttcaagcaattctcctgtctcagcctcccgagtagctggggctacaggcacatgccaccacgcctggcttatttttgtatgttattttagtagcgatggggtttcaccgtattggtcaggctggtctcgaactcgtgacctcaggtgatccacacgccttggcttcccaaagtgctgggattacaggcatcagccacggcgcccagcctccccttctcatttctgtctgctgactcctcttcccgttctgctgctcacatccgcaggttgatgttttcaccctcggggttctgccttatcccctgccaccctcctgtgctgcctgggtccctcagaaggatgggtctggacttcccacaccctccttcgctgcccctcactgtgttgcctggtgtctgcctgaagagatgcagtttgagccattggctggtttctcttactgctttgcaaactatcagttttaaatgtgggtggggctgaagcaccattctccatttttaatgtggattttccatccccctttaaacattaaacttttagattcttctagtgaaatacagaaaacacacgtgaactgggatgattcttggctgagagatgtcccatggtgtttggcaaacccacggaggggcccacaggcccatgtctggaactgcctggccctcctttaccagtttatcagccttccatctctgctgaggtagaaacagccagaggctctgatataataaagatgagctctgaagaggggctctctctccctcttgtattcagaagaactgaaagttttcataagtctctagagaagcgtggcaactatctgtagcatttttctttgggaattaacctttgcccataattatttctgttcagtagaataaccatgggtttctctattccagtttctagaatataattttcataaatgaggatggtctcctattttgagcttaacatttttctattgctagaaagaatggtactgcctcactccagctccttagtgtgtgatcatggcttgaaatctctgctttctgttatattcggaggtaacatgtataggtcatgtataatggcctcaggcatgatttagaaggcacagactgagcaggctgctttgtgaggtggtgaactccccattcatgagagcattcaatcaatcagaagatgaatagttaatcagatgctgtagttctggttcttgaataaccaggagttcagaataaaatgatctcggagactctgtccattctaagataccatgtttccatgaccctacacacaatagctacacaggtggagcaacatgagtctgagaagctttgcacaaaagaagattgttttccacaaatgaaaatggggtggttaacttctaattgtaccctgtcttagcgttcagatgcattggttccttccccatgtgaccatctcttcattcaaagcttaggctgaatgtggattatttttaatttaatgttcatattataaaagcaatgaaacagcaaagtagagcaaaatatcaacaatccaatgactttatcataaaaattatcagcttgatatagtcctgttcttaatataaacatctgtggttaattatagtattatatctttttatttgaaacattcaagttttttttcatgttaccacacagtgtttgggattatattttcaaaataataattgaccagattgtcctatctagtgaatatgcatatagctgactttgttgaacatttataggatgtccatttttccaaagctttaattataaatcatgctgcagtaaatatcttctcgcccaatattccgaattatttcttaagattagagacattaagtgcgagtaccaggtcgaaaactagaagcactttaacagcatttaacagattttgttagagctacattgcattcagtagactggctataccaatatatagttgcacagcaaattcacctcaccttaccagcaagggatattttcattttaaaattgcttggtaacttttctggtttatgtttctcttagtacaagcaagattatattttttaaagtggttcatcatttgaaaagcatctgtagtgttctttgcccatttatcttgtgggatgttaatggtttccttgtcaagttgtgtgaaatatatgtgtgaatttatttttccaaataaaataaagacattaaccttctattttactgacaacatattgtctatctcagtctgactgcattttaaaatgtgttatagttgtttcacacaaagttatttaattttttgtaatgaaatatatcaataattgattgtctactggttctagaatattagcactgctctagaaaacatgtttaattttatttttagttattgtgatttttatctttaaaaagatactcagctttagtccatctgtaatttgttctggtgtgaggtatatcaccaagaaacctctatttcctattattatatctt

SEQ ID NO: 95823 - DNA, 22894 bp, Homo sapiens
  misc_feature (1)...(22894): n = A,T,C or G
aggagctaggcagaggcactgtgggatagagagagaagaggggaggagaaaggttcttacaggcatctttcaaatttcaactgcaataaaaatttgtacagggagaggcacagaaaggaaattgaaggttttggttgaatgaaatatttttaattggatacagtttaatagttgacagatttgaggtgaatgttgagtatgagaaggggaaggggccaaggaatggagaaacagctaccttttacatattcctctctaaagggttatttagaaacacaagttactagtcaccctttttggagtgggggaggcataggagggggaagaatgggatgtagggaagctgggaatcaatgaatgcgaggcaaattacagttcgagctctatcccatagcctctcatttgctattaaaagtctgtctatttttgaggttgggcacggtggctcacacctgtaatcccagcactttgggaggctgaggtgggcggatcacctgaagtcaggagtttgaggccagcctggccaaaatggcaaaacaccacctctactacaaatacaaaaaaattagccaggcgtgatggcgggtgcctgtaatcccagctacttgggaggctgaggcaggagactcacttgaacccgggggggcaaaggttgcagtgagccaagatcatgccactgcactccagcctagttgacagggtgagactccatgtcaaaaaaaaaaaaaaagactgcctatttcgggaacactccttgcttgatccaatctgtttatattatctatatctttacaatacataatatgatatatataacataatataatacataataggcagaatattcccccaaactctgttattccatactccataaaaatggtggttgctgatgaataaagatgctgatggaaaaaaacggtaatatctaatgcacttatatgtgtcaattaggaatctgtgatagggaaacatagccaaagggctaaaaatatctttcccacacatttttcaaaatgtgctccaacataacttatcctacataatttttattgataatatcaaaccctaaacataaatttcactgaacttgtctaaaatgcgtaagatttcctatgccttacctatagctgacctggctgatcagagtggaagcttactgagagagccttggtattccccacagcacttaatgcatatgggtactcagcttgtcaagcaaatagggagagacgaccagatacttttcatgagtggaaactacactaggagaatggtaaaccgggtaccagtgccagtcttgactcagccactctctggggacctcaagaaagacacttccctctccaagcatcagcctcctcctctgctagagtgaggtggactacctgaccttctggtcctgcagttagatggctataattattgcatgcttaatttatgccaggcactgtgctaaaaacgtaaattacttcattaaatccacatgatgactttattcaatgtttaatgagtggtttctacaagccaggcactgtgctaggtattaggatttaagggtgaacagatcaactatgatacattcctttacagatgctatctttacagacaaggattaacagactcagatttattaacttgcctaagacattcagttagtaagtgggaggctagcattgaaaccactcaagactataaagcctgtcctctccatcactgtcccatgctgctacccaatgctctatgattttatgaaaacatgtcttttctaaatatttcatcaccatagtaaccatatcattgcacaggaatatcacctattactaaattagcactggtagtgcaagcattcccagtcttctctcagccttcccttacctgtgggaacaattccaaggcattaactctgcttaacattgccaacacaaatgccgctgtctttcctgttccagactggctctgtgctatgagrttctggggtctgtagaaaagagaagaccactgggcataaactgaatacmagagagtgggcataaactgaaaataagaaactaaacrtaaccaagtagaataccactaccctggaaactcacggatgtgccagcatcatagggagagccatctcttggattttagatggcctattaaatcccmttgcatagattccttttagtaactcttcctttctgtcaaaaaaaaaaatcaaacacttacagattatagttggtcagtagcatcagaaatacatacctgaaaggtgcatttctaaattaagtcactttgcagctgagctttaaaactagtatttggagatagatcattcatacctcaacttccaaacataaacaatcatgcctgtagagctggaccactaaaataataagctacgccataagcctaggcgaaggacagtggtaaaggccttaagtcaaaccttctgttgaacaaagcaaaaatggaaaaactcatcgcataaaaagaatatatctgcttgccaagagagttatattttctgcctaagcagaaaactaagtgacatttactgttttgttccttttcacgaacgatattgacatttttaacagtaattttcagagaagacaaatttttatttaggtgattcttatattagttctttctaggagtagaagacacaatattactccatccttctgaggcaatattttaaaatgcagctttcctgagggtcttaagaaaaatgccagaatgaggataaatcaagtggactacaacacttcaacttttttttttttgagacggagtcttgctctgtcgcccaggctggagtgcagtggcgcgacctcagctcactgcaagctccacctcccgggttcacgccattctcctgcctcagcctcccgagtagctgggactacaggcgcccgccaccacgcctggctaattttttgtatttttagtagagacggggtttcactgtgttagccaggatggtctcgatctcctgacctcgtgatccgccccccttggcctcccaaagtgctgggcttataggcgtgagccaccgcgcccggccaacacttcaacttttaatgacatgcacatttgtgtgtgcttaattggtagaggactggtagcccatcttaaatcatgggtaggcttcttctaccatttagaaaatgtctgggaactaggattttggatttttaccctttacataagtaggtttcagtgcttttctcgttctgtaaaaatacattttttagcgtcaaatgataaatccctagggaatgcaaacccatttgggaaagttattcagtttaatatcatttgaaacaaaatataatcaggaaagtaaaagtttgtgacttatctatagtgggtgaaggaggatgtctgggtcatcagaatctgggttctgatatggagaggggcaatctggctgtgcctagcttagctatctatccccctgagcactgcaggatgaaaatatcttactatcaaaaatgttctcaatttgccaggcaacttgagtatcctaatgttcttctttagaatatcctttttttttttttttttttgagacggagtctcactctgtcacccaggcttggagtgcaatggtgtctcggctcactgcaacctctgcctcctgggttcaggcgattctcctacctcagcctcccgaatagctgggattacaggtgcgcgccaccatgcccggctactttttgtatttttagtggagagggggttttcccatgtcggccaggctggtctcaagctcctgaccctcgggcgatctgccctcctcagctcccaagtgttgggattataggaatgagccactgtgcctggcctgagctatattttgattgcatggaaaatgtacaaatctcactttaatactgaatattaaaaattaactgggcgtggtggtgcatgcctgtagtcccagctactcgggaggctgaggcaggagaatcgcttgaacctgtaaggtagagcagtgagccgagatcgtatcactgcactccagcctgggggacagagtgagactctgtctcaaataacaaaaaaaaatattgaatatcagaaaacaaagaggagatcctgatggtttttactataagcagatgcgtttgttctgtggttttcagcatttttcccatattaaaagagtaaaaatactcacagccgcagctcttcaaatgtctttactgagtaaagtggagagctgggatccttctgtaaaacttccacacggtgactggattctactaaggattgatggattaacttgtttaagagtgaattagctgccaaatccactrgaaaagcaaaaataaaaaagaggacatcaagcttcctgaatgacatcaaataagttgctctttctctttcagtggttgtataccaagcaattgcacctacgctcatttttcctctaaaagagggttccagaaagaatgatatagcactgaggattcgttctttatgaggattcagtttcttacgctctgttacttcaccatcctctaacttcaaagtagcctaagtccatctccatgagaccaaatccttgacagatggaagttctgaacccaatccctgcatattccatttcaacttcctttaaataaatacaccttactcctaatttagtgtgtctcctgatagtcactataagaaaacagaagcaaagacaggccttttccaattgagattatattattcactcacactattaaagttataaacggaaacagaatgctagtagatacatgcaaatgaattcatctcctacctacatcttcttcatcatcttcattgatgttattaatagaaccatctggaaaggatggaagagaaacaatacaagtaaagacaaatgctgagcacaaatgtaaagcatgctattcaattttttcttcctgactcttcagtgtctactggcaagaagagtcatttcatggaggaatggacgaaacgattgggaaggtaatggagagtgctgaatgtcacactaatgaatccgcggtgtttcacttggcagggacgtgatgaaagcaaaacaatactttttaatcattgaggtcgctctgctttgccctaacagcactcacctatgtttcggactgcagtactcttaataccccaaaggttcttccggggttggctgaggtttgaaaactattgagagacacaaatttcaaccaatattaggatgcaagccctcaagcagcccagtgcttccctaccacaggggctgggagggattcagggaaggacacccgggtattgcttcctttgcaatattaggtagcagcagattcctttcaaggttgggtttcctgtatgagttaccctaaaattggagattttctgtattccctgtacatgcagtttctctttcctaggcctctagtttagagttgggcagtacttggggctcacggcaccaacaaggggagggtggctaggaaagtgcgctggcaaatggatggaagcgaggtgaggcttaatgggcaaatgggcagagtagaaaactcggggtctagctgggactaccagctgcgttcccaccctggatttccaggggtcgtcatttttgccctttctaaccaaaggtcttgcctctcgtgggggtggggacggggtctccctctgtggccctcttccaaacccttcccgcatctcccctccagcatctgacgccccacttcgaacgctcgcgggctctccctcccctcccagccgatctccctctgcgagtgggagctccacccccgcggctgtggccccccggctcggtggcggttacgtggctgttcagccgctcgctctccgccgcccctgcgtcgcctccccacagtaacgacgccatggctgcgattgctgctcccgcccccagcacgtgcttccaccaccggcgcgaggcggtgctggccccatccgctggccaatgggcttccttagggggcaggcgtccgcgtccgcgcccgcgaccaccgcggtgcggcgcgcaggcgctggaaggctgggtggcgcgcggaaggggcggagggcagagagcggggcggggggcagagagcggggcggagggcagagagsggggcggagggcagagagcggggcgaaagggcgcggaccggagggcagagggggcagcttccgcagagtggagagcgccccccgcgccgccccgcggccmgccgctcacacagccctccaggcgggagccccccrgactccccgccgcgctttacgccccgtgtcggtttccctggaaatttccgcctccacatcacaagatgtcagaaaggttagcgaattggttagsaaagtggagacaaaatctgatgaatttgatatgacgaatgacctcgaatgccacagttgcggaaaggaagcagaactgttcaagctctaactgctgttcctgccctagatacctgtgatgttccacataggctttttaaagcttttattctgaaatgtggtctcttgttaaaaacattacctttcggtataacctctacgtcctacatgcgtttgcataatccggtatagatccctggatccctggtactaatgatttaatgaccgctcaatttggacgaaagaaccaaattccacctcccccccgccccccagttttctaattgtaattttgagattttgatcagcatttctggaattgggggcaaaaatacaaaaacccacacgaaactgcagtsatgatctctccgtggtgctgaagcaacgctccccgctctgttcggtcactctcagggcacctagtcgtttgttttgagattatcatattcatttcagcttttaatttgaattctaatagtaaatgtttttgtctctcaatggtaactttcttctcatttaactaggtataaaatcgagccaagatcttcaatcttttagttttcgtataaggatagcagaatttgaaaaattaccttttttctattattttagcgtagcactacaattcctccttttattgctgtccygccacaggcccagattctgccctgtgggcggagaaacggtagctggactagaaaacctcaggtagattctagcaccaagctcggttctcagaactacatttcccacaaacttggactacacctcccatgagggctcgggcgcctgcgcagaagacgcacagtgacagcttcctttctcggaaacgcggcgcggccggctgccggaaagtaagtgtgggatttttggagtgggttactttctgggttccacaggggaagggacaaatggacacrctgctgaacggttgtctgttgtcttctttttgccctctttcacatactttggtcttttcaggaaagcattgccgtatggaaatgagacctcgcttaagaccatgtatttttcttttgtgcctggtactttctggagctctcggtggaaactcgccgcagtagggtcgtctttaattccgttgtgacgggagcttcagtggtacttgtactgtggagtacaaaagtgctctgctgccccacttagaattgggtgctcataaaacagtagaagttgagaacccaggagtatgtgggaggctgtggcagcaattttcaaattattttggggattgccttacatacagaccacgattgctttctagtgatcatagtgcgtgtctgctaatcctttggacagtactccctcttcttccctttggattaatataaagtttatcaagaggaatgctatttatgtgttaacccactggttcctgagattaggacttttttttttttttttttaagactgtcgcccaggctgagtgaagtggcgtgatcactgctcactgcagcctctacctcctgggctcaagcgatccttccacctcagcctccaactagctgggactgcaggcgtgcgccatcttggcagcctagtttttaattttttaattaacacacggtctcgctgtgttgcccaggttggtctcgaactcctgacttcgagcgaccccccctcccccccgccaccaccccgtcttggcctctcaaaatgttgggatgacaggcgtgagccacggcgcctggcccaatgtatggaacatctggtgatggccgttttagtttgtaattggtgcttaggggacacacgaattccctctctgtggttacttcgcagccctggccagggtgttactttaaacgtctgcttgggaactcctgcacttcaccctgaattagggtaaggtgtgcyggaaaaagcactgtagtgtaccaagtcctgtttttgccacaaatctgccttatgaccaactagactcrctccctggcctagttctttagttagcacgggagttgaactttggagactttggtaatgttggactttgagatccaaataatcactggagtgttttgcatgttaaaatcaccatgtaatttttgacctcataaaaagtcgaggtataaatacaaattacctttaatcccactactcgttaggttttgatctttccctgtgtgtactgagatcatcctgtatagtttatgatacattcatgtcacttaatttcaccttcccatattactttcccaagattcccaatgactatttaatattctaatgtctttaaagacatttactattccactgttggtggacagtttgcagtttctacttttttgcggtgagtatatcctacatgtacctgagtcattgattacttcttttccagacaaatgcstaacaaatagaactgggtgaatgtgtgaattatgtggctttaaatgttacagggaaaatgattttcgcagatagtaacggtcaaggtcattcacctttatgttagaactttttctctgtgaacaagcaaactgtrctatcattcttctggcctctggtgttaaaactgacaactttcagattttagatggtccccgttgggtcagaaatatcaagaacagataaattacaatttaaggtgagcagaattcctattttgatctgcacccaaacaggctaggttcatattggtatttatgtttgcatctgattccagatgttactagtttgaatttctactggagtaggaatacccttccaaatgatgcataattcctacaaaaatctcaggggcaaattataaaaagaatggtattccagaartaacagctggcaggcaaaatattaatgaaataattctgaaataaaacaagtttgaatcctgtatgttatatggtactgttttggggcatttgttaraaagtattttaaagctacttggatttgttgtacacctttagtaatgaggctatccatgttgttaacctctcccatcctttaggactatgtaaaaggcaggtttttgttccttctttttttttttttttttgagacrgagtctcgctgtcgcccaggctggagtgcagtggcgcaatctcggctcactgcaggccccgccccctggggttcacgccattctcctgcctcagcctcccgagtagctgggactacaggcgcccgccacctcgcccggctaattttttgtatttttagtagagacggggtttcrccgtgttagccaggatggtctcgatctcctgacctcgtgatccgcccgcctcrgcctcccaaagtgctgggattacaggcgtgagccaccgcgcccggcttgttcyttcttttgagctstcatcatagcccaggttcaagatcatcttaggcaagtatttcatgaaataatgttcaagttcatgaatttccaaaattctttaattggtaagtgtaatgcccagcaacttaaaaaacacacactgaagcacagcaactcatattgataggtaaaaaaagttacaggacacaaagggcccktactaatttgacaaaatagaaagaccaggtctgttgttctttctctgatatgatttatcttgcaattgctggatttgagtggcaatttggaagtatcatctgataccaatgtgatatatagctaggaaagaccaatgataggtgaagtccttacyataaaatgtttcgaagagcttctcaasacarttgtttctatttaaaagggaagatataaagagctaggttatctcaaacaatcctgtgaaagaagtttaaaaagatttaagaaggagaaagagggaagggaagcttcctgggtatgacaccatttgcaaggtcacaacgaacaccccaacggagtgcagaccttttcttctctgttggtactagataattgtttgggacatatatatgctgaggtttggattggggttctgctcgacaaagcatctgctctcggacaccccagcgtaattcctttctatgatcttcaccaggtaaacgtattgagtcccagtcccgtttgtactcaaaataccgggctacccggtctgtcttgccccggtttcggcttaactggtccagctttgggagaataaaggacttgggtctgctggcaacaatcaggtcttgttcgtaagctggagagcccattccttctctttgtagagagcaaatgagctgatcttgagaaattccttggtattcatgtggtaggttaaatttttgtgaaacatcaaatgaagattccttgtcttcctggaactgtacattcatcagcctttgtcttaagtcccagagatcctgatcattttctgtaccagattctgattcactgataatcgactcatctgttactaatacttccccatctggctttctgcgcagcacctttctcttcatcactggctttcggagtctttgggaggcctcagagactgtttctgaagggacattactttctacatgtgggtactgtagttgcacaggaagagcaggtcrcttccctggggctactgaagctttactgtagggatcatattggatagattgggcttctctcctgacatctccttcaccctgccctgcacngatgtgggtaaaagctgtagcagctgccaacattcgttcttctggatccatattagcccatatttgtccatcaggtagaagttcttccattgcttcccctacactgtaggaccttctgcaagagataacattggtcagttttctgataataaattcccagctcataaattgctcattcccttatctccgttttatagcagtcaaatggagaaagaatggctaaggccatcataaattcaatacagggtagtatcagaacagtttagaggggcattaactcagttctagggaatctattacctgctttcatttccactcttactcctgctttctactgtcttgccaccttcaggtcctaaaacaggacagtatagttctggcataagaaaagcttgaaactacatgatatggggcatactgcttaatgyacattatgtaacaggtacttagggagtactttatgtgcctgccattgttctatgtgctttacatttattaattcatgtaattttcagctgtgggattatctgcttttcacagatgaataacatgaggcacagggaagttaaataacttgcccaaggttactcagctagtaagtagtggagctgaaattctaactcaagcagtttggcttcagactgagtccctgcttttaaccataaaagagtgatttgatctaaaaaaaaaaaatcacmaaagcagtgttgtgttctctcacacacatataatgtgtatatacgtgcatacatataatttctatgctttaataatttttttttttgagatggagtcttgctgtcacctaggctggagtgcagtggcatgatctcggctcattgcaacctccacctcctgggttcaagcgattatcctgtctaagactccggagtaactggactactacaggtgtgggccaccacgcctggctaatttttgaakttttagtagagatggggttttaccatgttagccaggctggtctcaaactcctgacctcaggcaayccacccgcctcggcctcccattacaggggtgagccaccgcgcccagctgtctkggtagttttaatgcatcttcagttgccagctaaatctgtttattctagtgtctgaaataacttggtatccacatcaatcagccacatacccaatgctagtttcctgactggatctgagataggtatctactgtccactatttcctgtgtccccactatttttctttttaaactgaaaaactaatacatgcacatgataattttaagcaaggattttccctcccccaccaagttttactctcaaaggcaatttcttatgatttatctagaaattttccatattcacatgtacatttttttttaataccgtaaaggacaacactacacaactcttctgaaccttaaagataatcttggttatccagctatatcagcacaggccgacattcttcattttatgttgcgcggaattccaatgtatgaatgtatcataaatttagtcagccattcccttactggtgtaatttaggtttataggtttactgatgctaacacgagtatcttgcaagtttttatctatttgtgcaagcatatgaatggattaaatttctagacatgggagaggtgggccaaaaggtatgtgtatattcaattttgacagctgttgccaaaatgtttacctccaaagaagctgtactgaccatacattaatagagcttgtgtctctattccctctccaaagtggtatactatcaaactttgtctttgcagtcacttccytgaaaaatagttcatatccttttgcatttatctcagctgagtaaaattgagcatttaaaattttttttaaaaaatttttataagcttttttctttttgtttgaaatgcttggtctttgcccmtttgactctcaggttgctggattttttttttttactttttcattaaaactgatgtatatattcatgaaatatatattgaggaaggtcgcactttaccatcacttatttttttcttctcagtttgtcatttgccttttattttttgctggcagaagtttttccttttaggtcacatctttttctagtgtctgggtttctagactgttttgcttagaaatgcctttcctactccagaatttcagaaaaaagtcattccatgttttcttctagtactttcagtttcattttttacaatttaaacttttaatctattatagatacagaaactcatagtaaaaaactaagctacctatacttagataacatggccttagaacagatgtggagatggtcttctctaactaaagtaaccatcagtcacagattgtctaggaccatcccaattttaaggatgtagtacagttgtcctcagattattgaaatattacaggaatttctacactgacatctacattacatcagactgactttttaaactattagaggcacagaaatcttttatcaaaatatgcatttaattcagctttagaaaggggtcagagtgcttaattatctttttttctcccatcaaaattgcttaaagtgagaaaatcttgtctctagcttctacttccaatgtgaaatacaaccatcggtaagcttcttcagttaggctagcttctattgcaccacctaatattcatctaatgaatattagatgatggagcatacaagtcatttatttgagataatggaaagcaatagaaactcagagcagataaaagtagcccatataaagaaatcttatgactagcaaattgaacaaatacagtgagaaatcaaatggaaatgttttagagaaaaaaatctstaacatcagtcctcaatcaattcagtgaagatagagaaatgaaatctatagacattctccctgaattttgactgctttaatgaaaccttaataatgacaactgaataacaaacagttctttccctctgtgaactggccagacaggatggaaaagaatgctatctgtggatgatcaacccacaataaagctaatgcttgtatycctggaaaagcaaaagtatattctttgggcattaaattaaatcttatataccattagaacatcatcaaaggaactagcattgaaactgttgtatccctttgctctcttttcagacagggcagacctgtatgrttsgtttattcctggggttgtcatatcatggctkataatgacacagacagaaaccagactgagaagctcctaaaaagagtacgagaactggagcaagaggtgcaaagacttaaaaaggaacaggccaaaaataaggaggactcaaacattagagaaaattcakcaggagctggaaaaactaagcgtgcatttgatttcagtgctcatggccgaagacacgtagccctaagaatagcctatatgggctggggataccagggctttgctagtcaggaaaacacaaataataccattgaagagaaactgtttgaagctctaaccaagactcgactagtagaaagcagacagacatccaactatcaccgatgtgggagaacagataaaggagttagtgcctttggacaggtaagggccaatacactgtttctcaaagcaagcaatactaggatattctaggtatacacactgagtactgagattatttgtgtctctaaaacccagtatctttgtctaactccacaggtgatctcacttgaccttcgctctcagtttccaaggggcagggattccgaggactttaatgtaaaagaggaggctaatgctgctgctgaagagatccgttatacccacattctcaatcgggtactccctccagacatccgtatattggcctgggccyctgtagaaccaagcttcagtgctaggttcagctgccttgagcggacttaccgctattttttccctcgtgctgatttagatattgtaaccatggattatgcagctcagaagtatgttggcacccatgatttcaggaacttgtgtaaaatggatgtagccaacggtgtgattaattttcagaggactattctatctgctcaagtacagctagtgggccagagcccaggtgaggggagatggcaagaacctttccagttatgtcagtttgaagtgactggccaggcattcctttatcatcaagtccgatgtatgatggctatcctctttctgattggccaaggaatggagaagccagagattattgatgagctgctgaatatagagaaaaatccccaaaagcctcaatataggtgagttaaaaataaaaaataaatggcacatgcctgtagtcccagctactcgggacgcttgaggcacaagaattgcttgaagccaggaggcggaggttgcactgagctgagattggaccactgcattccagcatgggtgacagagggagactgtcttaaaaaaaaaaaaaaagaaatagcatatcctcctctccaccgtaactgtctaaataacgaagtcactgattctgccttcatgaagctttactctgaattgtagaatgttatgaacatgtaagagggagcagtgtattttaatttcctctcattgttctatcccatgagtaaagaggcaggtgttttgaccaggctccttaagtaaaaagacattaatttctacatcattggtgtttctgaatttatgttaagaggtattactgttaggatgtggtaaaattaaaatgaacaaactattcatattaaatcttgcttgttttatatcactgagtagtcatcctactgtacttctgaatttttcctaatttcctatttccaaaatggtaggaaagaaagaatagtcaagatttttcatttgagaacaggctgagatagataccaataattttactcatactatacaaaattgcaatgccattaacaaatttggaaaaaataccagctgtttttaattttatagcagtatgatggagccatgtcttgttagcactgacatttaccttacatagatcaggttgatctatgatttgttgcatttttcattattgtaataaaggtgttcaaggttagggatggtgagatattttctcasctattaggcaatattaacatcaatggtggcgccctacccrgctcccttaacgcaactaacccttagtttttaaagaactgttagatggatgttatgtattctcaaactttcttttctctttttctctagtatggctgtagaatttcctctagtcttatatgactgtaagtttgaaaatgtcaagtggatctatgaccaggaggctcaggagttcaatattacccacctacaacaactgtgggctaatcatgctgtcaaaactcacatgttgtatagtatgctacaaggactggacactgttccagtaccctgtggaataggaccaaagatggatggaatgacagaatggggaaatgttaagccctctgtcataaagcagaccagtgcctttgtagaaggagtgaagatgcgcacatataagcccctcatggaccgtcctaaatgccaaggactggaatcccggatccagcattttgtacgtaggggacgaattgagcacccacatttattccatgaggaagaaacaaaagccaaaagggactgtaatgacacactagaggaagasaatactaatttggagacaccaacgaagagggtctgtgttgacacagaaattaaaagcatcatttaaccatagacaatttgccaggatctaggaaccacctaatggtaggtggacagaaaaggraaaaaaaaaaaatttacttgcaagtactaggaattcagatgatcagctcttaaaagaaaaaaaaaagcaaaaagactaaagccctattaaggaagttattgctttaataagaaatttcaaatattctcttatcccggtccaaaaggattaagcgattaaagaacgtaaaatggagatgtatttacatacacctggaaacctgtgccttgtattcaaattcattaaagcctaatcctgcaagtatctgatttgttgtgtttttctctccaaagcagataagatattcactactcatctgaattttcataaagtgctgcatctgagtgtcttattttctaagacagaatttaagaatattaaattcatttaattaaagattggataaattggtttaatgccaggcacaaagttacctacctggaataaagcacagtaccttatcttacaaagcatataaatctagtgcagaggttggtaaatgttttctgtgaaggattaatgagtaaatgttttaggctgtgtcaacaacaaatggcctctattgcatacatgtttttacaatcctttacaaatctaaaaagcactcttagttcatgggccatggtgtttgccaagccttgggctagtgactataggcaagttcttatagaggagatattgaagctagatcttgcagaacaagtgggagccagttaaaatgaggataaagaaccactttaaatgtgtctaagtcagaagatccagtttgtataaagggttagagatgacaacatatgcattcaggcagctcaattctttaatacggcttgagagtgacaagaacatagtttaaaaaggtaagcacaggtcacatttgtagagcaaagacattccttaaaaagcttagattttgcagggccactgaaaaaatttacatgcccgatagaattgtgtggcaaaaatattgctctgagtattctgtggatgggaagagggcaagattggaggcactgtgaccaattagggggctgctggagtaatggaggcaatagatgatgaaaatggcctagaagagatttttagtgaggcaaatggacagaagtagatgaatttaagattaagaaagtagaaacaacaggactcagtgaataaatatgctgttcaaaactagggaggctttctagataactcctaagtttcagatgtgagcaaaatgagtggctggtagtaccacatactgagagaggaaaaatgagatagagctttgcttgttctcaaagttaataagtgatcctcaaaatattacttgtgaacaccagtatttattcaaaagaactcagagttgtcttaaatacattatcctttgcaaccataaaaataataaacatcaaagtttgaactcagaccttcttcctcaataataattttcattactaaagtgagtgttcaccacatttggaatttttacaaatgccacctcagagaatgagtaattttgcaaacttacatttgaaggcttcttgtttattttacctatgatgactgtcttgacttatgtagtcactaaattcttactcttctagattggatagtataatctagtcaaccttgaaagattttacttaagatctaagaccctgatcctctaatttacaattctaccatgtttatgagatccaaagttttacttaccaaccaataattagttttttcctacccatgttcaagacttcaggtatacaaatatgttttctatcctcaagctgctagtgcaaataacacatgggacaattaaaaacaatactaatatataaatcataaactaatgctgcataattgctacagaaggggggtggaccacagaaatagacttcactgaaacagttccagatttaggaagtaaaatagcatacaaaaggtgaggtgaccctgtagtactaaaaagtacattataatagctgttatatcctagcagacagggaaccagaaaataccccattttagagatggggaattagtggtacaaattacttaagatttattcaaaattgcccattgtatgatccaagtcttctggatttgaatcattatcactgctttttgggacccagtctatcaacacttcattatgtcctgagtattcttaaaatataattactttggcctttacttttgatttaaagatcctctttttcatgtaatcaatgatcatggtggaataacttaaatatgtaagtgcaaaccaaggttttttttttttttttttcaatttcttaccttatttcaatgtatcttgattggtatttacattcaagtaaaaaaaaaacctagaaaagaagaatagagtttaaaaaaattaactctgaagcagtgatacatggaacaaaatgcactaaccataagtcattgttaggatactgtgtagaagcaaaggaatcagaagatcagggtcttagatcttaagtaaaatcccttcaagtctggctagattatattatccaatctagaagagtaagaatttagtgactacatttttggtagttgccatagaaaaagtcaagacagtcatcacaggtggaacaaatgggaagcccccaaatgcaactttgcaaaagtacttgctctcttagacagcatttgtacaaatccgaagtctctggcccatggtaaggactaaataaatgttggaataaaggaactatttaggttgtgaaatttaaatgacactttttatatatttatacataaataacgatttgtgagactctgggctaggaggatttttggcagtaaagccaagagttagtttttttttttaatggcatgtgtcctactatacagtgattaatgtgttatttcctctgcatttcaactgtgtcacactcctatttttttccttgaacatatgaagatgatgtttgcaaacaataaataaaatagaaactttaataaggtccataggtaactgtcagttccttctctttctaatataaaagatcgaacaatcctttctctttagagggaaactttcacataaaagctagagcaacttgtattctgtaaacacagacaacattgaccgaaatacctaaccatatcttctcttcaaaagtcttagtgactcagcatcctagggttagctagttacaatcaaaaggatttcaagggtagaaggggcaaagacttcaaaatgagataaagggactgggtcagtagactgctatagggaggctattgcagagttataacaaatttctccacctctggggaggtaagcaagcagcttaaagaatcacagtattaaaacaaaacaaaacatcctaccacaaaggcaaacaataccataatgaaggcaaaagagacaacaaactgggagaaatacttgtaacacgtttaaaaatcagtaatttgaattcctcttagaaagctattaaagggtacacatatcagtaagataggggagaaaagacagatgccgtaccaaacgaataataactaacaaacagctgggcgcagtggctcatgcctgtaattccagcactttggaggctgaggtgggaggatcgcttgaggctgtgaaggagttcaagaccagcctgtgcaacacagcaagacccccatctctcaaaaaaaaagaaaaaagattagctaggcgtggtggcataaacctgtagtctcagtactatgggggctgaagcaagaggaccgcttgaaccctggagtttgaggctgcactgagctatgatctggccactgcactccagcctgggcacaaagccaacgtctgtttctaaacagcaacaaaaattaataaacagaaaacatgttcaatttcagtaatgtgtataaaagcattaagacatcatttcagattgataagattttttcagtacccggtgctggcaagtgtgtgaagaaataaaaacaagcatccttattatgccctgtgtgttggggataatccgtttttccagagggcagtttggcattattattattgttgttgttttttgagacgagtctctctctgtcgcccaggctggagttgcggtggcctgatctcggctcaccgcaacctctgcctctcaggttcaagcgattctcctgcctcagcctcccgagtagctgggatcacaggcacctgccaccacgcccggctaatttttcttctatttttagtagagacttggtttcaccatgttggccaggctggtttcaaactcccaatctcaagtgatccgcccgcctccgcctcccaaagtgcttgggattacaggtgtgagccaccgcgcccggcccagtttggcattttgaatcagaatttaaactgtaccacaacttctaagtcataatccacttccaggaatttattccaaggacataaattggacaagaatgcaaacatgtatacatacaagtgaccactaccataccattttatgattatgaagagactggaaacaaatgtacattagtaggggactggttaaataatatatgatacaatacagccatagcaacaaacgccacgcatccattaaaaatggtaatgcgtatcgacactgacagagaaatgtgttcccaatttattactgactcaataatgtataatctgcttaactgacgttcttttaaattaacatactttattatatttgtaacatgcaattatttaaaacacattttataaggaaatcacataaatataaggtatatattatgaatatatctgaagtaaacctaaatgtgaacagtgtttgatggttatctgtgactgatgaaatttcgagtattttctttcttctttacacgtactaaatgttgctcggattgctaaaaacatgtacatactatgtttgcattcttgtccgatttatgtccttggaataaactcctggaattggattatgacttagaagttatggtactacttgaattctgatttatgtttttcttttctcttttttttttttttttttgagacaagagtcttgctcggtcgcccaggctggagtgcagtggcgcgatctcggctcactgcaacctctccctcccgggttcaagagattctcctgtctcggcctcccgaggagctgggactacaggcgcccgccaccaagcccggccaatttttgtatttttagtagagacggggtttcaccgtattggtcgggctggtctcgaactcctgacctcacgtgatccgcccacctcggcctcccaaagtgctggggtaacaggcgtgagccaccgcgcccggcctgaattctgatttataatgccaaactgccctctagaaaaacagattatccccagcacacaggccataaaggtgcttgctttcatttcttcactctctcagcagcatggggtactgaaaaatcttaccaatctaaaaagatatcttaatgtttttctttgcctgcttagtgagattgtatactgtttagaataaaaaagatttatttccatttcggggtggacaaacaccttggacggttccatgctgcagtccacaaaaggtgcagctagaaggcgacaagacacgctccgcctttcaacggcaaagctcgcagtcgccccgcctggccgtgggcgtggcttggacccaggtcgctagcggccttcgggactcccctccagccctggggccgtccccggcctccgcctggtcccaggggcgcggcccaggagctcagaaaggccaccggggcaaagaccgcggcggcggccagcgcacaccgtgacctccaggggctgcggcccgccgcgcacatcgcctgtagctyacgctgccccggccgcctccctcaggaacgcagacgttggggacggctcgccaggcaggacctggaatccacggagggaagctgccactctgcaccgtcccgacggtgggaaaaggagcgagggctcccgccgcagtgggccggcagccaccaggtccccgcgtccctccgcttccggccttcgcccggcttacccgcgtcgcggaagtccgctctctgcaccgcgtcctgccagtcgccagcagagcaccgcagattctgttagctttcgcgtaacttgcgcaggcgcactgccggcccacgcgccgagcctgcggttaaccgccgaccgctgaggtttaaatccggagagcgaaccggcacccttggcccggtccgccctccctcttattggtcctgagggtaaacgtcctccaagtctgtatcctgattggcgcacattttgtctgggccttctccgccggcgggagcatr

SEQ ID NO: 95824 - DNA, 49305 bp, Homo sapiens
tggggtcaatacctagatgatgggttgataggtgcagcaaaccaccatggcacatgtttacctgtgtaacaaacctgtacctcctgcatgtgtaccccaaaacttaaaataaaaataaaatttttttaaaaagaaaaaaacgcatatccttaaagggacttatatagagaggatataatacactctcaaaacttaacagtaaaaaatgcaaataatacaatgagaaaatggcaaaagacatacagaaacattttaccagaaaggatatacaaattgcaaataagcacatgaaaagatgttcaactcactagctattagggaaatgcagattaaaaacaatgctctctctcttcacacctatcgcaaaggtttaaaaaagaaaatgatagcactaaatgctggtgaagatacagaaaaacgaactcatacaatgctggtgagaatgccaaatgtagaccaaaccctggaaaatggtcactttcttaaaactaaacatgtacttgccatgcaactgcactctttggccattatcccagagaaataaaaacttactttcacacaaaaacctgtacaggtatattaatggtagctttattcttaatagccaaaacccatgaacaacccaaatgctcttcaagagctgaataataaagaaactgagaggtacccctataccaaggtatatactacttagcagtaacaaaaatgaaagaaatatttatacacacggtgacctgaataaaccttaggaatattatgctaagggagaaaagccaatctcaaaagtgcacatagtatatgatttcatttatagaacattcttgaaataacaaaattacagaaaggaaaacaaagtagtgtttgtccagtgttagggaggggggttgttgtgtgggtgtggctgtataagggggtaacaggggtgagctgctcagtgatgcaaccgtgtttcttgactgtagtggtggtgatgcaaatctacatatgtgacaaaatcacacacacacaggcaacgatgtcaaactggtaaaatctgaataagctctgtggattgctaatttcctggttttggcattgtactataatcgttcaagatgtcaccatcgagagaatcagggtgaaagataaatgggtcctccagaacatttgtttgcaactccttgtgagcctgtatttcaaaatagaaagcagggctgggcgtggtggctcacgcctgtaatcccagcactttgggaggccgaggtgggtggatcacctgaggtcaggagttcaagactagcctggccaacatggtgaaaccccatctccattaaaaataccaaaaaaaaaaaaaaaaattagccgggcgtggtggtgcattattgtaaccccagctactcggaaggctgaggcaggagaatcgcttgagttcaggaagcagagattgcagtgagccaagacagcgccactgcactccagcctgggtgacagagagaaacttcgtctcaaagaaaaagtccatttaggaatggacttttgacacatgcaaaaatacagaggaagctcaaaataattacaccaagtgaaagaagccagacaaaagtgagtatataatctatgattcatttaaataaatttattaaaatgccaattaagctttagtaatagaaagcagagcagtagttgcctgggactattttgggaaaattcagaggagggaatgggattcaagaaggaggaagaattttttgtggtggcctgtatgttcattaccctgccgtggtgacagcttcccaggtgcatacatgcgtcaaaagataacaaactgtatgcattaaatatatgtagtttattgaatggcaattacatttcaataaaaccaactttttaaaaaggccctcccagagaagaaattaaaaggaatgtcccacagctactttataaagcaagcgtaaccccttaataccaaaatcaaggacagtaaagaaggcaaaaatgacagcccattcttatgaagtaaatacagagatcttatataacatacattaagttgagtttatgccagaactgctaaatatttaaacattagaaaacctatcagtgcgttttgttaatctgaaatgctattgattataacacatggatgtttaatgcaacactaagcagaaaagactttccatttgaaaaaaaaaatcttctccaaacctataacagactattgattttaaggtaaatccctattttggaaatattgatatgcatgtcttagatagatgataaacagtaattaaaacaagccattggaaaatgaaatacattactcatgttttaacacggaaaaatatttgggttgtatcaatagatactaaaaaggcttaaatcaagtttaccacctattattcatggtttaaaaataggcaatttcagtgagcaagaaatagaatttcctaaatgataaagaacatctacaacaaacacttaataatgagtcattaaaaacattttctttaacacagaagtcacgataaccacactaagtcagctaaaacaaaacaagacaaagaagtcagagacattatgattgcttacttagaaaatttaggaaatttattagaaccattagaactaattagaataaatggttaaacatggtagaactaatggtgaaactacttagtataaatggttgattatcagatggatatgcaaaaattaaaaacatttccattgattagcaataaccactaagaataggcaataaaatagaagattccagtcatgatagcacagaaaataaatcatataaaataattccaaataaacacaggcaggacttctgtgtatatcaatgataacttgattgaaaggcacagcaaaaagctgaacaaatgaagaactccatcagcctaatgtctgccaagatccaacagcttaaaatgtcagctctcccaaaactcatctacaaattcaatgtcattctaatctaaatcccagcagagttttccctgaaatttgccagctgattctaatatttatgtagaaacttaatggcccaagtataacaaagatgattttgcaaaagaataagagggggacacaccgtatcagggctgggacctgaacagaggcccacccaccctgcatcccatgggatagctggcagaccccggtccagctgtgagccagggaggagagctctctgctcggccacagaatgacccagccctgggctaagtgctggcaatgcagctgctctaggcatgggtgggcacttgtagctgatgttcatttggcttgacacaggtgctgtttgattctccctccccaattaaattctgcagttccaccagtcatggacatcattttgtaaaaacaaacatgcaattaagttgctyagtgtctaagctagcttgtaatgtaaaatgggatcgtttatactggtaattctggaaggggaaaaaagagaagaattctttctgcttccagttcaggtccttatcttatttttgcacatttgctctcctctcaaatatgatgtgttccaattgccatttttcacaaggaatgagtttgagtcattaaaaagttgctcccaaacactgcagctgtggctaggggctagatagccccctcacccacccaccatgcatctgggttttgcagctactcacttacctgtgacacttgatccagctctcacccatgaatcaagggactccccaagagcctgttctcacccagagaggaccttggcagagagctgtggaccccctcaccacacacacaaggaagaaaaggaatctctttcctcactacatccaccccgggtgcctgccacctagccctgtggctcaggkttccacaaaagtgggagccactccaaacagctgccaacagctccagacaactggaaccatatcccggccatgacttggttggggcgggggagagttgccaaggtgagagaggacattttgctaagatttatgaaacgaccaaggcagtgtttaggccaaccatggaaaggaagtcttctgtagaaagttctggctccagagaaggaagacacagaaggtgtcttctatggtgacacacaacacrtggccaagcccaagcaaggcccaggggagggatcacaatacatgtctggtgttgtgggatgagttgggtattcaagcaagagggagccctaaagaggcgggagctagcagaattagtgttgctgcctctgtgaggctggttttctcccagagtaacctaaatatctggttgtcactcctgaaacaaacacacgtgcacacacacaggcatacaaacacaagcaaaccattgcaccaagtactgcagagccacacacttgctgaggaccctgcaggggagagcagtgaggggctctccccacgagccacaggtcaaagccatgtgggtagtcaactcctttcagccacgtctgctctcctggaggcctgagctctcccccaccctctctggttgggagggaaaccagcttccactcccagatcccagctccagcctgaagttcaccgccaccctcagtgggcttaccaaaggctcctgccagctgcaactaccatgccggtggtggagacgccgtcacatgtgcatccatctgggacagaagcctgtgcttggctttgctctatcaggccggaccgatgtggcaaagctgtaataactgcagcagctgcaaatgggctccaacctggagtttcagaatcaccctgctcagcagagcaacctgggagccttgctctgggggattcaataagaggtcaggagacttgccgcaaaacatttataaaatgacaggccaatcagacaatctgtgaacttcattttttcagctgctgaatggggataatgaaagctccctgccacacaccaaagggtgagtaatatgagaagaaacacacatggtccccagggagggaggggatgccagtgtcagggtcactagctccacccgcatggccgagcccatgtggatctgtaggaaacactgcctgttctgtgagacgaagccccctttgactttctcggctgcactcattttacgctcctgctcccactgctgccatattagtgggctctggctgccgtaacaaagtgtcacagacagggcagcttaaaccacagaaatgtattttttcaagctctggagcctggaagtccaaaatcaaggtgcatgtaggtttggtttctcctgaggcctccctcatctgcatggaggtggccgtctgctcactgcatcttggagtggcctctcctctgtgcctgtgcacccctggtgtctcctccccttcctatcaggactccaatcatatcagattagggcccaccctcagcctcattttaacttcatcacctctttacctaccctgtctcctaatacagtcacattctgaggttctggggkttagggcttcaacatataaacttgggggacacagtgtagcccataacaccccccattgagctctcccccttctcagttcagtataaatgcagggtggggtggcaggcactctcactaagtttcctccttccatgatctaatccagtccatggcctggcgtcccatctttaggccatgcattcggcatggagggggtagctcaggaggagctggtcacaaagggaaggaagtgcagctgcagctgcatggaatggcatcggtcaaggaggaggccctggacacttcgtggccgctgcttctcccctacgctcagtggcctcctttttggggaatcgaaagccgggggctgaactgtcctgatcagacagaagcatgagcaggactctgctgctgtattgctcagctcccagcagcctcgctgtgggcacgggcagatccagtgccttccctggggacctggagggacagctgtaaatgggaagacagcgtgaaatgttcactgtgcactaatgtgtgctaacaactttgcccagatcagcacaaaatgagaggcgacagctgtgcacaaccccacttcccaaggatgttggtgacatcacacccatcatccctatccggcatcagtgccatcagctgtcctggctgtgaggagcaggccaggtgaggcagggccggcaccagagtgagtggccacagccggcaaaggcctatagaaccagcaggtccttccctcagagtcagtgtagagcatccaacacccatgcttgccactggcttttctttctacacattcaggacacccgggaagatctcctgcctagtgggaaaaaaactcactgtttccctgagacaactgggacagggtcacagcagtgcctgggccctccagctgagactgcagtcgacaagygtgagtttaaggagaggacaagcagggtccagtggaaagcctcacagagacctgggagaaggtgctgtctcaggctggcctggagaatccactrcctccacaagcrtgccctgcttggcgaccggccgcctaggaggaggccctggggtttctccagagctyctcacaagctgagttcagggtggaaatccctgctacagcatcctaatcatccagattcttgaacactcattcaacccaggtagtccaatctgcaaagggacagtttatgagaaaggcctttcttcatttgagcccataactgctgtacactgctatgtgtgtgtgygtgtgaacctgcaggtaataggcagcaccgtgtgaagtatgtatacccctgctcagccgttccacagacacctatccttcagaaatacccacagcagtgtgaaaaacagcagtgtgccaggatgctcactggggaatagtaatgatgcaattattgcattaggcaggatgcactgggactgtccagatgaccatgtcacagggtgtggtggcgattccagggtcaaacgatggattgtatgtgaygaccttggagattattccagttgtaggcacttgactgttcagctatmggaagctttggtctcactgtcttctatctcactgtctcttccttgcttatgtccccactcccactcccactggcacaggctatggagaaggggacaggcattggtgagcacccagagcctctgggcctcccccagtcactctgcagggagggaacccaatatgccccattgagctctcttcttggaagacccygcgaatctgccaaagcacgcgctctcctgcaggcaggaaacctacagagctgccgtgggggcacatcacatctgcccacccagggcaggtaaggcagcaatggcctgagggctaccaggaatggagctggcaggtggcagggcctccagtctctccccagagcacagcacaagtgtggttatggaggagcagagaccacagcaaggccctaatggaaacaataagggtcagtctggggccgagtgccaaccttgcagagtgaagtctgaagcatggataggagggaagctggaatgttccccaagccagtgctgaagcccagaaccaagaggaagaagagaaaaggaggccagatcatgcagtagcagcagtttctaygtcttcaggcagtgcagaaccactgagaacagtgagaaaaattgatagaccatctacttattgactttttgcaggtgagaatttatgccctcatttgccagacattttattcaatctaaagtttcctccctcctctcggggtctttggaagtggtgtgttcaaccagaggagcagtctaccagttattttctatgcatttgtgaaagttacagacaccaggatgaaatcactcttgtcagacagacccagacaaaacaggrcaaactagacatgaaggagggtgctcatgcttgcctgtataaraacagtttccaaggactttctcaaaccccacaagaaaacccttcacatctttcatgcatctcccactctgcatggcttgcacatttcacgtgcatgcgtatatttctacgataaggtttatcactggacattctttgggacggcagcaattcagataaaatgcccttgagagagcacctgcccagtaacaacacctccaccaacggactgatgccagtgctgactttgggcctccagaactagtgaaatctatttcccagcagcttaagtgaattcctcccttttggccaaaaaagcktcctcttactggtcgtcactggtcacacctatggcttgccatggtatattccagattgtaatcctcttttctatttatcaataaatttaacacatttggagattcttttctggtattctttttataggttgacacattcaactgaactttgctgagttcccgttcatgctggagacataacagcaagcatctttcccctcaggctgctccttgctgggatggttgaggaagggcaaacgaggaaatacacctgcacaataaggtatgctcagtgccaggatagtgtcaggtcaggtgctttggttgtactaagaagggtcacccacccagtcacaggagtctgtggccattcttggaaggaatgacagtcaagtcagggcccaaaaaatgagcagaagtgaacttggctgggaaccaggatggkcccaagaagagatgaggagtcagcagaccattgcaggcacacagcagaggggcaggtgcacacgaagtcaggtarcaagaataagaaygtaggtgcttgtgaaacctcagcacatcagtgtgatggagccaaaaacgggcagagaactggatggggcacgttaggaatgtggacattttatgaaaggcagtagaaacctagagagtgacacaattaggtgactcctctctctttcagggtcctagctgcctgtttgttgcttctgtcctgaagctctgggtacaacagcaagacccagataaatcgaggcctgcatgggaatgcttttctaagggtttcctaggcaggtgtgtgaggctcaggccagcctggctctcctatggtttaataatgtagatgaaggtttgctccaggagtgctgaatgaagcagtgtcttgaaaccactgttgggtttccttggatgggttttcatcttaataaccattgtgcatacacattcagcctcagagttccctttgccattactatagggacctcagggaggacaaagcagggagagaagaaatggctctgcaaagtagccaaggctttcacggtagtgagcatgaaaggagaaagaccagtcggctccctgaagctccattttatcccgggctttcttgttgagaactgggtgggaacaagtttgcctaaagctgctgtgaggtttagcatatacaagtctccttgcagtggaatcagggcaaaggatctctttccctaaacctccttcttggtttaggaatgaatgtgctctcagccactgggtagtccttggcttcctagatgtggctcagagaacagccagaacaggctgtgaaggcagagcgtccccattccacaggagcagggcctccatccagggacagtcgctgccttgggcctgtgccactgggtctgggttctgccctttgtggtgatggaggttgtgctggatggtccacagttttctcctaagaatagaattctgggcatggggtccgggcacagtggatcacgcctataatcccagcactttggaaggcccaggtgggtggatcacttgagattgggagttcaagaccagcctggccaacatggtgaaaccccgtcactactaaaaatacaaaaattagctgggcatgatggtgcatgcctgtaatcccagctacttaggaggctgaggcaggagaattgcttgaacccaggaggcagaggttgcagtgagctgagatcgtaccattgcactccagctctgggcgacagagcaagactccatctcaggggaaaaaaaaaaaattctgggcgtggggtctactcacrgctggtgtgttggaaatagtccataacctcccgcaatgcactccytacctggtgggggtgaccaggtgctccccatgtcccacaccacccctctgaaaatgcaggagagctaagcaggggagatgttaggacccctccttaccagcactggtggatccacctgcctgaaatcaggttgatactccagtgctcttctggtgggggccagaactgaattcagacctcaagttctaggcaccataacagcccaggaccttggggacacacttacctacaggaaccaagaaaccctctgatccccagagttcataccataaatttactcagaagacctgcagggctgagcccaagtccagggtagccaccgccacgtgcatttcacctccttaccttgggtttcaccactgtcttccctgtttctttcccttgctacctggaatccattcccaaataagctagctgcatgtgggtttttgtttcagattatacctctactttttgaaaatgtcagttacttctacctaggttttagaattgagacaaaattctacgagccttagatggaagaactgaaacccccagccgaccacagcctgggcgcatttccctggctttgcctgatgcaagtttccagtcatcgcacaactgtgtagctggtaaagcagcccaacccctcaatgacttatatagatggtgttcctcttttccatgagcagcagtggtgacttctcagagactttgagaggcctgaagtatatcatgtactggttcacattttctgggccttctctgtgcaaatctacattgtggatggaaatggtggacagaactaagtaccactcctgaagaaacccatcctcgtgtctcagagggcaaagccagggccacattcaggctcatgccctcctcaagcccatagtgcacctcacccggctgaccttcacttcctgctgctccctctgttcattccctcagctccctcccactgtgggttttgccagttacttccacactgacgcccccaccccaccagtccacatgtgacggccatccaggcctcccactatccttcccttcctagccaggaccctgccctcttctccaggtccctgccattccctgacaacattgtggggaaggattccccaggctggccctctccaccctgcacacaggctccgccccaaggccaggatggaagtttcattgatgtggtcacatggtcccaagtgatcagccctctgggcctcccctacccccacgcctcatgcacaccgccaccctcaagagtgggaagccagggaaccatctcaggtcatctcaggtcatgcccatcagtaccttccttcaagatgcccgcgctggctgtaggagggactttcttcttgctagagactttttcatggttcagtaagcatggccattcttgccctatgatgacatccttggatgagtgctatgatcaatgtgacatttcaacggtgcctgactgctcactctgtggatgtggactgtggctgacccactgccaggccaacatcaaagcctactcactgctcacttctactgcgaaatggactcaacacaggccgtgcagactccggcggagcctgggcttcatctgggacagactgactgtgtggacagctgtgaggctgttatggtgaggacgtgcccctatatgcgcaggaggcgaggggccaccctgtttccaacctagacaaaagacagggcacgcgcacaaaatataaaataagagccctgttgacatcccttcagccggtcctcccagccccattgtccagaccaagcccaaggggtgggggaagcacagtgtcctcagggcagtggtctgaggtgccttctgcccctttctgggctctggggggtgctggaggcctcctcagggttgccagggctgggtgctgtgcgtgcatggctcctgggcacctgctgtggttggaatgcttgtgcccctcccaaattcatgtgggaacaatctccactgcaaaagtgtagctagatgaggccttcaggaggtgattaggtcatgcgggcttctccctgtgagtgaaatggaggccttttaaaagaggattcacacagcattggccttttacccttctatcctccacgtgggagatgcagtgctgaaggcgccgtcttgaagcagcaagcagcgctcaccagacaccaaacctgcccccagaactgtgagaaataaatgtctgttctttataaattacccagtctcaagcattttgttattgcagcacaaaacagactaagacagtgcccttaggtggcatggctgttcccatcacatcagtccccacgtggaatcctgcagcctctttctcacttcccaccagacagattgacttgagcacacaggacacaacattgactgaaaaaacaaatagctgagtgttgtaatggagttcaggctgtgcartgcactgcaaataatttaaaacctgcactcgaggcccggccttcataagtcattttgcccagctcaggctggggctgctctcctgccgtctggcgtggtctctcagcctcctgaatcagtgagactcggtgctacagattaaggaggctcttccctgagcacccagcagactgtgggcaaacccactcccatgtcctcattcgtagtgtgctcttctattttctcacccgtcacaattgtgtttcttcttgttttcttacttaattcctacctccttcactagagggtcctttctatgacagccatcactagagctggctgtcagtaaatacacgttgggcacatgtggcaatcagtgcccttcagtgtgccaggtgagccagtaaagaaatctgaccgatgaggccgggacaccatggaggaagccgccatcatacccagaagggaccaaaaacttaactgagaaggtgacccttcactcgactcttcccagaagaaggtaagcatctgccacatggcgccggcagaggaggggaggaagagagacgctgagagctggggccgtcctcgcaggtggaggcctgcgtgtggtctggcccacaggagcgtgtccaccatggtggggagggtgaggggttggctgaacacaaggtgcgagggccttgtcctccagcagagtctgcaattccagctgcacattagaatcatttggcgaacttgggaagctcagactccctgatgccaatccatcacatcagggtttctaggagtggggctagctcrgtatttttaaggccaagtgattctaaagggcagccagggttgggctaatgggttttaattgagaagtggcgccatttgatttgtagctaggcagagtcacttggacggggccaaggggagagcagagacttgaggctggacaccaatttctgaaagcggcatttctggaaactacaaaaataatctaagagacagggagtgagcagttagaatgagaaacagacttgaggaagtagaatctcctggggtggtgacaggtgatgagatggggctggcaagagaggaacgggacttcagagcactgcccaggtttttcccttaaatggccagaagaagagtagcatcattcattgggatagtgcaggacaagggaaagttccggagaagctgggatggctctacctggtgcaggctgattggaggcgtcctgggtggcctgcaggagatgcctggaggtggtgggccacgtgagaaagaaggcttaacacacacgttttgattaggttcacgttaaattgaattagttcaggaagtagaggaaacattatctttgggccaaaaatcccagctcggacatggataagacaggcactttctggagaggtaccagagtccagctcgattctgagggacttggcctggggagtcacccacagcaccaaataacagggacaaaacagcagggtccactggacgggtgaggaatcagagctggggcagacagcactggtgctaagtctggggaagcactgtcctggggcgcagcggggctctgtctctgaggcagcatgctgggcaggtgccctccaggccagatgcaatttggagggccctgtgctctctggctctaaaaagagagactccatgtccacacttctgtaaaggctcagcagtttttctttttgatgtagggtgggaaatcaagcaaccaaggctatagaatagcattgagaacagaagcaactagattggaggggaaaaaattctattctctgactggtgagtaaaacgcatgaaatagagtgcatggttattcttgtggctttcctaccttaagggttttgttgctgctgtcctgatcttcaatgatttaaagagctgagagatcatgtgacatccaaataagtatgatgtttttagctgtttgggccataggctgacagctgcccaaaagaccactaaaaactggtgactgagggctggacatggtggctcacacctgcaatcccagcactttgggaggctgaggcgggtggatcacttgagtccaagagtatgaaaccagcctgggcagcatggcaagatcctatctctgcaaaaacaattagccaggcacggtggtgcacatctgtagtcccagctactagggaggctgagttgggaggatcatctgagctcaggaagtcgaggctgcagtgagctgtgatcatgctgctgcactccagcttgagcaacagagtgagaccctgtctcaaaaaaataaaaataagaaagctgactgggtaaggctgagtttatcaaattattgcattaaggaagaatactaccttgacagaattcyagcaacatctcaaaaaggagacccctaggaggatatctgtaggattttagggtatgagccagattactttaagcctggccttttgaggaaagaaatagactaggattggaaaggatttttgcataacagattaggatccatggacacagacaggtgagggtcttgaagtgagtactgatgtatccagcagttagtttggcaaggaagctgttgtatttgcctcccagtcttacctttcaggaacaagtgagtgctttccaaagcaaagtagctatgttatttttgcttggtccaatatcctttagtataggcaataggaaagatgtacgtgacagttttcagataccatatctaactttctaagaacttttcttcaaataattaagatgaaattaggaatgctttcraagtgaaatgcattcttccaggtaacacatggttccctggaacacattcttccaggtaacatatgctygaaagcccttcacatccaccctgtgggttaaacaaggctgatgtcttaaactattttgattttgtccttttggccaaagaagccatacagacttgggtaaatctgtcaaaggtcaagagtctggtaaggaatgaggccagtactgaagccaaagtgtgctgatttttaagtcgctgatacctctagccacgcgccacttkgtgtaagcgctatctcttgaataaatcacattttcacaaaatcaagatgtagcttattgtgcaacttcccagcactaggcatgatgctagaggctggttaaaaagagagcatagttctgtgtctcaagaagctaggaatctagtggggacaaaagaatgacagtacttgtaacgtgttcaaaaatgggcttttactagacagggtragtgtccatttgatattttgtttttgttttgtgtgtttcttttgtggggagaaggggatggttgtggggtccagcaaagaggagaagtagggaaaatttaatagaggtttcagctggaacagatccttagaggatgcctggagtttttcaaatgaagaaggcagagaccgagtgcagaggcagagtgtactggcacgttcggggcaccacagagagttcaggagtgatctgcttcacttctatagataaagttccctaatcagctccccagctgtgcagggaggcactcactagctcccttgccaagaatgccrtctctactccttgtgcccggtgagtagaggatgattcatgtgaatcctggcatcactgcagaaggattgcagaaccatagccctgtggagcccagagcaaagtggtctttgggtatcatgtctgccatgaggtttagaaggagaggctgggtttaattgagcttgaacttaatgcttgagaagccagcacatagcagggaataagaaagtctaaaatctgaagatttagcacaatgtgagggatcaatgggagagaggcttcccaatttgggtagaggattgcagaactggagcaggggctgctgccacatgtgttctgaacccagcaagctctagacaccaaccagtaagcaggccctggatcctgctaatcatttggatgtgaaatatatcacagaatcaaaatgactttccctcaaaatgcatgctgctttaggcatgctaaatgttgtaccgaacgctggcatacataattcatgtgtcatttaccgtgcccacactctcgagtggaatgcataccaatgaggctgcatgggctgctacttgcctcggcttagctgattttagggatgttcaagtggaattagagcagctctttagaatgctacctcacctaatggggtctgagaagggagcaatgcaggagggggcaatgtacaagcacattccaggaagccctgctgagaaacttgcctataagagttggccaacatgaaatatgcttatgtgagggaggaggcagatgaagaggaagatgaggagaaaacagaatcaacgtgatagtttgtttcatgatctgcaaggactgagtctcagactaaatctctactcctggggtcattgaataacaagaacaccaataataccaacaatcattcatcagatttctaccacgtgccaagtataacatcagcctttcaaartaggtagagattgttctccccacttatagatgggattacaaatgctaagaaagatcaaataacttgtcaatgtacctacagtccatggcaggaatttcaggcctcacacacaatacactgggcttataggaaaggggcttgagtcctttttcctgctggtttctgaggccaaggtatctgcatgtgcttattccattgcacatccaggtgccatataccgttctaacccttttgtgagaagtatcttgtttaattttcaaaagaacattatgaaacataccaagtttacagatgaaagatttgactattagggaatttaaaaatgtaccccaccccagtacatatggtaaaagtcaggcttctatgctacattatttaacttgaagtctatgtctatactaccacatggacagtgaattgtgaagaagctcatttgaaggaaggttatcagcctggcatagtggctcatgcctgtaatctcagcactttgggaggctaaggttggaggttcatttgagtccaggagttcaagacctggacaacatagggagatttcatctctacagaaaatttaaaaattagccaggtgtgatcccaccactgcactccagcctgagcaacagagcaagaccctatctcaaaataacataaaataaaaataaaggaaggttatcatccctgtacacattgcatcacctgggaggttttgcaatattgttttaaatatatataacataggccaggygtagtggctcacgcctgtaatcccagcactttggaaggccaagatgagtggatcacttgaggtcaggagttcaagaccagcctggtcaacatggtgaaaccctgtctctactaaaaatacaaaaaattagccaggtgtggtggtatgtgcctgtagtctcagctactcaggaggttgaggcaggagaattgcttgaactcaggaggcagaggttgcagtgagctgagatcatgtcactgcattccagcctgggtgacagagtgagactcagtcccaataaataaatatatgtgtgtgtgtgtgtgtatacacacacaaaattgtacaatttgtggcattaagtagactcacaatgttgtgcaaccattaccactatccatgttcagaactttttcattaccctaaacagaaactatacccagtaaacagtaacttccattccccttcccccaacccctggtaacctctattttactttgtttctatgaacttgcctattctatgtacctcacatcagtggaataagactatacttgtcatctttttgtatcttgcttattttacttagtataatgttttcagggtttgttcatgttgtagcttgtatcataatttcatttctttttaaggctgagtaatattccattgtatgcatacagcacattttgtttatgtgtgttgatggaccttgggttctttttgactttgggttattgtgaataatgctgctatgaacattggtgaacaagtatttagtggagaccctgctttccattttttgggtgagacacatagcagtggaattgctggatcatatagtaatcctacattgacctttctgaggaacagccaaactgctttccaccacagctgtaccattctatattcccatcagaaattcaccacagttcagatttctcctgaatgtgtttcttttttttaaataatccaaatgagtgtaaagtggcatctcattgcagttttgatttgcatttacctaatgactagtgatactgagcatgttttcatgtgcttattagccatttgtatttcttctttggagaaatatttattcaagttatttgcctattttgaattgggttgtttgggttttttattgttgaattctttatatatgctagatattaatatcttattagatatataatttacaaatattttcccattctgtgaattgccttttcaccctcttgatagtgttctctgatgcacaacaaattttaattttgatgaaatacgacttatatattgttttcttctgttgcctgagcgtttggtgtcatatccaagaaattattgccgagtccaatgtcatgaagtttttcccctatgttttcttctaagggttttataagtttagctcttatgtttaggtctctaatccattttgagttaatttttgcatatgttagaatgtaagagtccagcatcaatattttgcatgtgtatatccagttttcccagcgccagttttgataaaactgttcttttcctccattgaagagttttgatgcccttgtcaaaaatccgttgacaaggatttcttcctgggctgtctattctattacattgatctatatgcctgtacttatgccagtaatacactcttttgattacagtaggtttttaataagttttgaaataaggaagtgtgagtcttccaactttgttctttctttccaatattgttttggctgtttgggttccactgagattccatataaactttaagatgggtttttctatttctataaaaaagtgttgtttggattttgataggattgcaataaatctatacttttacttgatagtattgtcaccttaacagtaagtctttcaatccatggattgaaacacagaatgtgtttccatttatgtatgccttcctcagtttctttcagcaatgttttggccttttctgtgtgcaactctttaaccttgcttaaattgattggtacatattttattatttttaatgctacagtaaatttaattgtttttaacttccttttttggactattgattgctagtgtatagaagttgacagacttttgcatgttgattttgtatcctacaactttgcttaatttctttattagctctaatagttgctttgtggaacccttagagtctacatataagatcgtgtcatcttcaaacaaaaataattctacttcttcctttctagtttatgtgtcttttatttatttttcttgcctagttagtatacgacttccaatactctgatgaatagaaatggcaaaattgagcatgcttgttcctagttttagggaaaagctctcagtctttcatcaaggagtatgatgttagctgtgagttttcatagatggcctttaacatgttgagaaagttgccttctagtcctagtttattgaatgtaaaggaattgaattttaccaaatgccttttcagcatcaattaagataatcatgttgtttttcaccctatgttctattatgtatagttcaattccagtrtacctatatgaacatttcagaagcattaacctgttgccctgttaacttataccactgtgggaaagaagtgaacaacaagcatgcagtacttaccagcagtgtcttttgtacttagcctcacagtccccattcatttccaaagttacttaggttagcacctttttctcttacctcctttattgaggtcactttatacacttataatagatattttctttctcatagtcgactttccaccctgggatctgctgatattttaaaaattaattcctcctaaattattttttaaaaatttgtatacattaagttttactctctatgctgttaaagttctaaggtttttaaaaaatgcataatgttatgtttttascaatacagcatcatacagaatagtttctctgccctaaaaaaatcccctgtgttgcatctattcaaccctctcttctcctcaaactggtggcacccacttatctgtttactttctctatagttttrtcttttccagcatgccatataaatggaataataaagaaagtagccttttcaaagactggcttctttcacttaacaacatgcacttaacacttatctgcctctttgtatggcttgaaatcttattccttttcattgttgaatagtacatgtgtatagatagaaccacatgtatggatataccacagtctgattgtccatttacctgttgaatcttagtgctttcagtattaataaaggtgctataaatattcaagtatgggtttttgtgttttcaaatcatttaggtgaatacctaggagtgtcattgctggatcttatgataagactttgtgtagctttgtaagaaagtgccaaactgtcttccactgaggctgggcaatgaatgagagtttctgttgctctgcattctcgctagcaattagtattgtcaggttttttttttaacttatatttttagtgaacaacactaaaaacatttttctcaatgcatatagaacatttttcaggatggattatacattaggccacaaaaaagtctcaataaatttgaaaagattgaaatcatgtaaagtatattttccaattatagtagaataaaactacaaatcaatcacacaatgaatctggaaaattcacaaatttataggaattaactggcacactcttaaacaaacaataagtcaaagaagaaatcacaaaataattagaaaatacccagaggcaaataaaaataaaaacacaacaaaaacttataggatgaggtaaggcagagataagaaggaaatttacagctgtaaatgcctacactgaaaaagaagaaagatcttaaatcaataacctaactttataccttaaggaactagggaaaaagaagcaaatggaatccaaaactaacagaagaaaaaaatactagatagtagagaggagaaaaataaaatagaaatagaaaaacaacagagaaaatcaacaaaaccaaatattgattattggaaaatattaacaaagttgacaaatctttacctacattgactaaggaagaaaagagggaagactcaagctactaaaatcagtaatcaaagtgggaatcttactaccaattttatagaaataaaaataattataagagagtactatgaacaattgtacactaacaaattagataacctagacacattcctagaaacacacaacctagcaagacttactcaggaagaaggagaaaatatgaacaattcagttagcaaagagatttaatcagtactcaaaaaccagccaacaaagaaaagctgaggacaagatggtttcacaggctaagtctatcaaatatttaaaaggattaattagttaaatagtccttctcgattattatctaactcatacaaaaagttgtggaagagagaataattcttaactcattctataaggctagcattatcatgatgctaaaaccagacaaagacactacaagaaaagaaaactatataccgatataccttaagaatattgatacaaaagagcaaaccatacttgtcagtatattaagcagcatgtttaaaggattatacaccatggccaaatgtaatttattcctagagtacaaggatggttcaacatacaaaaaccaaccaatgtcgtataccacattacaggttgagtgttccttatttgaaatgtttggaaccagaagtattttgaaattttaattttttttgaattttggaatatatgccctacatttatgggtcgagatcccaaatctgaagatcaaaaattcaratgttccaatgaacattttctttgagtgtcatgttgatgataaaaaaatggagtttttaatttttggatttgtgatgcccaacctgtatcatgtaaacagatgatgaagggtgagagctaagtttgttattgttagcataggaggtgtggcaaagggcaaaagctagaataattcatacagtaatggagcataattggagacatgaggatgaatttgtgtttattttagtatacagatgaaaacatttagaaatacttgatgawatatatgtaagtgggtcagtatacatatattttcttgctctgataacgagaagacctagaagcaatgacatcccagtagcagtgagcacactcagtgaccagctcttgctttctaccaggaatcttcaaagaaaaggatgattctaggttggaggcaggagatacaccagatgagcctgggtcaccttgtagtgacagaacgtaaggaaatgcttttaaaaaatacaatgatgggggtatgtcaaaggaacccacaagacaatggaaaaagttgtcaatggccaaaggtggaacaatctgagcaacaaaataaataacatagtattggactatgacccaacatacraaataaatatctaagtatccatactgatataaataaatgattgaataaataaatgaataaatgtggaacaacaggcaaatctcttactcagaaaaattccaataatttatgtagatacttcagctcaaggagagggagtgaatataagtctccacgctttatgtatggactatggtagtgacttccttccaaagagtaacaaccatctagtaatgaggaagtaaccttacagtggagaattctcacaaatactaactcagccagatgatcaagatcaacataaacagtaagtcatgttgatagtatttatccctgatatgatgtgataagaatagcacttttgtgtttttcctcccaattatccaaaactcagtctaatcataaaaaaaaaatcagacaaattccgtttgagagaacagcctgtggcatggcaagagtgatgccatcttaaagcaaaactccacatcccaggtgctctgcagcaagatctttaaacgacatctgcagcatagataactccttataaagatgtttgtctaggccgggcgtggtggctcatgcctgtaatcccagaacttttggagactgaggccagtggatcacttgaggtcaggagttcaaggccagcttggccaacatggtgaaactctgtctctactgataatacaaaaattagccaggcgtggtggtgcacacctgtaatcccagctatagggaggctgaggcaggagaatcacttgaacctgggaggcggaacttgtagtgagctgagatcgcgccactrcactccagcctgagcaacagagcaaaactccatctaaaaaaaaaaaaagtttatctaacttccctgtggttgtgaatttatcaaggaagtctgaagacatcagcagctgcctgtgttttatcctaaaagcttgctgtataaaggatactttctggagggcaggagcggagatccaccatcttgcagctgcctgagacatggcttctgyttgtaagtctctattaagggtttctttctgagaaactggatttgtcagcttctttcttcagcttctcagttcccttagccttgtggggatatgtgtgcatagatttgatcactgcagaacatcccaattaaaggacattctacaaaagagcagaccagtattttacaacactgtcaaggtcatcaaaaacaaggaatgtgtgagaaattgtcacagtcaagaggagcctaagaagacatgacaactattatttccgaatgagattctggaacagaaaaagacactagttaaaaaccaaggagatgtaaagaaagtatggacttcagttaataatcatatatcaaatttggttcattaattgtgataaatgtaccatattaatgggagatattagtaataaaggaagctgggtatgggatagatgagaattttgcaacttttctgtaagcctgaaaccattataatgtaaactgtttacttaaatacatctgtatgcattttgggcacatacacaaaatattccagatttaaagatggagggaggtgaaaactagcagcaagcataagaatcccagaataaatagaatttcccagtattttggcctgtcctcttccccctttgtgcagatcggccatcattaccacctgtccatactcactatttgttacatgccataaacaggcaggcggaatggtcattattcctttatccagtctggtccccctgaaatatctgactttcattttaaatgcatcatcccagagcatctcaagtgattttgactgtagataaggcaaactgatgacacagatgtgtggcagctagatgccctgatggtgggctggatacaatggtgaatccatagtatgtgaaggtgcttgggccagatcaaccccagaggggtccagaggatgtttcctctccttacagagaggtgaaggattgatgtgggcctagtcttactgcttaatttcaccaactcccccaaaggtggggggacagacacagctcatgggaaggcagatgggcacaggatgttcagtgtttcccctaaattccaacaagtctcttctactaaatctgggccccacgagtgaggcccccaggataggtctaagatgccataatttcacctggtctaaagtgcattttcccttcaatcatctcttaatgtttagtaatgtaaaggcactaagaggagatttctaaacataaatgtttcaccatcaaaattttaggagaaatacaacaaattccagttcctctggtggaagttgataaccctgagaaatagcttcaactctgcttaagccattctcaaacacaatctgctccttcctcctccgcttcctccatatgtatctctattatagcacactgtcyctcagaccatgctcctggcattcagtgtcttgagggctctgatttattcactttggattcccacaccagctctgagagagtggctgctgactgtgaaggcagagtgagttaagtcctgctgcttctcaggagcttgagcctgatgctaagggatgagagtgcattgatcatgacccatgggttgtcagacagcactacaaggtgcaaatggcttgcaccagattgacttattcagtgcatatgctgtttttggcatccctgatcctgcagcacagaaatctgcagagcatctcatttcaagagacactgctgcaggatgaggccatatgacattcccagggagaggagatcgcatcaagctacagtgtgggcttatgaaaagtcccttttctccccgggcttgacaggaaggcagagttattgctaaatcagaccrtagatcaggaggctgacattcccagtgtcagcatcctgaggaataattcctactctgtagccaaagaaatgattctgttagccttttcttggagatgagacatttttaaggatttgcccaaatgcatggctgtgccattcttgccactgtgccctttgattagttcgtactcctccaccccaggtgggactctcyccttctatkagttattaagaagaatgaagcattcaaggtgttttgaagcaaactttctgtgttattactgtctctgacgagcagcattaacacagaaagcttccttccaaaagagagacatcatccccctctcaggttgaaagaaaacgtaggggcaaggaaggttttactgtcataagcagtattatctaactgaatagctgctctctttgtatcccctgtgtgcctctacataatcaatttagatttattaaatcagatacaacagtttatgtcaatgcaaagtgaacacattatttggttttgaggaggcaaagaccttccctcctggagtgtcatatctcctttgacattccattgcactctttaagaagcaatgggaaggaatgttatcgtaacaccaggggggctgtttcaaagtggcgcctgaagattttgctgtgccatttccattaacagtgatgacaggcatgtaacgaagtccctgctttctgtgctgcaaatttcctgcggagcctatggtgggagtgggaattgcggagtgagtctgacatttatcacatacaggacaatgtctcgggtgtgaatccctatcggttaaaataatttctaatgaaagcagaaagggatgatggtcaccaggctggagcttcccattctgaccttcagggatcttcagtccagagccagtttctgtcttttaaggaaaaaaaaaragagagagagagagagaaaagaccaatgcctggggctctcttcctgggctttttggggtctctactgaaggaagcctgagaacagcagggagggtgaggattcccaggaacctgcccatcacagctaatgcttccggagacaggagcctgtctgaccaggagaggaggtgaccacccactgcagtcctttgcaaccttctcatgtacctattgccaccagtgagccagccacatgctcatcacaggtgtttcctgtgtcccctcccatggtctccattctgtaatgagttctccctcctctctcgacccccatactaagtcaaaaggtctctgctttcatagtccttcttttcttttccctctagacctggctagaaaatgctttcccttttttacagatttgcaaaaaagcagtgaaagcaatcctagctagctattactttttaaggagtggaattatcaatttcactaaaagaacacattttactgccaaaataccctgaggtccagagccaagccccagctcgggacctacggagttgrgctggtgcctgggcctccctgtggactgccctttctaacatccaggaggtgctctgtgaaagcggccaccatgttggacttcaccctggaaggaaggccaagtctctgctcaaagatgccaaacattgctggggttctgctatttcacttctctgcctccaagtcctgaccttttgtggggacaagttccccttttcaaatacccccctccactctccatcatttctctttctccacctcccccagtctaggcatgtttatctcttttcacctaaggaaactgctctgcaagtattttacagacatgtgtaggatggacttaatgtcctgagtcctcaaatcttcaaagttaactttgcaaattgccattgcaaatccttgatttcaaaaggatttatttatctctgacctgaagaaagcaagttgccatctccagtgctgaagttttcatccaggaaacactgtgcatctcatggaacaagggagagctcggtccaggagcagctggactgtttgtagagaccctgactgaacaggaggagacacaatagagtgtcagcaactgaaaagtgctggagctctcaggcgctgtgctgtccctttgtttaaaagtcacagccactgtcttgtgaccccattctttggcaaggccaagacttccccagatttccccagaccttccccaaggaagggacagtttgaccagccatcactcttctgcattcctctttatttcatttgcacgtggctttctcaatataatatcattaccattgtgatggtttaaaacatggctccaaaacsctttgacattcttctccccttgaatctgggcttggtgactgcctgatcagtattatgcagaagtcatgctgagccaagatccaggtccagcccttaggaaaccggcagctcccactcctgccccaggaggttcactcttgaacccaggtaccatgtcatggggatgcacaaggcactccatggtggatggagttgacggtcagcacccacttgccagacgtgggaatgagctaccgtgggaatggatccagtggagccaccccacctaattagtgcttgattaaggttgggtgggtgagggctgggggtagaatgctaattggtaggggatttttctgagggaaatgaaaatgctgtaaacttagattgtggtgatggttgcacagttctatgaatgtactgaaagaattgcatcatacattttaaattggtggcttatatctcaacagggcaattaaaattaaaacatatatatttttaaaaggaagaagaaaagagtgaaccaaatcttaacaattgttaaattgtggtagtaggaccagagacagcttttcctattttctaaaatgaacatctcctacttttataatggggaatgcttttcttccaaagagaatccatttttactgtactcaaaaatctgaataccttttaaagtaatctacatggtaaaaacatatctaagcctgtgtatttaaagacatcaaataaatatgtatattaaatatgcacatgtataatattttttaatcaaactaggagccatcccagaatgctccttaaaaacaaacaatcaaaaagccatactcccgagcaaagtatacacactcctagaagagttgttgcttgtaggttaacaagggtgaatcccagtgccatatgaggattcctgccttgtcatgaaccactgagagttatgggtggcttttgtcatctccactgccccagcaatctttcatcaattacaaacgtgatggagaaactgatgttcccaggcttatgccaatcccctgcctaacttggtgcaagtacaagtctggggaagaaactgtcccagtgcagggttggcccatggagacagcaacaccaggaccaccatgaaattaccacgtcctggaggatgcctttgcctgaagagtctgctgttgcgtgrtcgcagcatctgcccaggccgacggagacacactgggcctctctgtccccaaacctgaacttgcccttctagggttctgtcctctaaggaaggagtgctctcaggtctagcacactcaaggacagacttacccaggctgtcattgttctgggtgcaaaaggacaaatgtgcttctcacctcgycttggttacatctttgcatgtcaggccacagcagtgacctccagggaacaatttcctgcggagtaacttgttactgagtgctgaggaggccaacattcctgcctcactcctctgctatactttagccagaataacctttcccattctagtccatggcattctagatcccaccaagtgcttttgagtaaatcactacttctatcttgaaggtctttcctcctcttttccactgggcacactcttccttcaaaatcttgtttggccaataattcctctatgaagactctcggcattttttctccagatcacatctcccagatgaaggagttgcccctcaaggcatctcccaatgtagatgtgctcggaccatactccaaaactctaacacctgccccagcatgaaactgcaacacttcctactttcattgcctgcaccgtcacacatgatgcagtcactataatgatctgtgataggcactgggccacatgcccaccatgtgtagggctccctgctagggactcattttagaaagtgggaaccgaaaacagtgtaactcccagcccccatctaaactctgctgagcatccttccctgttcctctgttaaaaaaatcatgctaaaaaaaacaagcagaagtcactcagcagcttgctccaggaaatactgactcctgggaggtaggactgtcagccggctgtcaaccaggctcactgcaggccctccacttgccatcatttcaaagccactctccttcactctgtctgatgccaatcagccccaacctgagtcctcccccattttcctctttctgctcagacttagttaagggagtgctctcccttatttcaactaggtttaacaaattagctgtacctgatcaatagtttttccagaagtcttttaagaggataatatgcaaaaaatgttcagaatcctgtccaccgtcaaatagctgttaaggggcagagctgagcgctgtcaagctcatgtctgtctgatgcagcggcaataacctttcttttaaatggacatgagtgtccctttgtgtgtttaatggcacatgcatgtgctccactgatctacatggccctggaagaccacagcagcatcmccagarcaaagtcgcactacagcgtgttcttcctgagtgtgtgcaggtgacagcagtgtgaaaatcagcctaagagtcctgggacttctgccccttgtcaaatgatcaaaaatacctctaacctattagttgttagcaaaataacccaactaatatcttgagctcttgtaatactagggaggaggatgaacacgaggatcctggaggtaccaggtccatccagcccctgctcctcaggaggtcactgagagttgaaacaggaaaactgatagaaaggaaaagttccataagagtgccagacaaggtatggtagtaattaaacgtgtgggttcagctgatgcctggtcttgccatttttttattttattttatttatttatttatttgtttatttatttattgggatggagtctcgctctgtcaccaggttggagtgcagtggcgtgatcttggctcattgcaacctccacctcctgtgttcaagcaattctcttgcctcagcttcctgagtagctgggactacaggcgcccgccaccatgtgggactaatttttgtatttctagtagagacggggtttcaacatgctggccaggatggtctccatctcttgacctcttgatccacctgcctcagcctcccaaaatgctaggattacaggcgtgagccaccgtgcccagccccttgccatttatttatttaccaggtgatttcaaatgcctgtctgtgacctttctgagattgagactgcattcttgcctgcaatacagaggtaatgacagtgcgtatctcacagagttgctgtggaaataaaatctgggaactgatatgatattcccagcaccacacatgacagagggtcgaggtatgtgatcacatgcaataaacagaaggtttatgtaagaacagtcaagcaggaaagactgctaagaagtcccacccaagtgagcctttgagtgcttgctgctccacgagcgagcatctgttaacaaagaagacagccctgctgttgatggtgttgatgagaagagctccttttgtggagggtggagctggccgtgtgggaagccctggtggtgggccaggcaggtaagggtggacaacggagatggggagggagagtcatcaggagtcctctgggtagtccagagagtgggtgaggaaggcagggaggatggaatggaaggccactgagcggcaggagtctccctatagccacaattgcttcagtaagttctaccaaactcaggggtgctctgtgacagtggagaggctctcatggaagcctgtctatagcagcctcctcccccatgggctgtccctccctgatgtcatgctcggcctaagtcaagggccttctacaaactcaggccctttcattcttcccatacagagccattttgtttcccagggttttgagcaaacatttaatagctccattctttgttcattgttcttcaaagatagagaatgaaaaacccctgctctgtggaccctccaggcctggctccattcagtcaaaacagcgtacggctgtctccagggccaggtgctggaatgcacagtgaattaggccatgtgtgcctttgctcatgggcctaagaggttaatagatggaggccgcttaaaatgcacaagatagagccatcattctctgaggggtggtgttttgtgttagaaacaggcctcctgacatttgtagggttcagggcaagaacacaaatggaggtgcaggaaccatatgtccaaatagtttaaaatgctaagtcaagttaataaattgctgagcaatttatgttctacctttcgtctttaatgagtattccttcataacaaccgggaagatgagattcaaatttaaaattcttggactcctcagagatctgagccagaagagagcagcagggtgagcaccagctatagatcctgtctgccctgaggcttaacttgactggtcctctccccacaccagcactgtcctactccatggggctgggctcatgcagggcagacacttgaatctgcctgtccaagctccaccccaccctctgcatcacttaactcctgccccagtcagggatcaggcacacacttgcacactttggtgtcagaggcaaccttcaggagggcaggcccaagcaagaggctcacctaggtcaggaaaggagtctatatctagaaggaaggatatctttattccaagcagacaaatttctttggccgacaggctccttgtaccataggaagggcacagatggcacaaggtcagtgtgcgatccccttccaaaggaatgcaagaggctcacatgacacaggtctataggcaagactcagaaaaattatggattttaagcagacaaaagcatacactacagaaaagacaccccactgaacacatggtgctgggaaaactggatagccacatgcagaagaatgaaactgcatcactacctctcaccatatacaaatgtcaactcaagatggcttaaagactcaatgtaagacctgaagccataaaaatcctaaaagaaaatctaggaaaaacacttttggacattggcctgtgtatgcaaagaatttatgactaatacccaaaaagcaaatgcaacaacaacaaaataaatgagacgattaagctaaaacgttttgcacagcaaaagaaatactcaacagagtaaatagacaacctatagaatgggagcaaatattcaaaaattgtatgtctgacaaaggatttatatccagaatctataaggaagtcaaacaaatcagcaagaaaaaaacgaataatcacaatcaacgtgagcatacctttttgaaaagtagatatacaagtgaacgacagtagtatgaaaaaattgctcagcatcactaatcatcagggaaatgcaaattaaaacaaagttaaatatcaccttaccccagtcagaatggccttattaaaaagtcaaaaaacagtagatgttggcatggatatggtgaaaagggaatgcttatacactgttggtgggaatgtaaactagtacaacctctatggaaaacagtgtggagatttttcaaagaactgaaagtagaactaccattggatccagcaatcccactactcggtacccacccaaaggaaaagaagctatcatatcaaagagacacctggacttgtatgtttattgcagcacaattcacaattgcagatgagaagataaagaaaatgtgtgtgtgtgtgtattacacacacacaatggaatactactcagtcacaaaaaagaacaaaataatgttttgtgtggcaacttggatggaaccagagaccattatcctaagtgaagtaactgaggaacagaaaccaattactgcatgttcttgcttgtaagggggagctaacctataggtatgcaatcgcatacagagtggtataatggacattggagattcaaaggggggagtgtgggagggggacaaggaacacaaaatgacctatttgatacaataaacactcttcaggtgacaggtacaccaaaagcccagactttaccactatacaattcaatttagcttgtacccctaatgctattgaaattttaaaacatttctagagttttcggcatccatttgagtttgtgcagtgtgaatgcctgctcagtccaaatgagctttgagagcaaaagccttgatctcttggagactcgatgttctcccttgggagatgacaacagtggctggtggtttctgcttagtgggctgaggggagcatttccaggagtgggatgtctaagccaggacttaaaggaagggaagtgcacacagatcctcacagcaagggtgcaggtgctaaagcaggaggtgtgttctggagcccctagtgggttggcaaagctgcctgtgcactcagggcctgcggaagagatggaaagctgcaccctaagtgggaggaaaatgcagaccatccctacagatgcttggactcctctttccatggccacatccagaacyactccttctgtgacctgctgctcaggccccagctaagtgacataatgcacattcaggtctgcttgaggagggccacatgtgatctagttcacaactattaggacttggggaccccagtccaggtccttttcactgtgccaccaactcccttctcccagctgcctcccagtcttgatgctgggacactcctcagaacatcagaaatctctgttyctccccagacaattcaagactctgcctggttttatgttgactttctttcagtatcttccaatgctgattgttccccataattctaaaatgccatcaattctatttctcatgccaaatggttctgcttggaataataatactctttaagtgcccgtgggggacattaagactataagaacagatttcattaaaagcttcattcacctgagctgaaatgaaaccaagctgacaactaagccagctaattctagttcaatctagttttgtggaaacgtcacttgtgctttcctgacttgggcagcgagttcagacagatggtaggctgagctagcgacaaaatactcctgcaagtactgatggtttccacagagcaggggtccccgcaatgccctggatacttgcagagatgctaagcttgtaaaggaacttgccctaccataggcagagggtttgatcatcagaacacacttgcaggatatacagaccagagaccatgtttgtccacccgctgtacagatgggaaagctaagcaaaaagtgattcattgagtggcctaaggtcacatgacccgcatgcagcatggggtcaactcagagccatgttctgacagtcagtgtgctttgcggccattccttttgtttccttttgggggtgtggggagaactggtagtagtgtttttattaacaaataaaaattgtatatatttatggtgtacaacatgatattttgaagtatatatacatcgtagaatgactaaactaagccagttatcatatctatcaactcacatataatttttttggtgagaacacttaaaatctactttgtagtaactttcaagtatacaatatgttgttattaactgtagtcaccatgatggactgtagatcttttgaacttatccctccagtctgactaaaattttgcaccctttcactaatatctcctcctagcctttgacaaccatcattctattttctgctcctgtgagttcatcttttcgagattctatacataagtgaggtcatgcagcatgtgtctgttcctggttcatttcacttatcataatgtcctctgagttcatccacgttgtcacagatggcaagatttccttcttttttaaggctgagtagtattttgttttgtgtttataccacattctctttctcctcccattcagtgatggacagttaggctgagtgcatatctgtttgtttgtttgtttgtttgtttgtttgtttttgagatggagtcttcctgtgtcgcccaggctggagtgcaatggtgcgatcttggctgactgcaacctccgcctcccaggttcaagcaactctcctgtgtcagcctcctgagaagctgggatcacaggcgcacgccaccatacttggctatttttttttttttgtattattagtagagacggggtttcactatgttgcccaggctgatctcaaactcctgacctcaggtaatccacccgcctcagcctctcaaagtgctgggacttcaggcatgagccacggtgcccggccagctgagtgtatatcttgggtattgtgaatggtgctgcaaccaatatgggagtgccaccatctcttcctatgctgatttcatttctttggagatataccctgtaatgggattggtagctctatttttttttttttattcgttgagccactccttttcaactctagtgaattttaagttgaacctcaagttttttgttcacatgaccacatatttacctgtgtgctattctcgctttaaatgggaagagttcgcagttttaacagccaaggcctgaggcatcaacgccatgcagccgactgcgctgctccacggcctctctcagggttctttccatacctctcccaccatagatagttgttcattcagcagataaacaccagatgcgtactgtgtgccaggcactgtgtcagcaaaatggatgtggtccgtgtacccaggaagttctagaatttggtggggcatgggcaccaagcaatcctcaaagtacaaatgcagttatacaagagagtgaactccttcccctctctgtccaaaatcacttgaaaattaagaaaaataatttaaaataaggaaaagttcctcarggggccttatttagatcacaatactacatagaaaataagggagttcttagcaaaccaaaattttttagattcctggaagatgctaaatagagaggctcatcctgagaagaaatcagagggaagagaatcttagcctaaagtgtgctggggagaaatgtggtgtcaaatctcacaaatattctgagccaagtttgtgagtcaaacaacaaggccacagcgaaccctggggtggagccataaggcttctgtgctaagccgcatggaaattcctcttcctcatgggcacatggggagaaaactcctcctagccatgctacaagggaggaccatgtgactgcttctgtgcagcagggcgtgaggagaggtgattccagcatccatgtgccagtcatgctgaggcacagaagagtgagcctgagtccccctcaccctcccacagctgcaacagtgaggccctgggttgtcatggcagagccacgagatggagccaactagatctctgcgtctgcatgggccaccgcttcccggaaaactgcatcagaatttaaatgagtgagaaataagcccttgatatgaagccacagaggtggccaggttgaatttgttcctcggcagggtagtctgttctgtctaatgcaggtatttacttgagcagatgttgagacccttttcctcctttgcaatccctcagctgcagggaccagtcatgtttgcactcaaaattaaatccaagtactattttccagagaaagaactcaatctgcctggagaagagcgctcctataaaagccgtggcttgtcagagaggccagagcagagcctgagtaacaccagctccccaggtcagagaagaggggaaagaaggccgttccaactgggaggagaatatcctgaatgagtgactctctccttgacagctgggcttttgccctgcacccacacaccctaatgcaaagttcaccaagagactgtctgaggacagctcggaactctgctgaatatgcaatatgacatcactaagactttgttccctgggaaagaaaggtcaggagtgaaatgaaatatatgtttactagataagatgtgggtaatatttccatgactttagctgcaggcatggctgtgccagaatgctgacttcatcatttccaacaattggtaaagaaaaaggaaaaaagggraaaaaaaggaaaaagatacccaggatactagaaccagccagaacagatacgtaaattggaggaagagccagtgctgttgcttctgggattctccatgactgacagtcatgggttggatctagcccagtaaagcagccaaaagtgaatcacagacctgaagggatatgtgcagctcctgggtgaaggacactggactcctttggtctgtgaagggcaaatcatacattttttgtttgtttgtttttgagacggagttttgctcttgtcgcccaggctggagtgcagtggcgcgatcttggctcactgcaacctccacctcccagattcaagcgattctcctgcctcagccccccgagtggctgggattacaggtgcctgccaccatgcccagttaatttttgtatttttagtagagacgaggtttctccatgttggtcaggctggtctcaaactcctgacctcaggtgatccacccgcctcggcctcccaaagtgctgggattacaggtgtgagcactgcacctggccaaatcgtacattttaaagaggatggacaggcagatatgagagccagttgattaccagctggtgatattgagcacgcactgagacatcacagctccctcagtcacaggagcgtgcatggcactggtctggcgagcatggcactgtgctataggagaaatgaggttaaaaaaaaaagcaggaattctggaatggtgcactgagagctagcgtaaatcagcccttccataaagcatcaaaagtactcgcaaaaattgtccgaataaacttttgtagagctctggaaattaaccatgtttgcaacaattgcaggagaatttattctagaacaccgcacctcagtcagaacagtggggcttgcggcaacataacctgccacacctcattctgcttgcccagctcagggagcctggaaagcctcacagccacagtgcctgtgaaaaccagcagccatggaaccatcggaaagggggaaattgtatttggagtgactcaaaaagtcccatcctcagagttacgtcactaattggcctgtctcacaggtctgtggaaaaatcccattcacaagccatttctcaaatcatgaatgacatgtgcttaaatgtcacagctgcctgaggctgcaatgccagctggggcaaatgagatcctggccaaatcatgaaaagggagacacagggagcaaaaggcccagcatggggccgaggatgaaggggattgaggagctctgacatattcctggggtcctggaagggcttctgtcgggggggtgctgtgaccatgcccaggtgagacctggccaaaccctgggctctcacctgcggctgcccttgaggacgcgcacaggcagttacagactgtattcatgttgccatgtgcctcagcaatcgcacagggtgcctccgcagaggggcaaaggcttatcagttcaaggaatttaaggaaacctctgttcaattattgcctgaccaccaaggtaactgagcaaagagttcgtggcttgcacactacagagaattcagactccacagaattagtgcagaaaagttacttaataaacaaacagcaataatagaaacaaaacagaaacagtagcaacaacaaactgttttttggggtgggagggggagggatctgatctccaaagttgccacattgcagtatctaaaatgtctcactttcaacaaaactatatgaaacatacaaggaaayaggacagtatgggccatcaaccgggatggggagagcagtcaacagatactttctattaggatgctgaggtttcaaaaaaaaaaaaaaaccacttaaataagctattacaactatggtcaggaaactgaaggaaaccatgtgtaaacaatagaagaaaaatatgacaatagtctcatcaaatagagattatgaatgaagagagatattatagagattattaaccaagagtgatattacaaccaaatactgaatacaaattctgaaatttgaaagtacaataactgaaataaaataatcactcgagggcctcaacaacagattgagctggagaagaaagaattgatgaacttgaagatagatcaaatgatattatacaatctaaggaagagaaagaaaaagaatgaagaagaagggacagaggatcagagacctgtggaacatcatccaccagctgtgatacacataatcagaatcccagcagggggatggataggagtgcagaaaaaatatttgaaggaatagtggccagaatctttctaatgtaatgacaaacattaatgggcatgtctaaaaagctcaatagctccaagtaagataaactcaaggagatccatatcataacacatcaaatcatcaagagaatctcaaaagagaagaaaagaggcctcctcatggacaaggcttcctcagtaagattaacagctgtctcatcgtcaaaagacatggcagctagagggaagcagatgcattattcaaagttctggggaaataagactataaaccgataattcgccattgagaaaatatatttttcaaaaaataggaaaaaaaatwagacattcgcagataaacaaaaacacaatttgtcactagccctacaaagaaataataaagggagtaattcaggctactttgaaagcatactataaagtcactcagatgtccacaaaggacacaagagcaccagcaaaatacctacattttatgtgtaaatataaagaacagcaaaaatgtatttttcagctttattgaggtatgactgaaagccaaaaattgtatatattcaaggtatacagggtgatgttttgatatatgtataccttgtgaaatgcttactacaatcaagctaatcagcacatccaccacctcacaaagttgtcttttctgagtgtgtggtgagaatacttaagatctactctcagcaaatttcaggtagacaatacattattattactataaacacccagctgtacattaggcctccagaaattattcatcttataactacaggtttataccctttgaccaacatctccccatttctaccacccccagcccctgacaaccaccattctattctattaccatgagttcgactttttaaagatttcacgtagaagtgagatcatgaagtattggtctttctgtgtctgccttattttacttagcataatatcctccatgtttatctgtgttgttacaaatggcagaatttcwttccttattaagtctgaatagaatgtatattccatacacatcacatttggctttatcaattcattcatcaactgatgcttaggctgtttccatatctgggctattgtgaatagtgctgcaatgaacaggggagtgcagacatctctttgatatcctgattttattttgtttggataaatacccaaaagtaagattcaaaatgcagaaaatcctcaacaaagtactaacaaaccaagttcaacaacacattaaaaggatcatacaccatgatcaggtaggatttattattgggatgcaaggatactttaccttaagcaaatgaacaaatgtgatatatcatattgaaataatgttaaaaaaaaaactctctcaaaaaattatrtgatcatctacgatacggaaaaatttgtgatgaaattcaacatcattcttggataaaaaaaactctcaaaaaattaggtatagaaagaatatacctcaacacaataaaggtcatatatcacaagccacatctaacatcctactctacagtgaaaatccagcagcttttcttctaagacgaggaaaaagacaaaaatgtgaactcttgccacttccattcaacgtatactggacgttctagccagagcaattaggcaagagaaagaaataaaagtcatcaagtcagagagaaagaagtaaatgtatttttcggtaattcttctcctgtctgatgtaaaagacagcagtgtgaagcaattattagaatgctgtgttgattaatttagactgcataaagatgtaattgtataacaataatagcactaagcagtagagaagaaatgaagttatacaggagcaaagtgtcaatatacaagtgaattaagttaatattaattcaggttagtttgctataaattaagatgttaattgtaatatccagggtgaccattaagactaactcaaaactcataataaaggaaacaaaaagggaattgaaatgctacattagaaaatttttacttamgacaaaaaagtcagtagggcagcaatagaaaaacgaagaaataagacacacaaaacacacatagcaaaatgataaaagtaaattttaccttatcagtaatgacattaaatgtaaatgaattaaacactctaattaaaaaacagttttacacaatgcataaaaaatgaaaacaatgtctatgtatattctttctacaagagacacactttagattaacagaaataaacagattgaaagtaaaagcatgagacataatgtaacatgccaacaataagcaaagaaagctgaaatgtctataataacaacaggcaaaatagacttcaacaaaaatgttattaaagcctttgtagatgccgctgccaccaggagccctgtactatcagccacggtcaaccccaccgtgttcttcaacattgccattgacagcgagcccttgggccacgtctccttcaagctgtttgcagacaagtttccaaagacagcagaaaacttttgkgctctgagcactggagagaaagcatttggttataagggttcctgctttcacagaattattccagggtttatgtattagggtggtgacttcacacaccataacagcactggtggcaagtccatctatggggagaaatttgatgatgaaaacttcatcctaaagcatacaggtcatggcatcttgtccatggcaaatgctggacccagcacaaatggttcccagtttttcatctgcactgccaagagtgagtggttggatggcaagcaagtggtctttggcaagatgaaagaaggcatgaatattgtggaggccacgtagcgctttgggtccaggaatggcaagaccagcaagaagatcaccattgctgactatggacatctctaataagtttgacttgtgttttatcttaaccaccagactattccttcagtagctcaggagagcacccctccaccccatttgctcacagtatcccagaatctttgtgctctagctgcagttccctttgggttccatgttttccttgttcccttccatgcatagctggattgcagacttgagttaagtttatgattatgaaataaaaactaaataacaattgtcaaaaaaagaaaaaataatcagtcaagattgattgactgaagatctaacaattacaaatatatgtgcacttaacaaacaatacaatcccaaaatacaggagaaaaaaaacctgacagaattgaagaacggcatggacaatttaagaacagatggagactccagtaatccactttcaataatagctataataactaaacataagatcagcaaagaaagacaacactgtagaggacctgaacaacattaaaaaacaaatggagctggcaaacattgacagaacattccacccaacagcagcaagatacatattgtcttcaagaacatatgagatattctccagcataaaccatatgctagtctacataaaagcctcaataaatttaaaagaactgtaattatacaagtacgttttcccaccacaagtaattaatcagaaatcaataacaggaaaatatttggtaaattcacaaacatgtggcaagtaataacatactcttaaataaccaacaaattgaacaataaatcacaaataaaattggacaatactttgaaatggatggccaatgaaagaaaaattgccaaaacttataaaatgcagctaagagagaattttatagctgtaaatgcatattaaaaaaataagagccgaatacatagaaacagagtagaatagtggttatgggagaagagaaaaatggaaagacataaatcaaagtgtataaagctgcattgatccaggatgaataagcctagaaatctgatgtacacatgagaactatagtcaataatattgtgctgcataatggaaatttgctaagaaagtacactttaggtgctcttgctacacacccacatagatcaaaaagaggtaaccttgtgtttgtgatggatatgttcatttgcttgtctgtagcaatcattttactatatatgtatgtcaaaacctcatgttgtatgccttaaatatacataataaaaaattttaaagtaagaaagaggcaaaatcaataggttaactctcaaccttaggaaaccataaaaagaagaacaaactaaacccaaagcaagcataagagggaaataataaatatgtgattgggtttaagtgaaacagagagcataaaaacagtagagaaaatcaacactatcaacaactgtacttttgaaaagataaaggttaaccattctttagcaagactgatcaagaataaagaagacaaactcaaattaatgaaattaagaataaaagagaggacatccttactgactttacagaaatttatttaaaaaacaaaaacagagattaggctaggtgcatgtggcaggtacctgtagacccagctactcaggaggctgaggtacgaagatcacttaagcccaggacatcaaaaccagcctaggcaacacagcaaaaactctgtctctaaaaaagtttagttcaataaaattttacagaaacagagattataaggaagtagtactatgaagaaatagtatgaaaaagtctctggcaaaaaaaaaaaaaggataacctataaaatgaacaaattattagaaagaattaactcacaaaactgactcaagaaaaaagagaaaatgaaataaacttacaacaagatatagaatgagtaatttaaaataccccacaaagaaaagatcatgtctagatggcttcactggttaatttaaccaacactcaaagataaattaatccccatctttcacaaactctttccaaaataagaagactctttccatctcattatatgagaccagtattactctaatatgaaaacaaaacaaagacatcacaagaaatggaagctacagaccaacgtctcatgaatatagatgcaaagaacctcaacaaaatagtagcaaaatgaatactgaaatatataaaaaaagataatcaagtgcagtttatttcagaaatgcaagtttgatataacatctgaaaagtcaatttaagaaataataagaatagaataaggacataatccatatattcatcccaatagatacataaaaatgatttaacacaatcttgttgagattaaaaagattgaacaataagaactcaaagtaacttcctcatgttgaaaaagagactctatgaaaaacctaaatctaaaaatggcaacaaggcatagatgtcccctctcactacttccacctcacactgtactggagggctaaccagggcaattgggaaagaaaatcgtaggaataaaatgcattgagattagaatggaagaagcaaagctatctctatttatagattacatgatcttgtacatagaaaaccctacagaatacacaagcacacacatacaaactttagtatacaaaagtgctacaatttaatgtaataaatggtcactgcatagtacagaatataaacattaaaagccactagaataagaataagtgtggcagcaattattgggtgaaggacctatactttaaagcatccaaatcagcttggtgctaggattgttggctgtgtttgttttgtgttgtttacagtgatgagtagaagccctgagaatttaggacacagtagaacttgagcaaagggtgttggtgggcatggggtgtgtgatgaacagagcacagggagagggtgtggaggggcatgggtctgactggaacagcagagaccaacgaaagtgtctttgtatccaaaatcccatccttggaatgcactgagacaggaagatggacagccccagggaacaggtaatttaggttgtgtccacctgcaggatgggaagcctcttactattaagatggtactctgaatacattggaaagctggggaccctggcattactgcagccatctaaaaacaaaggggaagaatccagactgagaagagccaagagaggtcccttcatgaaatggtacatgaattccaaccgaccacaccacttcctgtgctgtgaaccagtgaaatcccttattgctcaatccaatatgaatcatgtttctcttctttggagcccaaagcactctaatcgatttttaacaagaaaaataattatacagtatttcttcacaattgatatagataattttatctggtaatatgactacttcatttggtacatctgcttgtcattcatgattttagcaagatcatagatcaaataatccttttccaagtgtgatttacaaggcaacaaggaggctctcttttaattgtgctcagaccctggcatggatattagcacagaggctgaattacatatttttctaaagtaggtttataagaaggagacccacaagggatccagatgcctatattaccctccttggagattaatggatcacacaggaaaaggagattcctagggtcagacaggaaattaggcagataaaggacagaaaagggaaaaacagagagaactgagagacagagaggtgaaacagggccagaggataggacagagatgtgaaaattggatttaagggagaaatgtctatgcccacacactctgcccgaacatccacagcatattggtctttaccaacacttctaatgtaagttcctgttattgtcataaatagttgagtgaaaaaagctttgtaagacatgggtagcgtcggggaaacgtgatgaattttccatttgatggattgatctgtggtaagttaacctagactagcctatccctatctccatctgcactgcagggaagcccatacttgtggtctttgcccccagagttctgggaaaacatccggttcctaaatatcctggcccaggttctccaggagcctcgcatcagctacccacatcccagaaagctgagccacacaaggtatttgttacgtgttgggacagatgctcatgtaagaatgatagctcatcccaaaaatgacacccatgtcactgagcctcatcccttggggacacttgaggcaggggaggagcataatggaggaaagacaacatatctactcctttcacatcctctcatggcttgagaatgactccaggaaaaactgttgactatcacagataagcccgtgtcctaaaatctgagtgtttgtggtgagatgttgccatgggctgcatctgtctcagcctccacataagagaagccaaaggctttgcctcataagtttttttttttttattattatactttaaattttagggtacatgtgcacaatatgcaggttagttacatatgtatacatgtgccatgttggtgtgctgcacccattaactcgtcatttaacatattaatgctctccctcccccctccccccaccccacaataggccccggtgtgtgatgttccccttcctgtgtccacgtgttctcattgttcaattcccacctgtgagtaagaacatgcggtgtttggttttttgtccttgcaatagtttgctgagaatgatggtttccagcttcatccatgtccctacaaaggacatgaactcatccttttttatggctgcgtagtattccatggtgtatatgtgccaaattttcttaatccagtctatcattgttggacatttgggttggttccaagtctttgctattgtgaatagtgccacartaaacatccgtgtgaatgtgtctttagagcagcatgatttataatcataagttgtttttaaatgaacaattaggaaaaataaaaacagtagcaagaacagcaacagcagtgcaccctctgccattggaggcaatgtcaaagttaaatcttttttttttttttttttgagacagagtctcactctgttgcccagactggcgtgcagtggcgtgatctcagcttactgcaacctccggctcccgggttcaagagattctcctgcctcagcttcccaagtagctaggattacaggtccgcatcaccacacccggctactttttgtatttttagtagagacggggtttcaccatgttggtcaggctggtctcaaactcctgacctcgtgatctgcccgcctcagcctcccaaagtgctgggattaagttaatcatttcttaatgagcaattaggtttctagttaatgtaaaacttaataggcaacatttcctccttgagtcaataggcaccatgataaaaagacacaaaatgtgctaatgcatgcttcttacggcacatgtcaggcctgaaaacacatctcagcttatcacagacaacaggaaagaatgatggtatattcctgaacagggacctatttatgtgtctttataaaaggcacattatctgtttcaagtagctttcactgagattgaaatcactgcctttatgaataaatagtagtctcccatttcacaatccaaggcctaatctaaaccttccctttctttgggtgaactgtgtaataatgtgaattggttcgctggtactgaaagcaaagtgggagtcagacagccaggtttaagtagaggttctgccaaaccagtctgttggtgaatttggacaaatgagttcacctctgagcctcaaccacctcctttctgcaagactaggtgagtacagcgcaggcactggagcatcacacaatgtaggcatatttgatgcccaataagtgacgtctgtgacaaagatcatacaatgtgagacactccaccacagcagcaagcatggaataagctcattttatcccaaatcaacagagtccataaagccgttttcctcttctgtgctcagtttttactatacacataaaaatgtggtcttaatttagaaatttgtatgtcattaattttattgcaggaatggctaaatttggcctctgttaatagaaggcatcagcatctacatttcaaatcccaagtcaattttttcaaggttgtgcaaaacagtaatttaataattatccaccaatctgtaagcacaaagtctgcctgtagtggatgttctaatttcacttttcctcttttcatccgttgggggcaggaaaggagctcatgtgatatgtctccttgaaggcttgctgtgttggtcacgacccatcaggaagcagk

SEQ ID NO: 95825 - DNA, 76075 bp, Homo sapiens
caatgaccctcccacccaagcctttttaaaggcttttaaaaacaaaaacaaaacacttaatatctctttgttgtgggaggcaggctgattgcttgaccccaggagttcaagaccagcccgagcaacatgatgagaccccccctcaatctctcaaaaagaaagaagaaaaggtagtttcatgttaatttcaacatgcattgggaaatatctgtatatatttatataacaagttcttcaattgcttagaataaagctatttcatttttaaattataaaatggagttgaaaaatagtaaataatgtactatacccctgaggaaaccaaatatggcaaaactaatgaaggtgataaagaaattgattggaaaatagtggtcttgattttttttttttttttttttaagagatggagtctcactctgttgcccaggctggagtgcagtggcgtgatcttggctcactgcaacttccgcctcccggcttctagcaattctcctgcctcagcctcctgagtagctgggattacaggtgcacagcaccacgccagctaattttttgtattttagtagagatggggtttcactgtgttgcccaggctggtctcgaactcctgagctcaggcagtcaacctgcctcagcttcccaaagtgctaggcatgagccaccacacccagccaattcttgaagttgaaaaccagtgagggcagcaatcacttcgatgacagtagaggctggtgcagaggcatttggccttacacgcatagcaggcacaaacttcctcaatcgacaaactcaggtgggcaaaactgcagttttattttctgtaactcaatggaaaaaaaattttttttacagctctccacccttcctcctaatggcaggacatttaatctgttggttttgagagacaggaccagctggatttcctaggccgactgagaatccctaagcctagctgggaagatggccacatccacctttaaacacggggcttgcaacttagctcatacctgaccaatcaggtaataaagagagctcattaaaatgctaattaggcaaaaacaggaggtaaagaaatagccaatcatctattgcctgagagcacagcaggaggaacgacaatcgggatataaacccaggcattccagctggcaactggctacccactttgggtctcctccctttgtatgggagctctgttttcactctactaaatcttgcaactggtggggcacggtggcttacgcctgtaatcccagcactttgggagcctgaggcgggcagatcacgaggtcaggagatcgagaccatcctggctgacatggtgaaacccagtcactaataaaaatacaaaaaaattagctgggcatggtggcgggctcctgtagtcccagctactcgggaggctgagttggagaatggtgtgaacctgaggaggtggagcttgcagtgagcctaggtcacaccactgcactccagcctgggcgacagagcaagactccatctcaaaaaaaaaaaaaaaaaaatcttgcaattctcttctggtccatgtttgttaccgctcgagctgagcttttgctcgccgtccaccactgctgtttgccgctgtcgcagacccgctgctgactgccatccgtctggatccggcagggtgtccactgtgctcctgatccaatgaggcacccattgccgctcccgatccggctaaaggcttgccattgttcctgcacagctaggtgcccgggtttgtcctaatccagctgaacgctagtcactgggttccacggttctcttccgtgatccacggcttctaatagagcgataacactcaccacatggcccaagattccattccttggaatccatgaggccaagaaccccaggtcagagaacacaaggcttgccaccatcttggaagcggcccgccaccatcttgggagctctgggagcaaggaccccccgacccaataagagtttcgcaaaaactctgtcattttcaagtttaaacttagtcaagtcctagcgtcccatttctaggaatttatcctagagatagactagctcaagtacgaaccacgcaaggataagattattcatcacagcttcatctgtaacagcaaaagactgaaaacaacctaaatgttcatcctacagagctgttgaaatgcatctcgggccagcccttccatggaatgctgtacctaccccacaaaaagagaaccaggaagttctccaggcaaaaatatgaaaagttctccagcaaatgttgtcaagtataagaagatacgaaactgtgtatgccatatgttagcatttgtatatatccaagatatttttagaatgatgcaaaaaagaaatttttaacagtggtggctctggagaaaagaaatgagtgaaggatggtggggagagggacagaaaagtgggaggaaaatttaatttttactatgaagccctttgtactttttaaaacattgtattgaggtgaaattcacataacattaaattcaccattttaaagtgtaggattcatggctgggcatggtggctcacacctataatcccagtaccttgggaggctgagacaggaggatcctttgaggctaggagttcaagactagcctgggaaacatagcaagaccttgtctctccaaaaaaaatttaaaaattagccaggcatggtgatacatgcctgtagccccagccactcaggaggctgaggtgggaggatcactggagcctgggagtttgaggctgcagcgagctacggtcgcaccactgcgttccagcctaagcaacagaatgagatcctgtctcaaaaaaaaaaaaaaagtgtacaattcagtggcatttagtacattcacggtgctgtgcaaccatcatctctatctagattcaaaacatgttcatcaccccaaaaggagaccccatacccatcaagcagttagtcccctttgtacattttcatgttccactgtatcaatcagggttctttctgcaagagatggccccttaaaagtggcaggtgaagaaaatgaagggacaggtgaggacagtgttaagggagccacaggggatggtgaggcagctgcagggaggtagacacttctgacctgaaggagctggggaggaactgttccccctgaggccagagctggctggaggggctgctgctgccaaaagtgtggccagccgggagggaaggagaggaataaaaactccaacctttctttctctctaccttctgctgtcctgccaccacctggcattggcctgacaaccagaggccagaggccgggagcccaagggaggctcacacagggcagctctggggacrgaaccaggggagagagtagagagggaatctggacataactggcatattgcttgtatttatttttcaaaatgaaatgaaccatttaaaaagttcagccaaatcagactccactacagcctgaccttttcagcaccatgtcccagccttgagcttctgttgatatattgcctttgtcctggttcccaggtggggtcagccctcctcgcagtgactgcagaatgaccttgttcctatcagcctctgttgccagcccaccaactttctcctccagcagccacctgaccctcagttcactgcctgccctggcgagagggtgtgccgggcctttttgcttttggttccttgaagccatcttttctctgtggcctgcgctgagcactctggggccctgtcgctttcttgggccacctcaggtccctgatatgctcagacctggaagatctgcccaagggaggtcttcttaaggccctccccagggccttgcttctgtttggactctcttccccttcctggttccctggatctataagaatctgagggatggggaaggaaggggagttgggaatgaacaacttacacatttttccgaaccttcccaggctttcatattgaccaaggcttttgaacttcagagctgagcattctatgtctttttctctgattatgattctcctcgggtggggagacactgacttgtcacttacagtggtgactcattcgatccctccaatcagcccatgggcaaaggactccccatcaccttctcacgtccagttggagctggtggccactttggcccacctcaggccatcaccctcatgattcaagcagttaaaactgaggccaggagagggccgagatctgcccaagatcgtggttgagggcgtgtcagtgggagattcaggccttgcagctagaccccagacgacctgctcagtgtaccttcaacagcattaggaaggcagcatttgggggcctgtggcctgtgccctgagtttgttagaaggcagcccagctttttctcagtcacctgccttcaccagacagcatcacctgtggcccaactggacctatttcttcttggggacatctcataggtatccccactaacacctcctgtacacaatgtatatggattttaattgcgtcccccagcaaattcatgtctacccagagcctcagaatgtgatcttgtttgaaaatagggtctctgcagatatagttaagatgaggttctttggcatcagggaaggccctactccaatgactggtgtccatgtaagaagagaaaataggaacatagactgctatggtgggaaaattcccaacaaatttcatatgttggaaacttaacctcaaaattcatatgttgattggaagtggagcccttgggaggtaattaggattaggcaaggtcatcagggcggggtcccatgttgaaactggaaactttataagagaagaaagacctgagctggcaccacgctcttgccctctcaccatgtgatgccctccacgttatgatgtagcaagaaagccctcaccagatgctggcaccttaatattggacttccagcctctagagctttaagaaatcaatttctttgtgtgtgtgtgtgtgtgtgtgtgtgtgtgtgtgttttggtgtttttttaaaatttgtttgtttaattttgaggcagggtctcactctggttgcccaggctggagtgcagtggtgcaatcatggctcactacagtctcaacctcccaggcttgagtgatcatcccacctcagcctcccaagtggctgggaccacaggtgcacaccacggcgtggcacccagctaattctgttttattttttgaagagacaaagtcttactatgttgcccaggatggtcttgaactcctacgctcaagcaatcctcccaccttggcttcccaaagtgctgggattaaaggcatgagcctccgcacccgacctattttcgttatgaattacccagtctgaggtattcagtgatagcaacagaaaatgtactaaggcatagacacagaggaaagacagccacgtgaggacagaggcagaggctggagagatgcacatgcaagccaaggaacacccaggatggccagtgacccccagcagctgggagagaagcaaagaaagagtctgcccacagcccccagagggagtgtggccctgcgcacatcttcatttccaacttctggcctccagagccgtgggagaatacatttctgttgtttgaagctatccagtttgtggaactttgttacagcagccctggggaatgaatacatggtcttagaggggagacttttggtattcagaaaaaggccttgtcctgtgtgaatttcccatctctttatggctgcctgaaacccccccgccccccttaacatgcttctttcctttagaagaagggacagatccaggcttctattcatgtgtccctggaaagtcacattcctcggttgcctctatcatgtcttcagtgcaactgcttctatagaccatgtggcgtggtctcagtgttggaaatgtctccttccttcccccggggtgggctccctccttgggtctccagcctccatgcaggacctgggggagggggactgagtgggtgagatccctcccagggcagcattcggcagaccgcaagtcaaggttgcagagtgtrtgcagccaggggtagcagccacttcaggatctgggtctggatttgtgctgagaaccactatgaccttttaaagccagtgaggaggttttctgggggcccagaagccctgagcccattggccagacctcctgggagaagcggagcggatttgcatcaaaaagaacactggcttcattgaaattctcctcatcttgagagaaacaaaaccacaaagaaaaggaaagttttaattctgagaaacttcactraggagcaattttttttgagcttctaaaaatagagaggaaatgagcctctttgggtcactctagttgccgcctcccctgccccatgcccacccccactgctcactcaaggctagcctctctcagtgggtgactgagctgtcttcagtggargcccgaggcagatgccacgcaattctggagctggatacggctgcccacacggggaccccagcatgctggacagcagagagaccccacaggagagccggcaggacatgattgtgaggaccacccaagaaaaattgaaaaccaggtaagtcattgkttgggtttctgcacactgcacctgtgggccgagttctagactttgctctgctgtgtgaacttgggcaagctgcttctctctctgagcctcagtttcttcacctgggaaatgaagggaaggatctgggcgatccgtaagatggaaraactggtcatttggagggctacttagcatggctaagaaaggctcatcaaagaatgaggcacatcccaggggtatgagctggggctgcagttggagaccagttggatctcagttggatggaggaggaatttttcagtcaagaatgtttccctgtctcctcaagggggacttttgcctgcgggggtcaaagacagataagttttggtggggacccagaggttcccgctccagtttgctgcgtgaccttggcaagtgyctttgccctccgtgggctgtagcttccctgtctgaatatgagtgcagtggctgaggtttccctaaagcccttccactgtatatattccagtaatctgtgatttagaggaagtggattcaacgtatcaggcattcaccaatgcccaccctggcccaggccctgtccatccagggagtaggggatcctgagaagatgagactcagtcccagccctgggatgccctggccagaaggcaggaagaaggcaggcgcacgcgcacacrcacacacacggaactccaggaccccaacatctgtgatttgtgtccaggaggggcgcaggcgaaggggcagagagaaggaggtttctaactggggcgcctgagatggaccttgacggtcagagtggagccaagagcagtgggcagagagaacgacctaacaaagcaagacaggaagtttggggatgggagaggtctgggtggcggaagcatagaactggggaggacaggggctaaataccagggtccaagtcctctgtagtaatggggaggaattgccagtgtctgagctaccaagactacagcccctgtcctgatggaaggttatggggaaggaagatagagggaaatgggaacagatgttaatgcgcctcagagatgcagaggcccctccgagggctggcatctgggccctgccctgggtctccagagaaccctgctaatccaaagtggactcctgttcttccagaagcagggactcttccctgcaaagcctccaagagcatgagggcaagcccctccctgggcataggtcaggtgcacagagggtcaagggcccctggaagaaagctggactgacttcctcacccaagggcagattcaggatctcctctgggcccyggtgtcctggcacctcccctcctccctggggtctgtgggctcagagagcaggaaggccaggcgagatgctcagaggagcacatcgaaatatgtccagaggccatgcatgatggctcatgcctgtaatcccagcactttgggaggctgagtcgggtggatcacccaaggtcaggagttctgagaccagcctgcccaatgtgatgaaactctgtctctactaaaaatacaaacagccaggtggtggtacgtgcctgtaatcccagctactcaggaggctgaggcaggagaattgcttgaacccgggaggtggagattgcagtgagtcaagatcgtgccactgcactccagcctgggccacgagagcaaaagtccttctcaaaaaaaaaaaaaagaagaaaaagaaakaaatgtgcccagagcaggggtagacaggcatgaggacagccagggccaggggagtctttgaaaacaaaatcaaggtctgcaggatctcagggtcttctgctccctgtgagtgaggggccaagtggggctcagggccacaggagcctgtgtctcaggcctgtggtgaaaaggggtggcagagggtcctgtgtgccctgcaaagctcacagaggactgggcttgttttgcagacatcactgaaggaaagtaggcaaacttgaggcagaaccctaggcttgtgcagagaaggactccctcctgaaagggtaaatgggtcttgggaccccgtagggaaagagaaaggctaaaaacccaagagttggagtgtcagttctactactttcttgctgagtgactttggatacattgtttaacctttctgagcctcaatagcatcctctgtacaaataaatatacaacgcctgaacttcattgacattgcagaaaaattgggtggattccatcagctaatgtgtatgaaaatgttttcaaagcataagagttacccatcacaggcatagtaactctcatagcaacactcttagcagcaggctggaggtcacatgccttgggttccagtccagctctgctcctaacccattctgtgacccttggcaagataccttctctgagcctcagtttccccatctgtcaaacagggaagctaaacctgctctgacattcttgcagagcagctgtgagaaaagaacttaattcttgtaaaacattgttctaaagtcagagagagccaggtgcagtggctcatgcctgtaattctagcactttaggaggccaaggaaggaagattgcttgagtgcaggagttcaagaccagtctgggcaacaaagcaagaccttgtctctgctaaaaatttaaaaattggccaggcatgatagtgtgcacctgtagtcccacctactcaggaggctgaggtgggaggatcgcttgagcccaggagtgtgaggctgcaatgagctattaaccactgtactctagcctggactacagggcaagactctgtctcaaaaaaataataaaaataaaaaataggctaggcacagtggctcacacctgtaatcctggcactttggtaggacaaaatgggtggattgtttaagcccaggagttcgagaccagcctgggtaacatgttgaaaccctatctgtacaaaaaatacaaaaatttgcttaaaaaaatacaaaaaagctgagcacagtggctcacacctgtaatccccgtactttgggaggccgaggtgggcagatcacctgaggtcaggagttcgagaccagcctgacccacatggagaaaccccgtctctactaaaaaaatacaaaaaaaaaaaaattagccaggcgtggtggcgcatgcctataatcccagctacttgagaggctgaggcaggagaactgcttgaatctgggaggcagaggttgccgtgagctgagatcgtgccattgcactccagcctgggcaacaagaataaaactccgtctcaaaaaaagaaaaaaaaattagccagatgtggtggcacatacctgtggtcccagctactcagaaggctgacgtgggaaaatcaattgagcccgggaggtcaagccatgatggcaccactgcactccacctgggtgacacagcaagaccctgtctcaaaaactagataaataaggcagagagatcattgttgtgaccattgtgatgcccctttctgcttctctgctcctctgggccaactccaggagggaaggtgtattagtctgttttcccgctgctgataaagacatacctgagacggggaagtttacaaaagaaagaagtttattggacttacagttccatgtggctgaggtggccttacaatcatggcagaagacgaaaggcacatctcacatggcagcagacaagacgagagcttgagcagaaaaactcccccttataataatcctcagatcttgtgcgacttactgtaacgagaacagcacgggaaggacctgcccccatgatgcaattacctcccacctggtctgtctcacaacacatgggaattccagatgagatttgggtggggacacagccagaccatatcagaagggctctatctcagtcctgcccgtttgccctgaccttgtggccatggtggctgctcctggggaaaggcgggtctgcattcctccatagcctgagaggggcttatcttccccctgcttcccagtgttgcagaggggaagacaggaggtggaagaaaggggaggctgagagcccgaggagggcttgcaccctggcctgacccacgagagttcccttccctgccacacaagttgcagggctggatcccagtgactggggcaggtgtccggaggaaacagccaggccagggccaggagaggcaaaacccgtggggtctgagctaacactggccctgctctggcagcttgtgttctgtgcccttgaggctgtggctgtagaccatgccctccatcagggacaccccttgagcctgcccagggcctgggtcctgaccctgggaagccctctgtccagtggagacaccggtctccctgagcctaaggaagcccattgtggaggaagggcttggaaggaacctcagaagaggacagtccatcctgtgtttgaaaggctgtggatgcccggatggcaagcagggcgctgygctgaccaaaggcatgattgtgaagatgttacgggtggccatgagactggtcaggttggggaccggctaactcctgggcctagagaggctgacgtggccagactaagggcagccaggctcaaagaaggaggcagacaggaaccctgggaggggtgcaagcagcagaagcctggggagagcctggtttggggtttgtgaatctagcagcagtgagtacaggctggactaggggtgaggtggaggcaggaggccaggacttgggagctccaagggtcccatctggcccagggagggctgtcaggctctgaagtgaccacactcactctgggctcctagctgactctcccggcgctgcctacccaaagactgggtgcagagaggagccccctaagagccagggatgtggaacggtcgcaggaggctgctacaagccccatgagcaaggctgttcccactgacagagctttcccaggatgacagagagtgcgctctgcctctctggggtgtgctagcctacgaggggcaatcgtaaggcgaatgtcactgaaagaacacaagtgtccttaaacatggactatctgggctttctagtgctgaaattcttcccactcccactgcccacttcccattatataaaaaacacagttgtttcatgttttggtttctttactgtttttctttgtttttgttaagaatgcattcatttattcaaaattgtttattgtagaataatcaggcattgcgctaagcactgaagaatataacaaaacaaaaacaagtctctaccttaaggagtttgcatgcttgcaggggagacagacattaacaaataattatacaattaaactgtaattgtgacaggtgccatgaatgaataaaaaaaaaaaagggaatataatcaatgccactgaattatacacttaaaaacatttcaaatggaaaattttatgttatgtgtattttaccacaatrcaaacatttttttaaaatgtcggtaattaaaaaaaatagaatataacgaagatctgacttggtcttgagggttggtgcaggctctcctggtaaagcaacatttaaactgagacatgaaacaggagtaggagttggctaggggaagaactttctaggaaatgggcacagcatgtgcaaaggcccygaggtgggatggagcttgtagtgttcaagagactaaaagccagtgggaacagggcagatttgggactatcatgtaaaagccacaggaaatcaaggtgctggtgtcaagagcccaagatcaaaggggtcaggcacatccatggaaagcgtgagtctctagggcaaaccaaccctggtcctagacttctgagtacggatctggataacttccgaatgcaagtccgcccaagccagcggtagtcctctcaggagctgcagagattttagccaggggcagcagagctcaaactgacctgaagtcaggatctgggcccaaagctaacccactgtctccaggcaagcccctgaatggcagagtacaaggcaagcaggttttttaggtcactaagtccaacccactgtattacaacattcacatattatcaatctactctgacctgattacctctagggaaggggaactcactacttacctcttcagctccgcaaaagcacagtttcatctagggccagtggtggtagaaaaaaaccctatctcacactgggtcctgtgagagacccctggatcccagctctggcctcctacccagacaattctggctccttggaaaggagcctgtgaggaacactttagaacagggctgggaaggtgctttggaaactgtaaaggttgtgaccatgtgaaggacatctagggcctagctcagactctggccccgagcagctgtaaaataagaatttagatgtcagctgggtgtggaggtgcatgcatctataatcccagctactcaggaggctaaggcaagagattagtcaattaatcaatctccaccctcactttcccataagtaaccactgttctgaacagccaatgttccaggtgttcttgaggatggcatgcttgggatcacacagaatgttacttgtctggctccttgcactcattgaaatgtttgtgagattgatcagtattgccaagtgtctcagtagttcattcgtctgtacgtttcagtagaattccattgtgtggctatactacaattttttttatccattaatctattgatgggcatttgagttgtttccagtttgaggattttatgagtaaagctgctatgaaattcttgtataaggtgtttttgtggacatatgttctcattttcttgggtaaatccctaggaatagaattactggatcagaagataggtgtgtgcttaaagaagctgccagaagttcccacatctttgtcaacagtgggtattgttactctttttagtttcattctggtgggtgaatagtgatatcttgctgtgattttaatttaaatttccctgatgatcaatgatattgagcatattttcatgtgcttattggttatttccatgtcttcttttgtaaattatcttttcaaatctttagctcattttgtaattgggttcttaatccttttattattgatttgtaggcattctttatatattctggttatattttgtcagatatatgtattggaaatattttttcccagtttgtggcttatcttcattttattaattgtgtatcttttttttttttttttttttttttttgagacagggtctcgctccgtcacccaggctggagtgcaatggcatgatatcggctcactgcagcctctgcctcccaggttcaagcaattctcgtggctcagccttcaagtagctgggactacaggcgtgtggcaccatgcccagctaagttttgtatttttagtagagaccaggtttcaccatgttgcccagtctggtcttgaactcctgatctcaagtgatctgccctcctcggcctcccagagtgctgggattacaggtgtgagccaccacccctggccaatggtgtgtcttttgatgagcaaattttttttttatttaatgaagcccaatttacctagtttttttcttctatggttagtgctattgtgccctctctaagaaatctttgctatttcaaggtcatatatatatattatatatattatatatatatatttatatatattatatatatatatattaaattgcttggctcctttatcaaaaatttaccacatttgtgtcagcctatttcttgattttcttccattgagcaattatttctctttctttatataatatcatgctgtcttcattctatagctttttaaaagttttttttttttttgtagagatggagtcttgctacattgcccaggctggccttgaactcctggcctgaagcgatcttcccaccttggccttccaaagtgctgggatgaacaggctggagccactacacctggcccactactacagccttatactaaatcttgaaatcaggtagtgttggtcctttaacttcatgaattatttccccctacaagattgttttgtctatgctaggtgcagtatgcagcctctaagatattgctcagtgattcttgccctctgatattcttgccttttggattcttgtgtaatcatctaccctagaacgtgggctggatctagtgattcatttctaacatagaatatggcaaaagtggtgggatttcttttttttatttctatataagttttattatgaccataaaaataaccctgtagtcaataacaatttaattgtacattttgaaataactaaaagtgtataattacaaaaagtgatgggatttcacttcagagattagacgacaaaaataccgtgtctttcattttgattgctctctttcattttctttcttgctcacactaagacagacccatgtggtaaggacctgagggacacctctagctaacattcagggaggaattgacaacaacctacaaagaactgaatcctgccaacaatcacatgagtcagcttttggaagctcattctcctccactgagccttcatatgaagactgcagccctggttgacagtttgacagtaaccctatgagacactttgagccagagctagcccatgcctagattcctaacccatagaaattgtgagatagtgtttgttttttttaagccactacattttgggatatttgttacataataatagattcctaatatactagatcctttgtacttctrtgtaaaatgtagaatcatcttgtcagttgattaaaaaaagactgtttgaaatttgactgggartaaattgactctatatttcaaattgggtgaatcatctgatccatgaacatggtatgcatttccattaattgaggtctttgatttgtctcaaccatgttttatacctttcagtgtaggtatcttgcasattttttcttaaacatttctagaaattttatgtttttgttgctatgaaaactgtaatttattttattttttaatttatttttatttatttatttatttatttatttatttatttattgagacagagtttcactcttgttgctcaggttgtagtgcaatgccgtgatctcggctcactgcaatctctgcctcccaggttcaagcaattctcctgcctcaacctcccaagcagctgaaattacaggtgcccaccaacatgcctggctaattttttgtaattttagtagagatggggtttcaccatgttggccaggttggtctcaaactcctgacctcaggtgatccacctgccttggcctcccaaagtgctgggattacaggtgtgagccactgtgcctagctaaaactgtattttaaatttaattttctagtcagttgctgttagtataaatataattgattttttaatattgaccatatatcctgcaaccttactaaatttatttattaattccaacacttttttttgtagmtcccctaagacttttatgttcaaaattttggtagctattaataaaaagttttacttcttcctttccagtcattttcccttttaattcttgccttattgcatcttttaggatctccaaatgtaatgttgaatagagataataagagtggaaatccttattttattcccaatatatttagcatttatagtgctctccattcctttctgtatattcatgtttccatcagggacaagtgtctttagcctgaataaatttcttttttttttgaggcggagtctcgctctgtcgcccaggctggagtgcagtggcgcgatctcggctcactgcaacctccacctcctgggttcatgccattctcctgcctcagcctcttgagtagctgagactacaggtatctgccaccacgcctggctaattttttttgtatttttagtagagacagggtttcaccgtgttagccagggtggcctcgatctcctgatcttgtgatctgcccgccttggcctcccaaagtgctgtgattacaggtgtgagccaccacgcccggcccagcttgaataaatttctacagcattttttgtagtgaaggtgttctagttatctattgctgcttaacaaatcattcaaaaatgtagtgcattaaatcaataacagtcacttattgttgctcatggtttccattggtcagttattcaggagcaacttagctgagtggttctggctcaggatgtttcagtccagatgtcagccagggtaacagccatctggagtgggaagacctgctttcaacctcactcatgaagttgttgacaagcctgtttctcaccggatgtgtgagttttccattgcactgtaacaattaccacaaacttggtggcttaagacaacagatatttattcttccccagttctggaagacagaagttcaaaattggtttcggtgggctaaagtcaaggtgtcaggaggactgctcttcctccaggggctctaggacagaatctgttccctgcctcttccagctcctggtgctccagcattccacccttgtcttgtagttgcatcactcccatctctgcctctgtggtcacgttgtttctcttctgtgcatgtcaaatctctctctgctcccacttgtaagaatacatgtgattgaatttagagcccaactggataatacaagataatctttcagtctcaagatccttcatttaattatatcttcaaatctcttccaagtttttgccatataagctaattttaacagctttccatttgctgggtcacatggtaacactacgtggataacttgtgagggacattttcaacttaccacactggctgttggccagagaccttagttctttaccagtgggcctctccataagctatttgagtgtctgtgacgtggcagctggtggctgaggctagggacttgtcaaagtcttctttatcacatctggtgcctgaaatagactcattaagctaggatttggaatagctgggcccttcgtgtctctatttttttaatttattttcatytttggttttgtggtacatgtgcaggatgtgcaggtttgttacataggtaaatgtgtgccatggtggtttgctgtacctatcaaaccatcacctaggtattaagcccagcgtgcattagctatttttcctgatggtttttctccccccaccccaccccccaacaggcccctccctatgtccatgtgctctcattgttcagcgcctctatttctgtgtggcttcttcacatgctctccaacatcgcgcgttcaagatagccagacttctgacatggtgggtcagggatccaaaaagcatgtgccctgagagagtcaggtggcaactgcattgcttttttgacttagccttagaagccatataggttacttcccatatgttgtgttagttagaaggcagtcctaaggccagcccagattctgagagagggaaattagattctacctattgatggggcaagtgttaaagaatttgcaggtaagatttcaagccacctcagcagtttcctggtgacaaatcctcccatcttctatttaaataaaaatgtcattctttcaccttatttttcaaggatatatttactggaaaagaattcttgcttgatcatttacttygtactttaaaatgtactgttacagtatcttttgatcttcattgtttcttaggaaaagtcagttatcatttctatcagtttccttttatgtaatatgtcctccccaccccatcccacctcacgtctgctttggttgcttttaaaatattatctttttctagttattattttgcgacaggatctcgcttggtcacctgggctggagtgaagttgcataaacctggctcactggctgggctcaagtgatcttcctgcctcagcctcccaagtagctgtgaccgcaggcacctgycaccatgtctggctaatttttttattatttgtggagacagggtttcaccatgttgcccagctggtcttgaactcctgccctcaagtgatcctcccacttcagcctcccaaagtgctggwattacaggcgtcagccaccacatccagccttacaaccttaattttagaatattttcattatcttaaaaaggaaccctatacccattagtagtcacttcctatttctcctcaatccccctagccctaagaaaccacaaatctactactgtttgtctctatagatttgcttattctggacatttcatttaagtggactaatacaatatatgatctactgtgactggcttctttctcttaacataatgttttcaagattcatccatgttgtagcatgtatcagtacttcatttttttatggccaaataatattccattatgtgaacataccacattttgtttacccattcctcagttgatggacatttgggttgtgtggggaaaagagagagatcagattgttactgtgtctatgtagaaaaggaagacataagaaactccattttgatctgtacaaagaaaaaattgtttctgctttgagatgctgttaatctgtgactttagccccaaccctgtgctcacagaaacatgtgctttattgaatcaaggtttaagggatttagggctgtgcaggatgtgccttgttaacaatatgtttgcaggcagtatgcttggtaaaagtcatcgccattttacattctctattaaccagggacacgatgtactgcagaaagccgcagggacctctgcccaagaaagcctgggtattgtccaaagtttccccccactgagacagcctgagatatggcctcatgggaagggaaagacctaactgtcccccagcccgacacctgtaaggggtctgtgctgaggaggtttagtaaaagaggaaggcccctttgcagttgaggcctctgtttcccgtatgtccctgggaatggaatgtctcgtgtaaagctaactattcgttctgttctgagataggagaaaacggccctgtggctggaggtgagatgtgctggcagaaatactgctctgttactctttgctacactgagatgtttgggtaaagagaaacataaatctagcctacgtgcacgtctgggcacagtaccttcccttgaacttatttatgacacggattctgttactcgcatgtttccttgctgatcttctccccaccatcaccctgttcaccccattctgctgcactccccttaccgagatagtgaaaatagtaatcaatactgagggaactcagagaccggcgccggtgcaggtcctcacatgctgagtgtaccggtcccctgggcccactgttctttctctatatctttgtctctgtgtcttatttcttttctcagtctctcgtccctcctcatgagaaatacccagaggtgtggaggggcagggcccccttcagggttgttttaatatttaggctattatgaaaagtgctgctgtgaacatttatgtacaagtctttgtgtgaacatctgttttcattttcctgggtatatacaaaggagtggaattgctggatcatatggtaactctatgtataaccttttgaggaactgccagatggtattccaaagtatctgcattcccaccagcagtataggaggtttctaatttctccacatccttgccaacactgttcttattttcttatttatagccatcctaccaggcatgaagtgctatctaattgtgactttgatttgcatttcctggtggctgatgatgccaggcattttttaatgtgcttgttgtccatttgcatatcttctttggagaaatgtctattcaaatcctttgctcagttttaactggattatttgtcttcttattattgagttgtaagagttccttatatattctagatataatttccttatcacatgtatgatttgcaaatgttttctcccattctgtgggttaatttttcactttcttgatgatgtcccttgaagcacatcaggttttaattttgatgaagtccaatttatttgttattgtttgtgcgctttttaaccttatctaaaaaaaaacttgcctaacacaaggtcacaaagatttattaatattttcttttaatatttttacagttctagcatttaggtttagatcttttatacatttgagttaattttgtgtgtgatatgaggaaagaatctaactttatttatttatttttggcacatrtcccagcattatttgttgaaaagacaaatattttcccattggattgtcttggtagscttcttgaaaatctgttcactttaaatgtgagttgatttctgaattcttaattctatttcattcacctatatatctgtccttatgccagtacctcattgtcttaattactgtaggttttcaatgttttgaaatcaggaagtgcaaatccttcaactttgttctttttcaagaatgttttgactattttaggtctcttgaattttttktttgtttgtttgttttttgagacggagtctcactctgttgcccagattctggagtgcagtggtgtgatctcagctcactgcaagctccgcctccaggttcatgccattctcctgcctcagccttctgagtagctgggactacaggtgcccgcccccacgcccagctaattttttgtatttttaatagagacggggtttcaccatgttagccaggatggtcttgatctcctgaccttgtgatccgcctgcctcagcctcccaaagtgctgggattacaggcattagccaccgcgcccggccaggtctcttgaatttttatacaaattttaggactagcttgtcaatttctgcaaagaagccagctaagattttgattaaaattgtgttgacctgtggttaaatttggagagcattaccatcttaacaatattaagtctctcgatcatgagatatctttccatttatttaggtcttccttaatttcattcaataatgttttgtgctgttcaagttaaaaatagttctctctctaccctttggattgaatagtttctactattttgtcttcaagttcactttttttttttttttttttgagacaaagccttactctgtcacccaggctggaatgcagtggcacaatctcggctcactgcaacctcccctcccaggttcaagcgattctcctgccttagcctcccaagtagctgggatcacaggtgtgcaccaccatgcacaataaccaagtatcttagccactgtgctaagcaattccagtcgattgcttcctaggaaatcctgtgttgctgagctgtatggagaggtgccaaggacctcatagagcttcacctaaattcaggcagtgcatatagtagtggttaagaagatgcagctgggtgcagtggctcacgcctgtaatcccagcactttgggaggccgaggtgggcagatcacctgaggtcaggagtttgagaccagcctggccaacgtggtggaaccccatctctactaaaaatacaaaaattagccaggcatggtggtgggcgcctgtgatcccagctattcgggaggctgagacaggagaatttcttgaacccggcaggcagaggttgcagtgagccaagatcgcgccactgcactccagcctaggcaacacarcgatactccgtcaaaaaaaaaaaaaaaaaaaaaaggagagcgatactccgtctcaaaaaaaaaaagggagatgcaatctgaagtcagattgcctcgatttgaaactcaatcatccccattactatctgtataacctttagcaagttacttcatctctctatgcttccatttccccataaaatagggattgtaattcagtacccacttgataggagataatcaaatgaattaatttgtgtaaagcaattggaacagtgcctggcacatactaagtgctcagcaaatgttagttgtcactttttaaaaagtgaaataatattcccctaaaaggccaggctccttctgctctgtgtccccactgcctgacccctttgcctgccacattcagagctgcctctcacgtgtacaggctgtgtatgtgtgtctttatcttcctctttaaaccctgggctcctccacggcagggaccaagtctgtgagccagaaccagcccactgcagagcacaatgcccccacaatgcctccactggcagaagcctcaccccagcttcacccctacccccacycccacccccataaagttcctctggagtctgaggaataggcagtgttctttcttctcatctccctggaagaaaggtagagaattacctatcttgagagctgggacttacaggccgtcccatccaccctttccccattttacaaatgggttaagtaaggccctcctaggagaggagtacctaaagtcacgcttgcggtacttaggataaaaatggcaagcaatggggagatggtgattttctagtagcctttgctttgggctgaaattatgtcagctttgagcatcgcactgcccttcctgtggtaaccaaaaccaccagctggccgttctctgtgtctgtcatcaatacaacatatgaaaacacctggattacgatttaatatatgcgcatggtttatataaaacattttccaggccgggtgcggtggctcacgcctgtaatcccagcacttttgggaggccgaggcaggcggatcacgaggtcaggagtacgagaccagcctgaccaacgtagtgaaaccccgtctctactaaaaatacaaaaattagccgggtgtggtggcgtgtgcctgtaatcccagctactcggggagctgaggcaggagaatcgcttgaacccaggaggcggtggttgcagtgagccgagatcgcaccactgcactccagcctgggcgacagagtgaagactccatctcaaaaaaaaaaaaaaaatttttccaaaagggtctgatgatgaatggtggatgcaggggtttagaggaccctgaagtgcctcactctctgtacctccctattctttgtccctatcctgctccaccccagtcacccaacaggcctgagactattcggtatggctggcttgttaggagcataaactctggaacccacttgcccaagtatatattgtgactctgctaaccaaaggaccttgtcaatttccctaatttctctgtatctcagtttcctcatctgtaaagtgagggtgstaatagtacctcattgggctgttacgaagattgcatgtgtaaggtrcataaaacattgtctgagacgcagtgctggttatgtgttagttacwagctagtactgtgattattcctgtctggttttcttttgcatccttgggcctggggggcctggcagcacccaactttgcagccttgtccctacctgatgcagcagaattccagcccagagccctagatgaccagtcacagatagaaaatgagaaggccctttatctgtgatatctgaggaaacagagtcccagaatgaaccagggacttgcccaaggtcacaaaactgaaacagagcctgggctagaagccagatgttctggtgcccagagaactttgtcttgggtacggccaggctgcttgccaactcctttagggctttggagtggaacttgatgtctgacacatttatttgtatacagcaggctgtgggatttggcatgacagagttggacactatgagcactgccaactgggtaagaagtgagctggctgggctgccccacccacccaggcaggagccaaggtggagctgagatgagccttgggggttgaggcctctcagcaaacacacttcctttggggtcttgggctgggggcttcagtcagtcaagggctccagggtgcctgctccaaatatgttcttcctagtggattctagggggatatgtcttaaaccacccctgccctcaccctttctgaaagattataggtccctagcagatctctgctcagcccaaaaccccacccgtgtgagctggaaaaccgagactggggatggtccacagtccatgcctatcaccttggccttgagtcctctcctctgcgctagcctcccatgctgtctcgcatgaaataatcagacctttactccttgccagctttcttcctttaacatcattataccccctccccaagcctgggcccagcaaccctgcaaagaatgcatctttgttcatcgatcccatcatctctaaatcttcgaggcagggactgtgtccatttttgtcactttataccccctcgtcccatgcaacatccggcacrgaggaggtgctaaatcaatactcatagaaggaaggaggatcctcagggaactgtcagtcactggggcaggaagaaatcaattccaactttgggaatgaggacttaattcatatttttatttcatgacagtccattatgttttttaaaaaagcaatacccagtttctaaatgctgagtgccttgggaggagatcagccagggcagctccaggaagaagcatgagggctgaggtccctcccagagaaggcgagctttgaaaagtgtcataggcggctctaccacagcaggtcagctagtgggttttgtaaggagacgaaagggtagattacacatttcccaagccttcctgatcttggaatgagccatgtgctggcattataactgttgaagtttccttccttccatccttcctttctctctttctttctctttctttctttctttctttctttctttctttctttctttctttctttctttctttctctttctttctttctctctttccttctttttcttttcccttcccttctcttcttttttcttttctttctttttcgaagttttgctcttgttgcccaggctggagtgcaatggcacaatctcggctcactggaacctctgcctcccaggttcaagcaattctcctgcctcagcctcccaagtagctgggattacaggcatgcaccaccacgcccagctaattttgcatttttagtagagacggggtttcaccatgttggccaggctggtcttgaactcttgacctcaggtgatccacccgcctcggcctcccaaagtgttgggattacaggcatgagccaccatgcctggccactgttgaggttttcaaacctcatcagtttggacactgtgcatccagagctagccttgaaggacatttgaggacatttcttttgtcattctctaccaacgtcaagtatcagtgacaattccattcattaacatcatgactcagccctcaccagaagagggaggaggagaagagaaacaagttcatctttagctcttcaggacaaaggagaggtctgaattcctttctgggattcactaggattggggtcgttaatatagcatgggcttccgaagtcctgtgacaacaaaaaacagcaagagagcattggggtgcaaagtgcattgatgggggtctatgggggggctcccagcagcttctcaaaaggggtcctaacgcatcagaggctcaggaccagtattygagtcaaactgttagggtgtcctgaagtggcaataggcaagaattgctgagatgtaattgaaatttggtgaagggtagaattcttttgaagttaagagtgctggcattgacctaccagtttagggtaacaatctgacagtcgtttgccatctgactaggtggaggaccttgaacaacccctgtcccaattgctgcctctgtgccctgctccttggccttaaaattagggctgaggctgggcgcagtgactcactcctataatcccagcactttgggaagctgaggcaggcagatttcttgaggtcaggagttcaagaccagcctagccaccatggccaaaaccccatctctactaaaaatacaaaaattagccaagtacggtggtgcacacctataatcccagctactcagkaggctgaggcaggagaatcacttaaacctgggaggtggagtttgaaataagccaaaatcgggccactgcactccagcctgggcaacagagtgagactttgtctcaaaagataataataataattagggcttaaaatttccacctaacactagctagggctgcctccattttttcacctcatccaaacctcactcacgccagaggcaatttggaatttgggagttgtagcttgcaggtaataattaaagatgagggagtgtgtgagctccctaagtgggagagggggctgagaggtgggcagatcaccagggacagcccccaggaaactccaggaagcaggaaaatgctggtgggggctggctgctgccacagaccggctagtccctgtagtgaaggaggaggtagagggtggagggggtattagaaggcacagcgcaaggtgcagggatatttgttaccatggaacaggggctctcctgtgggaatggggggagctgggatggttggctaagttttatgacatgcacatactgggtaaaccttgtgtacgtagcatcctggcttcagagcaggccgtggagacccctgttcacaatgctggctctgtcttttgctgcctgggcaacactgagcaagtctagcgttctatcacctcttttggaaaatgcgactactaataaaacctacattgcagggccgtggagagaatgggagaagccaacacaaggcactcggcatagtacatgtgcttagtaaggaaccaaaccaaacaaaaagacgagcttctcgcccagccctgggggacccagtggcaggaactgtctcccaaggctctgccaaggatgacggccaaaaaactgcctctcctgccgcccacccttcttatgtaagagccacacaggtgggcaactgggtcccgtgccatataggtcagaggtatctggggctacacctcaacagcagccctagggcaggctggggcgggtccccactcatgcccaaccccactgcctcatcacccggaacctggggcatccacagcgactggctcccatactcagcatgccttagctgagggagcagaggggttgctgagccctgtgcctgccaggtgcaagaaggaggaaggtgagcaccctggggcagccagacccccaggcacaccctctaccgtgagtcctctatgggggtcttcaggctgggaattggcaattaggagagagctgccagaggcccaatctttgaagtgaggcagtccatgcagactaaagagaagcagggggcgtggggtccgccacgcagggtgatggggaagctagcgtgaatcgccattgcagactatattgttgctattgggagcatcaggctgtgcacaggcctgtgtgactagcactgtggggtttggaggaggcattgctctccctgtttggggtttttaggatatggggaactagttaggcaacaccttccatggagaacattctccagccattggggagtcagttctgctttgcccgctgagcagagagagrtgggaactaccagaagtgatggggaggctggtgaatggtagccagaagtctctgcaaagcaggagtcctggagattttatttgctcatcagttggctgtggggaatggagaccacagccccaaggcagccacctcctgcgaggcattctccattgattctgagggtgtttgggcttatgaggccataaattacagcagggtgtcccaccccaggagcagatgagtcatagccaggaaagagggcagctgtcccctcgcccagccaggctgccagcggtgactcacgctgtatctctgttgcagggcggtccggtggagccgggcctctctggggctgctgtggctctcccggggggactccgtgacatgttctctgaggttctggctctctcctgggcaagctcacagattgcagccaccccccaggcaccatgccagaggtgctcctgctcaggtctgccagctccatcctgaggactgcgtaaggaacaaggagcccaccttcccccgcctcctgccccgcagccagtctcccagggaaagtagttggcacgcaacctggacccccagacttgggtttagggttttttcattctgctggtcaccctctcaatcttgccaagttatccttttcttcttgagcccccaaagatccatgagagctcatgcgtaataatgatgagagctgactacgtactaagcacttctcatatatcaccttctccttgcagtagccacaggatacgggcagaaaaccgagggccagagaggaaccgtgactcggccacatagctagtaaagtgagttgtgcccaagcaggcagacagactggtgaactttgatgctatcctgtttcaagaaagcgttcattgagcacctacttcatacacaacagtggcctggctgctgaaggctgagtgagaagaaagggtaacagaaataaatgggaaacggatcctcatccgtgaagcgttcacatgggaaatgagggtcctcctcaacttatgtgtcacacacatagtgacaacttgagaaggtttaggtccaaccaacatgtactgagctccaacagtaagtactcrtggccagaggacagagctgaatcagaagcggccccagctgtcaagccatgtgtgaccatcaaagcccaaacctgagtatccaagggccacaggggtgagagggtgttggggaaatctaggagggcttcctgcaggaggagttgaaggaggcttgggaggctctgtgtgcaaatggttcccatcagctcctctggcaaggtagaaggagtaaggagacaccaatccaccaagagatggttaagagaaaggcgcagtgcagacgctcccaggctcctctgccccccacacatcttacatcatatttgctcaaacacgccctttgttttcttgttcccatgctgctgggtagctgctgataaagtgtttttgttttctgtgaaaggagagcaaggcratgagcttaaagtgtgcttatgtgagctgaggtcagagaatgaatccttgttctcgtcctcaaagacgagtgaaaagggccaaccttgtaagctcttcttcctcctgggaattcaaaatgcagacagaagccagtcagcctcctcaggccgttcttccaccattattgtcattaatcatgttaggtgacttccgccaacctctggagtattgccttccagaaggagcataattttccagaatgacaggaataatatgttaatcgccttcggcgtgctcatgatgatcacaatgacagtaatatcaactcacctgtaggatcatttacagccacctgtccttcctggaatagcagcaagaatcaggagaagggcccaaaatgcttttgaggagtyaagacagagtaggggcagcttcccaaaccttagcttcttttcttcaaagaaaacatgataggttccattgtggaacttgtcccccaatgtaacctaagttctaacgagcttggctgttttgttttctattctgctacaaaaagaaatggcaatgtaggagtgagatgaattgctagaagccagcacactgaaagtagcaagaagtgactgctagtcacagaggagaggattaaaaactaaaaaatggccgagcatggtgacttgcgcctataatcccagtactttaggaggccaaggckagaggatcgcttgagcccaggagttggagaccaggcctggcaacatagcaagaccctgtctctacaaaaaatacaaaaattagccaggttttgtggtgctgtcctgtagtcccagctactcaggaagctgagatgagaggattgcttgagcctaggagtttgaggttgcagtgagtggtgattgtgcccctgcactccagcctgggtaacagagcaaggccctgtctgcaaaatataaataaatacatacatacaaaataaaaactgaaagacgaccattacgaacaacaacgagtgtgagacagcactcacaatgaggagaggcagatggcccgagcagtttcacttgtttctgtgtgacaagtcaggtcaggaaagcctgttactggttataactctgtgtgagcaggaagttactggaggtttagcacattctatttcggatgacatctcttcaaagggaccacctctcaaagcccctagtgaggaaaagatcaggcttaattcatttggagaattaggttttgacattcttttaatcatgcgccccaaattctgtaagcatagggcatagagagttgaatcagtgccttgagccagccacagggataaggaaggtgttcttgttaaactgatgctggcagagggccacggtccaccctctcattgaccatggttgctggacaagatcagtgtctgagcaacaagaaatttgacactgcactgggtgctgcccctccaggaaaaggcacccacctgcagcaagaaggtgctgccaacagcctcatcgtccctataaacagaaggttctaatcacgataagtacgcttgacccttggcttcctttggtggctgtcttttcatttagtctttgtgtagctattttaaaaccagaaccagtttacactaattttctgtggggagagaagtgctgcccataccttttgattaggaggatttaaaaacaggtttgtttgtgaggaagcagttcagatggtgggacattacagccaaggacagcctcctgcctggctaatgtggaggtggccgcccagctggtgatctcagaggctgattagagctgctaactctaacctggggtgctgtccaccgtcctctgagaacacaggctgagatggggcagggacatcaaccaagttcacagtcttccccagatgatcacagtgcaggcctctgagcctagcagtgtacgtgtccctcgtttgccgtcgctgcctgaacccagagctcaggggccatttggtaacattgcggcccaaagtggaggcagcttctacctggctatcccagagagctgtaaccaaggatccaaagtcagtaggacgagttctgcagcattcacrcgcctctgtctgcccggcacaggaggcctcgcccyggaagcacacgttgccatctcttcagtttttccacaacctccctggagtgggtcgccatagcaatggaagggctgctccaggcctgtggcccaggccttgctcacaaatttcgcaagaacggcgccaccttggttccccagtcatcccccttctccccgtccccctcccttcataaccttctgatatctttcgctttaaaacctatctcaggttcttaagcagatggctgccaggtgggcctaggtgtgttcacaaacttagttttgttcggaacctgcagtgccgacaaggagtgaggctgaatgtgagaagcaggtaattggcccggcttcctgggaactgggcagggatggggctagccccaccctractgacagacagacagggctccctggagccagggtcctaccctcagggacaccatgaccagctgcacaggttgcatgctgcacaactccagtggattctgtttacgtagttgttgactgtgaaatgtgtctctggagttctataatcctgttgcagtcctaaagtgtgtactgaaatccagctgctcagccatctaggaggttgaggtctggccaggtgaactctgaggaaaaatggtgctgaagggcagtcaggctgaaaggataatgaaagcccagaaacccatgaaacttgggttggccagaaggggagaccctttagccagggtcaccgagcctgggaggcgagggggatctgggtcaggccctgggcctcaggtctccctggacccgtctatgtctgtcttctccatggagtgaacagacatggggtgcatggtgcacccacaagcacatggaagaggggaggccctcactggggggccggaataggacccctgagagccctatgagtacctgcagctccactcagtttctgggcatggctggggactggtgggtacagggagtgacagatgggggaacccccgccccaaaagtctgccctctccaggagtggcattcagaatcctccagtgcggaccttagccccgtcctcatccaggtggggtgctgagaccccgagagaggcatgaacttgcccagggtcacaccacaaagtagagcacagaaggccttgaattccctttctcctgagcccttagagcctggagggaggctgggtgggggcagggtcagcccctacaaccactgaggtcttgtcccctgactcccactgggttctcctctgtggatggccccagcatttgcaggagacagaggtgccagtgtccccctgggggtgctgagatgtgtgccaggccggagtccctaagcccaggccggtcccccacgttctaatgaatgtttttcctggtcccctcaccaccccagctcactgactgacaggcagccactctccaaagagtccctgaaccatgctctcgagctctcagtgccagagaaggtgaataatgcccagtgggatgctccaggtaagccagctgggggtggtagggtggggcagggcgggaaactgtgctgtgctgggtgtgctggaggggtgggtggtgtgggggaccaccacacagaactgcgggaaggagcagctggggatcttgctggttccacgctcccagggaccccaccaagccccttccttcatggctgccatcagggccaggcgtgatggaaaggaatgagggatggggagatttcttcttcaagaaagytgggaagaagagaggccagagatagagagacaggtaggacatcatctgggcccaggccttgggaacttggggctccagcaaagggttgctgagggacaggagaaagcccagataagcaatgccttgggatttttggcctggttaactggggcaaggggcaggcagacgggtgcaggctagaaaggtttgttttggaggcttgaaacattacatgttatcttcttgatctccaccatcaaataattgtgccttaaggaaggcagagttatttactctgactctgaagagtcatcaaaatgataataataataataatacagcttttgtgcacttttattggctgcacaacaacattgtagcaacaacagaaatttaaaaacaaaaagaaaacaatagatacccagcacagagggtcactgctgccagaccagctgccgctctcccaggccgagtgtcttgggtggctttggcagggatctggcctgagctgtgggggtgggtgtttcctctcatgccccctgccctcacctcagagataaaggagaagggactgggccaagaagaggaccaactggtttctgagaatggtttgaaagacaccggagagaggccaggaacagggacagcttggtcccgggagcctcccacgttcatcctcccaggattccaaggcatcttgctgacttgctgagccacctggggcaggtcccaccaactsgcttaggctcagacaccccagactttataatcccttctctggggtgctcaaagagcaggtgttggcaccaggggcctgggccacagcaaaaccgtggagctcagcaagtcctgagtatgagtgatggcacaggcattcctgcaattcaaggggcaggaagggagccatttgtgggggaggctccgtgtcccttggagccccagaaaagcatctggcatcccgagggagaaacacataatccccagccctgcgggcctcaatggcttcatctgaatggctgtcgtctggcagccgtgcagcagtagacacgcagcatgggcaggttttaaacaagcagggtagggagtcccagagagggtcccttcagacagggctggagtagaggcatctgagcagccaggggccagatgagggacagggagaaggccctgagtttaatggygaggcagggcctgggtgggcaactgtaagggaggtgacaaggccatcacgatctagtgtatcaggactttgggaaactggcagggacggccaaggtgggcgtgccccaggatcctccaccctgtgcactgggctgtgaaggagactgagacggacaatcttctttcctgccctcaaagaacccccagtctgagggcagacaggtcctctgtaaagggcagggacaggctgaggaaggagggctccctctgggagctgtgggggcaaggtgggcctcttgcattagaaggacctgtggctgtcctcagaacctcaagctccctctaggcctagaggtctggactgagtgctctgcccttgggagttcagcttccagggctggtgacaaagagaaaggggaggtttgggaggggctaaggaggcaccatggttgtcagcaggcgcccagagcggaggccaccgagggaccccaggtgcttcccagggcagtgctaagcaggcatcatgggctcccacagacctggctcgggggccatgctctgcccagcaccctgtcctgcagccctggtgtccttgggggtggagggggagcctctgcgctacagcgtgggtgagttccagattctcatggatggcgtgtccaccgcgtgccaggcctggagcggagcttggactctttctcattgactccctagaagcttgggagccctgggctctagtctctgtacaagaagggggattggggctggcacagattgggaggggtcttgaagctgccctttcacaaagcatttttgataagattgggaaaagccaactatccctatcaaagactgctggggaggagggattcgtgggattaggagagctgaaagtcctccttcctcacacagttgtgccctgaataagaagaatcaagccctgtgctaagggactttcttgtattctttccttttatcttcatatcagtagcagggaaaacaaatctatcactcctatttggtagaggaaatggagctcagagagggttagtgattttctcagagtcacacagctggtaagaggtggaactcttaactggccacactgcctctttgggacctagatagcatcatgcagtctggtcttccaggtctggcccccacaagtctggccagcccctgcctccctttcatctaactgcagacactggcagcccctctggggagctctttgagtcttgtacacaggaatcagggttcactctggagccctcggaggctcccagatctctttgaggtcccaaaaagtttgaggtcctgagctctggtccccaggctgagctctgagctctccagatggctgtactcccaggragcagctgtgcgaagtcaggccaccgagacactggaatctgaccttcacacaaaggcagccttgtactgggccctggagacacattactttttactttctaggcctttctagatagagcttgaagcccagcaggagaagggcagcatcgagaccacagagaggggagggcacccggggtgagcagctgctggggatgaaactgctggaggtgctggccagggctggctccccacccgctttctccctaggaaactcccacacccactaaggagcttttgcaattgggaagctaggtgctcagccccacttgtctccagtccagtgaagccctttgtgggtcaagggatttgctgggcctccctcggttcgtcactcccacccttcccaaatgttgcaaggggtggtgtttcaggctggagctatgcgctagggagccagaaagaggcctgatacaatgcttgtcctcaagaagctcacagtttgaggccgggtagcaggaggaggccgttgggacagtggaaggcaagaggacctgcctgtccccgcagcctccgatgggggccggcaggaaaggctttccaagggtcagaggaaatgagtgccagtgattccttctccatgatatggaaacaggtaatcccggccctgccagccaaaatgagtggaacctctgggggtcctcagagaaacattttccgcaggggtcaaggcacccacccagcccctgcctggacagcctcagacactgcctgggtgtcccctcctaggaccctgccatgtggggcaggtctggggcaggccagcccagggcttctggctgggatgcccgggttcttgctcagacccggcttctctccagtggatggagacccagcctgaggtctcctgcacatctcctgagcatgctcacctttacaggggcaggtaaagcccatctcaggtcccttaccccggtggtccaggcctggacaagtggaatcctagaggcaattttaaaaagctaaaacaatgactgtggagaagcgtatagagaacatcttgtctaccccaattgtaattcagatggggaaactgaggcccagggtcattctgctgtggtggccagaactcagagctcttcagtccccattgagaaggccgggagtggcagctgcaggggccctctcccctcagacacagaggaactactgaacagctgacagacccttctgtgctaggtcttgtccttatctctcttcatgtcctggggccaatgtggcctcttcctcttctgtatccctgagagtgccttgcattgggctggccctcagcacagggtcccgtgttggagagaggggccctcctggggctggttcctgcctggcctttggaggagggcctctggggtcagtgccctgcaggaccgttctcggagagagatctgtcctaggcctgagacccacctcttcctcaacaccagttattcctccatctgcacaagaagctactttcctgcagcctttcccacagaccacggaaaacagccccagcctcccgctctctgctcttgtgttgttttccttcccggctaattgagtgactgcctttgctctttagacgcctttattccagaaccccagagaacacagctccctgcctgcccagtggcccccagcataaagggtggattgataagatacaagccagggtcaggccaagacaagtggcagagggaggaagcggcagagggagagggaggcggcagagagtgccaaccttgcctgggaaagcctaccccccagctctcagctgacttggcacttggtgggcgggcagtgtgctggtggtgctgcattggcagcaggcagcgagctttctgggttctccactgcgctgtagatctagtcgttggttgccttttggagtcagctcctgttgggatctgggtgccttgctgggcaacagagaccttgattgtgtcctggccccgttcttggctgttactacagcagtgatcttagtttgggcatgggacagagctgatggttgcactgatcttagtttgggcatgggacagagctgatggttgtgccctgttggtggagcacaaaggggagatgaggactactttaaggactggcagtcatcctgatttcctaagtctctcgatacagatcttttcagtgtggtctatgcatttctgtatgcccttttttgctccccttttcacttgatgttatactgtgaacatttccatatgtcattaaatattctttttgtactttattttaatggctgcatgggaatccatgatacggctctaccataatgaactgaataagagaccagtsccctgttggacattygggttgtttccaatggctttgctaatagacacgttgctgtatggatatccatctccacattctcgctgtacatgtctctgattgcttcccttgagtaacttccagaaagtatgattgctaagtgcaaggatgtttctgtttcaagcctttggatatatattgccagttgcccccaacaaagctgtaccagttcatgttctgcactgcactgcaccttccagacagtggatattgtctgtttgcctgattgtatttttgctgcttcaagttctttccttttaggagaaacctagggagagagggaggttaggagatgagttcagatggcttcaggagatgtgggttattgtgaggaaaggcagggaagaaaagaagcttagaaagaggctaggaggaggccgggagtggtggctcacgcctgtaatcctaccactttgggaggctgaggtgggcagatcatgaggtcaggagatcgagaccagcctggccaacatagtgataccccgtctctactaaaatacaaaaaattagctgggcgtggtgtcacgcacctgtagtcccagctactcgggaggctgaggcgggggaatcgcttgaacccaggaggcaggggttgcagtgagccgagatagtgccacggcactccagcctggtgacagagcaagactctgtctcaaatagtaataataataataataataggaaagaacataaaagtaaaaagaaaaagcctagcagggaatgggaagaatggaccttcctggctccctgctcaggtgacaaccagcattgctgcaattcagtttctccctgccctgctgccgccacctgcttctgtgcactccactcactatgctgtgacttccaccaccccattgtctcagctcagcyatcctgatctctgcaagtggcttccaaactctgcaggagagactctaattttctgtcaccacctacagggagcactcccactgagcagtgctcctgcacagcaacctcatgagcctctggccagggcttgcagctccggtctcatgcatgtkgtyggggtcgcagggccaatgtccaaggctcaacagctgtgggcaaccccttctgaccgttctgccttgcatttggcgtaccttgccagtagctaaaacccaggcccagcccttctaactcattgtccagagacttcttcttctatagagagggagattggcagaggacacggtgtgagcagagcccacgggtgggaacacatggacatgagaagaagggggaggattgcacaccccaggctagaagatgcatctgtcttcccttctttcagctctgaagggcaggagtgagcttggcagctggcacccaaggctgaggccactgagctgtggtgggcccaggtcagaaggacaatgagcagggcaggccctacctaagtctctcaggggtgcaagatgggaaaggaggctggcgtgtcctgcttgggtagatacccgctctgtgagcctgtctctgtgcttaagcacaatgtgtcctgtgtcctcattggcctccctggggggcaagggtgaggtgggggagagatgaaggcctgagtcctctagacacacagtcactgggtctccagccctcctgggactagggtggggcagagttcagctcattcttccccaaagaagaggcccctggcctctgctggaggccgggttgctgctggtagccaggacccagagaggagggaatctgacttccagagctccagggtggtgggagaggcagccccgaccatgaccccatcctccattaggctcaggatgggagtctttagtgaggaggcaacacgtggtccttgaagagcggtaaagtgtgggcatgtgatggagggaagggcattgcaggcagagtcgcagcacaggcaaaggcacagagacggggaaccaaagggaactgggagcagttcaggttggctgtaaggaaaggtgtrtgttgaggctgggaaaggtaagcgagccccttggggagggcctgccttagaagccctggtatagacgtctccctgtggtcaatgagagccatcgggggcttttgagcaggtcagacctggatttagcaaggtcactctgggagtctcaggagtgtgggaaaaggccggtggctggaggtcatggctgcccaaggtcacccagcctgaacctgtcacaggacttggcgggaggcrtgatagtcctttcccagaggagatgggagatgtggtgccggggtcttccttgaagttcaccgtgagaggcagcacccctgtgggaacagcagacttgggtatggaactgtgggggtttggatgccagctctgccactcaactctttagttgggaggtgacagtggtgatgggcaaagaatggcatggcgcatggcaggggctcagtaagcagtaagcaagagatgatcggggcctcagcgagggcaggggcagcctccttcccaccagaatctcctcttccagctggtctaggggctcagacaggtcctgctggctcagctgagcttgtgcagagaaagggctgggtcatgcagctggccaggaggccttgtcacccttcccaagggtgacaaggggtcctccagagctagggctcttgtccctgtcatgaaacagctggactaataggagactgacmttgcagacctatgaaccttccttcccttcccatgcctcattccctccttccaggaaggatatgagatgacctgacacaaaagcacaggctccatggaagaggaaacaggaaaaagacagaaccatgtagctgatgggagaggagaaattaggtgaagaattctgtccaaaatgtccatcaagattttaaacactcttttctcttgatccggtaaacctccttctaataatctaaaccgagaaggagggctggaggctggataccacttgagcgtccttcagtggagagtggcggagtaaattatgagagggcccaaccgtggagtacaacgcagccacacagcatgcacacaatgaggcaggcatgttaatatcaccaacgttaaagatggatgatttggctaatggctaggtttgatttgattcatatgatttaaaacatatatttggctggacgcagtggctcacacctgtaatcccagcactttgggaggtcaaggtaggaggattgcttgagaccaggagttcaagaccagcctgggcaacatagcaagaccttgtctctactagaaaaaaaaaaaaaaaagctgggaatggtggcatgcacctgtggtccccgttactttgtggaatggctaaattgatctaattagcatatgcgttactttacatacttcacacacctggataaatttttgtagagataagatctactttttgtagagacaaggtctctctattgttcaagctgtctgcaacttttggcctcaagcaatcctgccttggcctcccaaagtgctgtgattacaagcgtgagccactgcacttggcctgtagttttttgcgtaatagaaaaatatggccaggcacagtggctcatgcctgtaatcctagcactttgggaggccaaggctggaggatcgtttgaactcaggagttcgataccagcctgggcaacatggctaacccccacgtctctaccaaaaatacaaaaaaaattagctgggcttagtgctgtgcatctgtggtctcagctactcaggaggctaagactggaggatcttttgagccctgggtgacagaatgagaccctgtctcaaaaaaagaaggaaggaaggaaggaaaaagaaagaaagaaaagaaaagaaaagaaaaatattgcgctgttccatgtctctataaaaagcagagaaacaaaaggtggactccaagggccatgtgtctaaaggaaaatgagagggagctcatttcttcctggaaaagaagactgcctctggtttcatttgcaaatcctgggccacttcattcatttattatgtattactatacattatttactatgatgctgatacactacccgcctggtcccatgagcattttgggtttgctacctgtgattaatacattaataagatgatctctctcccctgccaccttatttttcataaaaagcaattgcaacaacaaaataaaacctaagtccttgtatgaatatttgtagaaagagggcctatcactttttctgtcatagactgctaaattgtttcatatttcttggaacaagtatgcatatttttgtcattaaaaagagattataggccaggcacggtggcttatgcctgtaatcccagcactttgggaggccgaggcaggcagatcacctgaggtcaggagttcaagaccagcctggccaacatggcgaaacgccatctctactaaaaaatgcaaaaattagccaggcatggtggcgggcacctgtaatcccagctacttgggaggctgaggcaggagaatcacttgaacccaggaggcagaggttgcagtgagccaagatcgtgccactgcattccagcctgggcgacagagtgagactttgtctcaaaaacaaaaaaagagattatagtggctgggcacggtggctcacgcctgtaatcccagcactttgggaggccaaggcaggtcaatcacttgaggccaggagttcgagaccagcctggccaacacagtgaaaccctgtctccaccaaaaaatacaaaaaaaattagccagacatggtggtgcatgcctgtagtcccagctactcgggaggctgagacagaagaattgcttgaacccaggaggtggaggttgcaaggagcccagatcgcaccactgcactccagcctgggcaatatagtgagtgagactccatgtcaaaaaaaaggaaagaaaaaagagattataaatgctcaagttaaaacgtttggcttggagatcccaagactcacctctgctcttcttggcaacctgggtgaacaggtgaatacagaggagcgtgagcttctagatgtgcccacgggagaaagtcaccttttctgtagtccaggcgtaggaggaatctgtgccaggggagggaagagaactaataaccactgagaggcaactggatgccaggccctgggcatgctctgagggccattgcacaagattcttgcaccactttgtggggggtcaacattctatttttttttttttttttttttttaaaagacagagtcttgctctatcgcccaggctggagggcagtggtgcgatctcagctcactgcaacctccacctcccgggttcaagcaattctcatgcctcagcttcccaagtagttgggattacagatgtgcaccaccaccaccagcaaatttttgtatttttagtagagacagggtttcaccatgttgctcaggctggtctttaactcccggcctcaagtgatccgcccactttggcctcccaaagtgctaggattacaggygtaagccaccatgcgggccctctctctgtttttcttaagtagctttattgagctataatttatatgccatgaaatttacccattttaagtgcacaatttgattatttttagcaaatttacagagttgcaaaacatccccacaatccaatgttgggacatttccttcaccccaaaaagatctcttgtgcctattccacggtcactccccactcccacctccagcccggggcaaacacgaatctgctttctatcttttctgcctttcctttttcgcacctggcttctttcactgaacatgtttttgagtttcatccatgttgtagcctctatcaatactttattcctttttatatttttttaatttattatttaatttgatttaattttttttctgaggctgggtctcactccgttgtccaggctggagtgcagtggtgcaatcatggctcactgcagccttgacctcccatactcaaacaatcctcccacctcagcctcccaagtagctgggaatacaggcacacaacaccatgccctgctaattttttttttttttagagatagggtctcactatgttgcccaggctggtcttgaactcctgggctcaagtgataccccgcctcagtctcctcacgtgtttacaggtgcgagccactgcaccaggccactttgttccttttcagagctgaatagcattctactctctgaccacattttgtttttcatttaccagtcagtggacatttgggttgtttcaattttttgactcataaacaatgctgtgaagaacatctgtgtgtaagtcttcgtggggacatgtgtttttatttctcttgggtagatacctaagagtggagttgttgggtcgtactgtagttttatgtttaactctttaagaaactgctaacctgttttcccacatggctgtcccatctcattcccaccagcactgtatgagggcttctgtgtccccatgtcctcatcaacccctcacatttgcaggtgatgaagatgcagctgagagaatggtttgttaggtcaaacagcacacagaggcagaattgaggtttttgaacccaggtgtacctgactttctggtctgggcatggactttagcaaaatgcaacagttagaggctctgaagaggcagatcagcggggtccaccaggctagcatcccgggatatggggcaaggcttggagaggtctgaggagtgattggacggggcctagtggcccttgactcacgccactacctgaaggctcagggctccctcatggccagtgssakgggcatccatcccagaaggtcttaacctctgccatacagaggtgccaagcacctctctggcaccctcccctgtcccgcctgcatttcctgcaggctgccatgtatcccgtttgggtctggatatgtccttgtcatccctacttccggccctccacaggaggaggaatgggctctcctgtcccagcccccagatctttacctctttctgccaacctgagtctgcatgcaacctaagagtgtcaaagaggaggaacaagctcatctagttcatttgtctgcctcagggaaggaccggtgacaggagaataggcgaggtgggtctggccagcaggtggcagggcagccccacctgtcctggccagccctcatcccttcccaccatcatcatggaaccaccacccttgccccaaggaaaggacgtctcacgggaccaaagggtccagaccacccatccaagcttcctttgcaaatttggaaaaaagaggaagaaggaaaatgtgcatttatggagcaccagccataggtcaaagcttcttcatatacaccctttctcttgatcctcatgtccaccctgagaactgagtcctcatctttcccctgaaattgactcagtggttcagtggcttgtccaagtcttgcatactaagtggtagacctctgttcccacccaccatacacagagtaagcctctgactcttaaaggcagggtggcaccccagacaatgtcctaagtgtgagctgtggaatcaggtacacctgagttcaaatcctgaccctgcacttccttgatgtgtgatcttcgataaatgactgaacctctctgagctgcagctgcgccgtctgtgcagtggagctctccaaacccatgctgtgaagactaaatgagacacctcatttgtaggaggagaatgagcaaagactgttattattttctgagactgggagacttcaggctggagagcagggctgatggttttcagtctcctccagaccctcgggagggtcgttctctttggtgctttgaccttctgtctagctggatctgtccccaacctgttcacaggagggcagggaaagacagataccctgaaggcacctggagatctgacagttccactgcccaaccttgggaggcaaattccaattgggataaaagaaggaacagagtgtctaggacttccgtctgtcctccagttatttcctctcctcttccttgctgcatccctaaactttgctcttccttcaaggctgagtcagacctcctcctctaggcggtctcccagcctaccccagtctaccccagtctaccctggcctgccagcctcaaggccgaggacccaaggcattrtcagcaccagacgggctgcgagctctgcccagggcaggacaagtgtccccaggctggcatgatccaagctgtggtctcccccaccccacagaggaggcgctgtggacgactcgggccgatgggcgggtgcgcctgcgcatagaccccagctgcccacagcttccctacactgtgcatcggatgttctacgaggccctggataagtatggggacctcatcgctttgggcttcaagcgccaggacaagtgggaacacatctcctactcccaatactacctgctcgcccgcagagccgccaagggcttcctgaaggtaagggggcccctcatggcaaggccttgcccctccccagatgtgcctcccagctctgggcctcacaggcctcctctccaactgcccactgggcaaggctcttaggaacaataactgtaaaagctgtcattgtgcgtggggctgatactccatgctgggccccgtactgagcttttatttgctgagcccctaccatgtgccaagcacttgttactcacttttcatttgtgatcacattcagggtgggctggaagsccsgtgtgctgggctgaggggccggacagactcgctgggaargccctgggaggggcagtgagggctgttgagtgaccaaccccttctcctccaaggggattctctgactgaggggaccctgggagggtggagcctgcaggtcccctgcagtctgggtgggggctctgagaggggcatgagggtcccagtccctgcccggctgacctggcctgtctgcctttgacctggagctcggcctgaagcaggcccacagtgtggccatcctcggcttcaactccccggagtggttcttctcggcagtgggcacagtatttgcagggtgagtggcgggggcagggacggggtctccagggggttggcagtgggcagagggtaggggagggtccttatctctttttagcagyccccacccactccccaccatcctgcctcctccctggggccttctggtggacctgcatctggcgccctctctgcaggggaggaggtgctcaggtgccttgggagcccctcctgccaggctatgggagctctctgggtctgggggctacagatgtgggggtgggggaagggggtggcccctctgcacctcccctaaggtgaatcttcctgggtctcctacagtggcatcgtcactggcatctacaccaccagctccccagaggcctgccagtacatcgcttatgactgctgcgccaatgtcatcatggtcgacacgcagaagcagctggaaaagatcctgaaggtttggggaagaggcagtgggcatggggtcagatgctgggtatccccatgcacctccactccaactcacacggaaccttcccgccctccatccagagtgtcctcatcctcaacggcaaccctctaatgcatacacagcaagcaaggcagggcaacggctacttacccatttgacaggcaaggaaatggaggctcaagggacatgccccagaagtggtgataaggccttgggtaggactcctgtccagccactgccttccatggctttctctttgggacagggtctcccctaaagggaagcaagagctgtgggggccggggtcctctggcagtggaagggttatgtgcaggtgagtggcttagggctgtgacatcttgagcactcaagtctaggtgaggaacagggtgatggggggtggtgagggctgccacagggtgggggttgagccaagtcagacacagtttgggcagagcaggagctcagagtgcctctagagccagcgggggcttttctggagcattgatgatgcctcctgatctaaggcacacccctaactggctctgtccctgcatgcaccatactggggtgtggtggcctggggacacctctctgtcccagctgaacccaacagcctttaaggcattcaagggctccctgcatcccaagggagtcctcagagactgacttgttggcttgcctgtgattctggagatgtcacctgggccacaccttccatctgtgcccgagggtgggacaaatggtctccaaccttccaagactatgcgatctggatccccagaggagccagagcaggtgcctatcctcatttctagtggagaagtttcctgaagcctgaaagagaaaagcaagtggggccagtatccttgggggataccagcagggcagcgccagaatccttgggggagacccaggctgcagcccagacccttgaggcagaacctcttggagggcatccccaaatcagagtgagtttgaaaatagcctcaggtgaggctgtgggcagcccaggccaagaacttctggctcacggcaaaataaaatgaagccccgggaagacctcagagctgcctggatagacgtacaaaggcctctgagcagggtttaaactcagaggtggtgtagagaagtgggtgaacacacacacttgggctggacctgccagagctcaaatgcagtgtggccttggggaggatggtgacagccgcagaggtcacctggaagggctggtatgagggtaactcttagaccagtgtctgactcttggtgggcacttgtattcatttgccaaggctgctggaaaagggtggcttctggggttggctggccatttttgtgttccttggcttgtagacgcatcacccaggcctctgccttcatcctcagctggcgttctcacagtgtcttcacgtcgtcgtccttctgtgtctgtctgtgtccaaatttcccatttctataaggacaccaggaatattggatccaagcccaccctaatgactttgttttaacttcattacctccataaagaccctatttccacataaggtcacacttggaggtaccagctatgagggctttggcatatctctttgcggcgggttgtggagggggagacaattcaacccatggcagcaccatataagtgcttttaaatcattatrtcaccccataggtgataccatgtccttcataatgcaccgcctcaagaggcacatgatggcaggtggtactactttcagttatgttgggcttcttcatgaccaccttctcttcttccactgtgaaattccccatcaacctttctcctgatggttttagcatcccttgatgatgtttgcctgaaattaattattttattaggtgtagcaaaatgttgaatttctaattcattggctggaattctccaaagaaagaactttccctcattacctggggctctttggtacctgagacactctgtttgtacagagtaggtgtgatagaataatgatcaattttggtgaatgttccatgcatatttgaaagaatgtgtactctgcagttgttggctagaaggttctataaatgttaattaaatcaagttggttggtagtattttaatgttgtcttctgtatctctattgwttttctgtcttcttgctctatcaaatactaagaaagggaatgtggaaatctccaattattatggtagacatctatttttccttccggttctattaggttttgctttatgtattttggagctctgttattaggcatatacgtgtttagattattatgttttcttgataaattaacccttgatcattaagaaatgttcctccttatccctggtaataattcttgttccaaaagtattttgcctcaaattaatatagccactccaggtttctgataattaatgtttgcattatgtatttttgtgttcttttaattttaacctagctgtgtctttatatttaaagtgagtttcttgtagacagcacatagttgagtcttgcccttttatccaatctgatgaaatttgtataaatagccaccatttggctatttttttatttgtcccatctattctttgttccttttctcctctttcctgacttttttgtcttttttatcttgttttcttttggtcttccatttgatcttcagtggcttattagctatcctttgttactatatcagtgtttgctctgattttacaatatgcatctttaacttatcacagtgtactctccaagataccagttcccatgaaatgtggaaccatacaacagtatacttccacttcccctcccatcctttcagctgtcgtcatccattttacttctatagaggttataaaccccacaaacattgttattactcttgctttcaacagttgagtatctttctttcttttttcttttttttttttaagacagggtctcactttgtcacccagactggagtgcagtggtgcaatcatggctcactgcagcctcaacctcctgggctcaagcaatcctcccacctcagcctcccaagtagctgggactacaggcatgtgaggctgcagtgagccatgattgcaacactacactctggcctgggtgacagagttagaccctgtcttaaaaaaacaaaaagaaagaaggaaagatactcaactgttgaaatcaagagtaataacaatgtttgtggggtttataacctctatagaagtaaaatggatgacaacagctgaatttttgtattttttgtagagacaagagtcttgctatgttgcccaggctcatctcaaattcctgggctcaagcaatttgcccacctcggcttcccaaagtactaagattacaggcgtgagccactgcacccagtccagctgagtatctttcagagaaaattttaaagaaggaaataatatgtttcatatttacccacatttttgccatttctgatactctgtcttcctttatgtagatccaagtttttatctgatatcatcttttcagccttaagaacttttctttttttttaaagatttgtattagtattttattacaactattctgtttgttcttttatattcaacatcccacatttatgtatgaaatgtacagaccaaaacttattattgccaattacttttttaaatttatttttatttattttattttattattattatactttaagttttagggtacatgtgcacaatgtgcaggttagttacatatgtatacatgtgccatgctggtgtgctgcacccattaactcgtcatttagcattaggtctatctcctaaagctatccctcccccctcaccccaccccacaacagtccccagagtgtgatgttccccttcctgtgtccatgtgttcccattgttcagttcccacctatgagtgagaatatgtggtgtttggtttttttgttcttgcgatagtttactgagaatgatgatttcccatttcacccatgtccctacaaaggacatgaactcatcattttttatggctgcatagtattccatggtgtatatgtgccacattttcttaatccagtctatcattgttggacatttgggttggttccaagtctttgctattgtgaatagtgccgcaataaacatacgtgtgcatgtgtctttatagcagtatgatttatagtcctttgggtatatacccagtaatgggatggctgggtcaaatggtatttctagttctagatccctgaggaatcgscacactgacttccacaagggttgaactagtttacagtcccaccaacagtgtaaaagtgttcctatttctccacgtcctctccagcacctgctgtttcctgactttttaatgattgccattctaactggtgtgagatggtatctcattgtggttttgatttgcatttctctgatggccagtgatggtgagcattttttcatgtgttttttggctgcatagatgtcttcttttgagaagtgtctgttcatgtccttcgcccactttttgatggggttgtttgtttttttcttgtaaatttgtttgagttcattgtagattctggatattagccctttgtcagatgagtaggttgcgaaaattttctcccattttgtaggttgcctgttcactctgatggtagtttcttttgctgtgcagaagctctttaattagatcccatttgtcaattttggcttttgttgccattgcttttggtgttttagacatgaagtccttgcccatgcctatgtcctgaatggtaatgcctaggttttcttctagggtttttatggttttaggtctaacgtttaagtctttaatccatcttgaattaatttttgtataaggtgtaaggaagggatccagtttcagctttctacatatggctagccagttttcccagcaccatttattaaatagggaatcctttccccattgcttgtttttctcaggtttgtcaaagatcagatagttgtagatatgcggtgttatttctgagggctctgttctgttccattgatctatatctctgttttggtaccagtaccatgctgttttggttactgtagccttgtagtgtagtttgaagtcaggtagtgtgatgcctccagctttgttcttttggcttaggattgacttggcgatgcaggctcttttttggttccatatgaactttaaagtagttttttccaattctgtgaagaaagtcattggtagcttgatgggatggcattgaatctgtaaattaccttgggcagtatggccattttcatgatattgattcttcctacccatgagcatggaatgttcttccatttgtttgtatcctcttttatttccttgagcagtggtttgtacttctccttgaagaggtccttcacgtcccttgtaagttgaattcctaggtattttattctctttgaagcaattgtgaatgggagttcackcatgatttgactctctgtttgtctgttattggggtataagaatgcttgtgatttttgtacattgattttgtatcctgagactttgctgaagttgcttatcagcttaaggagattttgggctgagacaatggggttttctagatatacaatcatgtcatctgcaaacagggacaatttgacttcctctttccctaattgaataccctttatttccttctcctgcctaattgccctggccagaacttccaacacaatgttgaataggagtggtgagagagggcatccctgtcttgtgccagttttcaaagggaatgcttccagtttttgcccattcagcatgatattggctgtgggtttgtcatagatagctcttattattttgagatacatcccatcaatacctaatttattgagagtttttatcatgaagggttgttgaattttgtcaaaggccttttctgcatctattgagataatcatgtggtttttgtctttggttctgtttatatgctggattacatttattgatttgcatatattgaaccagccttgcattccagggatgaagcccacttgatcatggtggataagctttttgatgtgctgctggatttggtttgccagtattttattgaggatttttgcatcaatgttcatcaaggatattggtctaaaattctcttttttggttgtgtctctgccaggctttggtatcaggatgatgctggcctcataaaatgagttagggaggattccctctttttctgttgattggaatagtttcagaaggaayggtatcagctcctccttgtacctctgatagaattcggctgtgaatccatctggtcctggactctttttggttggtaagctattgattattgccacaatttcagagcctgttattggtctattcagagagtcaacttcttcctggtttagtcttgggagggtgtatgtgtcaaggaaagtatccatttcttgtagattttctagtttatttgagtagaggtgtttgtagtattctctgatggtagtttgtatttctgtgggattggtggtgatatcccctttatcattttttattgtgtctatttgattcttctctcttttcttctttattagtcttgctagcggtctatcaattttgttgatcctttcaaaaaaccagctcctggattcattaattttttgaagggttttttgtgtctctatttcattcagttctgctttgattttagttatttcttgccttctgctagcttttgaatgtgtttgctcttgcttttctagttcttttaattgtgatgttagggtgtcaattctggatctttcctgctttctcttgtgggcatttagtgctataaatttccctctacacactgctttgaatgtgtcccagagattctggtatgttgtgtctttgttctcgttggtttcaaagaacatctttatttctgcctttgtttcgttatgtacccagtagtcattcaggagcaggttgttcagtttccatgtagttgagcagttttgagtgagtttcttaattctgagttctagtttgattgcactgtggtctgagagacagtttctataatttctgatcttttacatttgctgaggagagctttacttccaactacgtggtcagttttggaataggtgtggtgtggtgctgaaaaaaatgtatattctgttgatttggggtggagagttctgtagatgtctattaggtccgcttggtgcagagctgagttcaattcctgggtatccttgttaactttctgtctcgttgatctaatgttgacaatggggtgttaaagtctcccattattattgtgtgggagtctaagcctagtctctgataaaacagactttaaaccaacaaagatcaaaagagacaaagaaggccattacataatggtaaaggggtcaattcaacaagaagagctaactatcctaaacatatatgcacccaatacaggagcacccagattcataaagcaagtcctgagtgacctacaaagagactaagaacttttctttaacatttcttataatacaggtctgatggcaatacattctttcagcttgtctttgtctgaaaaggtgcttgtttttctgttcattttttaaaagtcattttatctgatttagatttatgggttcacagggtgggtttttttttctttcagcactttaaatatttcatttcaatgttttctatttgcatcatttctaacaagacgtctacgatatcttattttcgttcctctccacatagtgttttgtttttctggctgcttttaagatttttttccttttttgctgattttcagcaatttggttatgttgtatcctaaggtggttttctttgtgtttattctgcttaggagtcattcaccttctgaaattggtagatttatagttttaatccaccaatttatatttgaaaatttctcagactgtttttcaattaaaaaaattttctgggactccaattacatgtatatttgattttttgatattgtcccacaagtaatttttttccatttttttttctttctgaactttattttgaggctatgtttaaggctttttaggccaggcctttaggtagtctttactctaaggctaatttagcctcatcactaagacatgacccttctgggctctgcttaatgcctgatggggtccctccatgctggtggggggaaacatgagcaattcctacatcagctgctgtttgacttccagccctggtcattggtcttcctccagcttcatggagtttcaccctatgcatgagcagatggggagtcaatcaaagaccctaaaagaatttctagaactctttctctatatagttctctcctgtctgctggtattctatctcacaaattctagccgcctcagctttcctgagttctgatcttggtcacctcaactcagtaagacaactgggttctgtattcctctctctctctctctctctctctctctccctcccctccscccctttctctccctctctctccctctctctccctctgtctgtctctcccatagctcaaaaattgcccctgggcagaaagctggggcacacttagaggctcaccccatctgtttccctctctcagggatatcagtcctgagctgtctgtagtccagtatctgaaaacaattgctttctctccaaacaagatggccaatgtgtacaccgtatgggcactggggccctgggcgccagctggggcctgctgggcccacccagctattctatttgtccagtttcctagtatttacagtgcaacgatggatgttactcccttgtgatcagaatcagaagtctcaggaatatatattttagcaaaaaatcaggagttcacactgatatttctgttatttctataacttttcaaatgttatattgtgaggttttagcttactttatttattcttgtatttcttttattttaccttaaaatcttagttccttataggattaacataatcctacagtatatatcaaataattttgaaatagtattatcagtattattaccaacaataaggccaggtgcagcagctcattcgtataatcccagcactttgggaggccaaggcagaaggatctcttgagcccaggagttcaagatcagcctgggcaacatagtgagacccccctgtctctacawaaaaaaaaaggaaaaatttaattagcgacatgtggtggtgtgaacatgtagtcccagctactcgggaggctgaggcaggatcatgggagcccaggggtttgaggctgcagtgggccatgatcataccatagagcaagaacctgtctccaaaacaaaacaaacaaaaccaacaaaacaaaaccccagaaaccaataagactattgcatagaatttgaaattcctttttgcctttagagtgccactgaaaaagaggaatcaaagtgtactattataaaattccttgatcttgatgtaattctgtgtgtgtgtggttatgttactaacttagtatgtagtctaattcatttctttctttttttttcttctggttccttgatcttgggctaacttatttctttcagagtgttttcaagttttaggaactcattttttccctttctaaaaattttgtagtgttccccgccccacccgccccgccccaaagatacggcctcactatattgcccaggctggtctcaaactcctggcctcaagcaatccttctgcctcagcctcccaagtagctgggatcacaggcatgagccaccacacctgacttccttttacatataactttatttttcaaatggttaagacatttacatgattccaaagtcaaaatcatgtgagataacactcaaagaatttttgcttccatccctttcttcttccctttattcccgctcttcctatacacagtgaattcaatcaggttttggtttaaccttcgagtttctttttgtttgtttgttttgagacagagtctctctctggagtgccgaggagcaatctcggctcactgcaacctctgcctcccgggctcaagcgagtctcgtgcctcagtctcccgagtagctgggattacaggcatgcaccaccacacccggctaatttttgtatttttagtagaaacagggtttcaccatgttgaccaggctggtctcgaactcctgacctcaaatgaccctcccaccttggcctcccaaagtgctgggattacaggcgtgagccaccacacccggcctctttttgtaaacataagtaaatacttgtttgcatacatatatttacattgcacccctttcttacacaaatatagcatactatgcgcatattgtaaacttccttttttcacttaataatatatcctagaaaccactcactctctgcacatagaattctctccctctctcctstgccctstgctcctctccctctttctcctacagtcacatagcactactccattgtgtggctggatcatggtttgttcaaccaagccccagcttgtttggtggttttccttcaatggggagtcatccccagtcccctggctatccccacctttactgctcccaagttctcaggagggaaactatgggtgaagggtggcagttgtcctgctggggtcgaaggtcagagacggggcacccagagacctttactaagccgactcacacagggagatggggtactttttagaaggtgacatttctcttactgaaacctgatctatttttcctgtcaatgcagatctggaaacagttgccacatctaaaggcagtcgtgatatataaagaacctcctccaaacaagatggccaatgtgtacacggtatgggcagtggggccctgggcgccaggtggggcctattgggcccacccagctgacctagcctgcctgctccctgcatctggctacagatggaggaattcatggagctggggaatgaagtgcctgaggaagccctggacgccatcattgacacccagcagcccaaccagtgctgtgtgctagtctacacttccggcaccactgggaaccccaagggcgtgatgctgagtcaagacaatgtaggacagatgcccggtggggtggggggggtgcaagggggttatgggtggatctgggccatggctctgccccagtagcccctgggaaagctccttgggcccctctgctctaggagctgggataggtagaacagcccatcaatctgtggcccagactgagctcagcaagggggaggggaggcctgtcctggggttttcagagcctgcagaatcgccacagggggcaccacactggggctggcccccagggtggccacagttgtgagcaccgccagggctggcttgtggacrctgctgggatccatctacttgtcctccagatcacgtggacrgcacggtacggcagccaggccggtgacatccggccggcagaagtccagcaggaggtggtagtcagctacctgcccctcagccatattgccgcccagatctacgacctgtggacaggcatccagtggggggcccaggtttgctttgccgaacccgacgccctgaaggtcagtctgcctttaccgtgtgtccgtctgagcccgtgtgccaggccacgtccacatgtgtctgtgggccctgagtgcatttgtgtgtgtgctgttcctgtgcatgtatcagtcagaattctgtcagctgcagtgggcacagcctgactcgaatgaccaaacaagaagggaaactaggccgggcacrgtggctcacgcctgtaatcccagcactttgggaggccgaggcaggcacatcacgaggtcaggagatcaagaccatcctggctaacacggtgaaaccccatctctactgaaaatacaaaaaattagatgggagtggtggcaggtgcctgtagtcccagctactagggaggctgaggcaggagaatggcgtgaacccaggaggtggagcttgcagtgagccgagatcacgccactgyactccagcctgggcaacagcgtggcccagtctcaaaaaaaaaaaaaaaaaaaaaaaagaaacctgatgccattacataaggtcgagtcagagtggttcgcgggacttgtgacacgatcaaggacgggcatcctcagagtatcaccagaaggctacagcccttccctgaatcccagcttcacaggatatacctgttctttggacccttattttaactgtgaggaaaactttcccagaaaccccccagcaagtttccctccaccagcatctcagtgtcccaaagtgtcacctgtctgttctcaaaccatatgctgccgaggggaatgggattcttgtgtctgagttagactcatggagagttgccatgctcagggctgggatgagactgaggtcagcactggctgcctgactgctgcctgccaccagggttctgtgagcaaaaagcaaggcgacagccattgaggaaacagtatgtgccacccttgcgtgcaggtgtgtgtgggtgcccgttggagcatgtgtgtgccaccggcatgcctggctggtaagaggggacccctgggccccagaygcccctgacycaacaggcctgcctcttctggtgtgaacaggggagcctggtgaacacgctgcgggaggtggagcccacatcacacatgggggtgccccgggtatgggagaagatcatggagcgcatccaggaggtggcggctcagtctggcttcatccggcgaaagatgctgctgtgggccatgtcggtgaccttggagcagaacctcacctgccccggcaggtacagagggcccacgggcgggaggcctggggagagagtgggctgggtcataacccaaaacacagtgagggtctgatacgccatgcctgtcccggttccagtggccgggcagctctggagaccccgtgcagaggccccatcaatgactgggcttgagctcctgtgcgtttcccagggcctgctggggacagtcgctccacctttggattctgactgggaggagtaacttgctttctctgaagtgaaattcacctccctaggagcagcttctggcacaatctcctgaggtctcctgacctcagtaagtggctggagaaggggccacagtgatcaggacttagcctttccggccttttcagcatcccaagtgacccctcagatattttgccctttctatctttctatagctttcaaaattcccacatagttctatggagggtcagtgacgtaaatctggcttggtttcaatttagaagtagtttccattccccatgtgcctgtgaaatggtatgtttcatgagatgtgtgcacatatctgtgcatccacagcttcatttgcacagacacgaaacatgaacatgcacgaacaaagcatttgtgggcttcactggggtcccacgtttgtacatgtgtatacatgaatacatacttcaagtttctgtgcatgtgtattgtgtgtgcaaaatggcatgtgtctgtgttgttgcccgtacacctgtacacagctgaatctgtttgacttcctgggtcaagacatatttgcacacaaccatgtgcctgcatacctacatctgcatgcatgttcacgggcaggttcaatattcaaaccaaccaactggaacagacaactggaatggccgagccagggtgttctcactgaataccaccataccacccttttaatgtgtgratgtgtgtgtgtgtgtgtgtgtgtgtgatttcttctgtgaaccattctccctctcccaccagcgacctgaagcccttcacaaccagactggcagattacctggtgctagccaaggttcgccaggcactgggatttgccaagtgtcaaaagaacttctatggagcggcccccatgatggcagagacacagcacttcttcctgggtctcaacatccgcttgtatgcgggctayggcctcagtgagacctcaggcccccacttcatgtccagtccctacaactaccggctgtacaggtgaggctcgaggctgccacacacatgcacacccatgcgcccttgctggtactttgtgcccgcctgctgagtgccctggggatccccttctctttgcatgccagttgggtcccagagacctggccactgggctatggagcccctgagagccaacaatgccatcttgggccaagtccctagcttatcctcagtctagtaggagtggcctctgccaccgtgtcgtgagtctgtggttgaaaacagcctgcatagcccaggtgccccctgaacctatggagcagttttcctctggcccctccctcttttggagtggggtgtgctccagtgtgttctaggagagcagatggcccaggggccagctggggtaggagttggggggaccaggccagcctcctaatggacggtgagggcggtcagttctggggagtgatttgcaggatcatctattatgattaaatatctcctctccctgccagcctatcacagtgctccaagttctaccattaccatttcatttgttccttccttccttcattccctaaaaccctttacttggctctacctttcagctstaagtcccctgtaaaaatacaaaagccctgtgaggggataccttctagcaatcagtgaagaccgagcagttgggaccccggctccccagtgggggcttggaggagacggctccctctgaccagtctcccggcccctccctcgccagctcaggcaagttggtgcccggctgtcgggtgaagctggtgaaccaggacgcagagggcattggygagatctgcctgtggggccgcaccatattcatgggctacctgaacatggaggacaagacttgtgaggccatcgacraggaaggctggctgcacacgggtgatgctggccgcctggacgccgatggcttcctctacatcactgggcgcctcaaaggtgagcaccccaggccaggcacggtggctcatgcctgtaatcccagcactttgggaggccaaggcgggcagattgtctgagctcaggagttcaagaccaccctgggcagcacagcgaaaccccatctctactaaaaacacacgaaaaattagctgggcgtggtggcatgcacctgtaatcccagctattcgggaggctgaggcacgagaattacttgaacccgggaggcagaggttgcagtgagctgagattgcctctttgcacaccagcctgggagacagagctagactctgtctccaaaaacaaaaccaaaacaaacaaacaaaaaaaggcaagcgccctggacagctgcagtggggtgggagcaggaattccactgccagcactgtttacaccagctgctggtcttgagcttttattaagatggcacctttagtgacatcgttttatttactccactctcctatggggcaggtacttattaaccttaacttgctaatgaggacatccagagaggttaagtaacttgcctaaggtcacccagctagtaaatggcagagctggaaatcagacccctagagaaacaaggcaagtctttccagaagattcaggagcgtaagtattatgtatttttatatgcaaacayggatatgatggggaatagaatgcaaattggatataaaatttaaaataagacaaacttcccacagagacagaaatagttggggatgcctctgtggaagaatgttctgcctgcttcacccaagttggtgtcatgcccgcagcatccacgtgggaatcctgcaccagggcttcatgggggaaactgaagctaagttgagtgggtaaactactttgtggacatcatgcaggcagtgtgcgaccatgcccaggacccaactgatggccatggaggctcggccaccccagggagggacaaaaggtcgcggtggcgtttgggccctgggatgtgcaggctgatgagccctggaggtaccctccagtgagaccccgggagcaacaggtgactgcttggatgtgccatgggcgccgcctagtgtgcctctttgtaatggccgatgaggggacccacatccctgcatgggggaggatagtagccagaaaaccaaattcaaccagagccggccctccttttagaactagtatagtgagaggtaagggtccaaatagcttttctccaaatacatatccaacggacacagcatcctttccccatggccttgcagtgatacctttgtcctttatgaagtgactgtctatgagaggtctatgtgtggactctattctgttcccttggtctattcgcctatccgtgcaccaatacccagtgtcttaatttctatagctttatgacagggatagatatccggctaagtcctacagccttggtcttcttcttcttcaagatgaccttggctattcttggccattttcatttccatatgaattttagaatcattatatgtttcctcaaaaactgggtggaattttgattttgatttcattgaatctatagatcaatttggtgagaaaaatacatgtttatagtattgtctcttccaattcacaaatatgataaatctctccatttacttaggtctttttaagtttctctcaataatgtgctatttatttatttacctatttatttatttatttatttttgaaacagggtctcgctttgttgcccaggctggagtgcactggcgtgatctcggatcactgcaacttctacctcctgggctcaagtgatcctccggtccagcctcagcctctcaagtagctgggaccacaggtgcaagccaccacaactggctaattttttatttttgtagagacagggttttgccatgttgcccaggctggtcttgagctcctgagctcaagccatcctcctgcctcagcttcctaaagtgctgggattataggtgtgagccactgcatccagcctatgttttctagtgtagagatttttgcacatctttccttatatttacttctaagaattttttaaggtattttaaataatatcacttaaaatttttttttcagctcagatgttgccgcaaaattttttttctcctatttgtttgctgctggtatatagaaatacaactgctttttgcatattggctttgtatcaaatgaccttttgtggatcatttgatcagaccacatattcaatccagtaatgtgtatattcttttgaatttcctatggacacaactatatcatctgcaaatagcagatgaatttttttcttcccatgttgcacaggttaggacctccaggacagtgttgaatagaagtggtgatagtggtcatccttgttttgttcctgatctcaggggagaagcattcactaacttatcattaagtatgtttggctgagcacagtggcctacacctgcaatcccagtactttgggaggctgaggcaggaggattgcttgagctcaggaattcgagaccagcctgggcaacatagtgagatcctgtctctatttatttaaaaaaaattattaaatcttaaaaaaagtatgtttgctgtaaaaatttttagatgttccttatctgattaaagaagttcctttctagccttagtttgctaagggttttttttaatcatttactaatggtaaaagatgctggtaagaatgcagagggccgtagtgaggagaaaagggcaggaatgaggtagcaatgatgaggcatattttggggaggctgggtttttgtcttcccacatttccagagtctgtcttctcctcttcacctgacttctgctgtcctagacaaaccctgatcatatagacacttgccatggattcctctctagccagcctgtccctgaataaccactcttcaccccagctaccagagtaccctaaaactttgatctcacaccattcagtaattcccagctgcctgcacacaatccagctcctgagccagcactggaggcctctaagatcttccctgctcctctccagcctctgtctcacttgctacctgcagttcccttaaggcctgtgagcttcagcttctgtcctgccctctgcctgccaactcccgttcatgtttagcatgcagctgggcctggtgcctccctgccctggccctgcagcccctgtgcctccctctgtctcactgcccccctgcactgtgggctccttgcagccatgggcagccttgttctattctgtgcctgatgtcagcacaggacctgtgcacagaatgtgaccaattaatcttttttgaattagatagaaatgagggacaggagtacagtctcactaaaattagtcaatgtacattcgttaaatttattttattgaatttattgccatctagcctagaagtaagccatcagtactatcagacaacagcaggctagggcactgagtgcctggcagtctgttggacagaaggaaagaaggggagaggaccttccagggagaagggtacaagcaaggggagagccatcctagcagggcaggtgagagcatgggctctggaaatggactggatttaaaaccttagctctgccacttaktagcatgtgagcttggacaagttactgaacgtctctgtgcctcagtttcctcatctgcaaaacaataagagtgtctgcttcattattggtttattgtgacagttaaatgaattactgcatgtgaagtgcttagcatggtggtgagtgctgtgtgagtgacagggatggtagttattaagcaaaggcagggaagggaaatgacacgggctatttgggggcaggaactgggactggcagaagggggccatggatgagatgtctgagcaggctgagtcgtggatgacaagccgaggagagggaaacttgggtgagcatttgtcgtcggggtgctgccaccagcccccaagcaggtgtgagttgctttggagggcctgccactgcttcttggctcccagaaagggggcatctccagctgtgctgaggcttccgggttgtggttgaggcttgggttgtggttcagctggggcacctggactacattctgtgccgggggcctggccttgcctccccagaattaatcatcacagctggtggggagaatgtgccccctgtgcccatcgaggaggccgtgaagatggagctgcccatcatcagcaaygccatgctcattggggaccagaggaagttcctgtccatgctgctcaccttgaaggtgtgtctggggggctccagctcagaaggagcagccagtgagggggtctgtgggtctggctggcagaagccacattcagcacagggcacatccagatctcatggcttcattctggaatgactcaagtccrtgctgcctgcactgtaggaaaaactgtggcacgtggaaattccttctgtcccacataagccaccgtgatgatcctttacatgttactggcactttcccgtctacaaagtgctgctgccctccctcattgctctctgcaggtacttggaccccagggtggtagacaggcaggagttaccgtccctgctttacagacaatgacgtcactgaccgagctcttctaattctcagatcactgctccttccacaataacacgaggctcaacacagtagcagctactcattctagaaccgtctctttgaaacagagctcacatgattcacacccttgccgacagcagtaagacctcctccaggaccagggcttacgtcttgttgggtaaggcttggtcctcatctgatctctggcttttcagtgcactctggacccagacacctctgaccagactgataatctgactgaacaagctrtggagttctgccagagggtgggcagcagagccaccacagtgtccgagatcatagagaagaaggatgaggccgtgtaccaggccatcgaagaggggatccggagggtcaacatgaacgcggyggcccggccctaccacatccagaagtgggccattctcgagagagacttctccatttcgggtggagagttgggtaggtttttccttttcaccattgcaagggctgtgtgggaaggcagaggccatggcagtgcctaggaggtgcctgttaggaagcagccacggcaaagagaaggtcatggcaggaatctgggtgacacccatctacttcctgttagaggacattgatggctccatgcatgggcttgtggttatgtggagtctgttgaatgtataagatatgtgctagaacttcctttttttttttttttttttttttttgagatggagtctcgctgtgtcacccaggctagagagcaatggcacgaccttggctcactgcaacctgcacctcgcgggttcaagtgattctcctgcctcagcctcccgagtagctgggattacaggcatgggccaccatgcccggctaattttgtatttttagtagagacatggtttctccatgttggtcaggctggtctcgaactcccgacctcaggtgatccgcccgcctcggcctcccaaagtgctgggattacaggcgtgagccactgcgcccagctgatatgtgctagaactttctaatctgaacatgacatttaacttggccttgactatgggactgttttctccgaaaatcacaatggaactaccaggccaacaccaaggccctgctagtgttcagcctggagtcacgtggttctaggggtgagagtactgtgatcttccggaaagtcagcttgtgtgacaaagggataaggctgttccggaccactgcccacagaaccaggagagggctctggtgcagcctcagctgaagtcactcttggctgtagccaagagatgttcatgggatgttcatagaacaggagaggtagaaatggttatgccagtgtgattccctcaaatccatcacggctgaacccagatgcaattgtctacagcaaagctgagctgcaatcagagaccttgagcttatctggctgtctgctgccagcatattgaacgcaaggtcagagagacagaagatgtcttcactaagcagttaatataatgactttaacacagaaagtttccagttacacagtcaagagtgagttaggcactttaagctacccaggacctcaaatcagagctctttcaaacttgcttttgggggataaatcaaggttaagaaaagtaattaggggaagacctctcataaagaccatggcagaggctccccataacctgggcttcccctacccccatcacaaccatcaaagcataatgtccaacgttgtataaacgttcacaaaaatgcagagatgatgtgtactagctatctaatacattgctgtgtaacaaatgaccccaaaaatgtagcagcctaaagcagtaaacatttattatccacatttctatgggtcaagaatccaggaacagcttagctgagtggttctggcttgggtctcacgggattacagtcaatgtgagctgggtgcagtcacttgcagctgaggctcacctccgcgctcacttacgtggctgtcggcaggcctcagctccttgctgtctgctggccagaaacatccgtgtgtggccagtgggcctctcatgggctgtgtatcctcacaacatggcagccggcttgcccaggaagaatggtccaagagaaagcccaagacagaaacctagtctattttttaattgcttcaacaatttattcattcaagagatggaacaaataaatccatttcagagaaaatggactgagggtcaaaactgggtacaggtcaaggaaaaggcagatgtagcttacactactttcctatgtgtataaaagaaactgatcttttataacctattctcagaggtgacataccaacccttcatctatactccactggccacaaccagtggtataacacaggagactacacacaagccatatgaataccaggagcgatcactgtcttggaggctggctactgacggtcctgattatctggcttaattcctgagttatatataggactgagtgtgagtctttaccacacacattctcagagttctcagagcctgggcctcactcatttmttctcatttcccttttaggtcccacgatgaaactgaaacggctcacagttttggagaagtacaaaggtatcattgactccttttaccaagagcaaaaaatgtaatcagggcctatgcctgcagtttctatagaatagagggcaggcgttccgagcctcttcctgagccccaggtctcttcagtctgggcacaggcatttctgccaagtctgttagatctccaggtcagggcacagcactggctctacatttaccaggtcttacgccaacaatagctgacaattccaagaagcttcacgtgtgggtagttttaattcagtttaagtattgctttttgttcaggtgacaaatgagatcagctctccttccagaacgaaagggctgataatttttggccttagttcyaggtagattaaaaagctgctagctcacatacaggacagccagcagtaggctgtggagcgggtaggagagagatggctgatactgctcacgtgcgctgcaggaaaagcaatcagtcasaactcacctagcgacctgacttactctggaatcttggcgggcatcgccgaccctattattccattaccaggcactccgccacccacatgccaactgacttgatgcttaataaaactgctgctgcctgtttgattctatttaatgtataatttgaatattaaaccttttaacagaactgtcaacaaggacctgattttttttgtcaattgagcaggtgggaccagtgcagagagtagtgggcatttaactcacaggactgtgcacagcgggcatgcgagtgaccattagtgccctggaataaacaaaggtgcaggatggggtcaagtggcgcattctcataaaagcagccagctctacgttagcctgtcgccaccagaccaccccacttccattctgaatacgggaagcagccattctcagtagcaagctgagccaaaatgaccgaaggcatctgaacaggaaacaggtagagaaagcaaacatctcagttttggaattctttattactttgaacccaagagccactgataactggcacaatccaatgaaacagaggaagcagcagcttaaacaaaggaaaatacatttaagattataagtctgggggggcggttacaagcttaaaaagtgacccagacagggatatcattgctaaaaaaaaaaaaatccccttgtgacctgggtacattttgcaaagccacaggtttgcaatgttacacaagggccaaaggaggccatgagttgtctttggttgtggggacagagggtaactgttcatgaaaatagtgagtgtctgaagattaagaaaatcatgctgcagcagaggagaagggagaggaagacaggaagggaaaggagatgcctgagggtcaaaagctgagcccaagcctaagcccaagctcaagctcaagccccagcatggcataattttgtgaattaactcaggctgagttgcctccagtctttggaatgtcatcttatactggtactgctgaggcagagggcagtaattggtgctttgggataggagaaggggcagttgctgaaatacaaaattaatagcatcccaagttcctcaattgcagccaaaatacatgtgttcgggcctttcggcagtatcgcccccagaactacctgctgtagtgtggtccattcccagacagcaacatgcaagaataagtttacaatacactcagcccttctggcttcagatcaggggctcagaggctgtgacaactcatgatgctgaaaatgtatccagtgaaaatgaagtactagctctctgcttcattaaaagctcttggaaagaatattaaatctcaagacaacaaaataattgaacacacaatacatttgtgtctttgtatccaatatattacctttgtcttattaacaaaaattatatctctcattatatatttcttggatctgaagtttttattcacactcagtaatttctgtaaaggacaaatctgtctctattttccatatcatttagaaatataccacattcactctttttgatgtgaactttcccaggaaaattctcttgtgcccatttagttttagaagagtgtcattttgtgctattatgtcaatatcctgttttatttccattatgtttttcaaaaaccgaagaaaataaggtttttcttaaaaagttagacattttctcttgttaattctgtatcctgttatttacagctgaagagaaactattttaacttaagtgtaaaatggtttagaatagcaaatgatacagtccactcagagtttacaaaaaaaacatttaccaggtagacacttaataaataaaacaagcacttggaaaaagttctttgaaaacagacctagggacatccacctgcatcttttgcacagattttgttaagaaaaggccagatctaaaaaygtactgtcaagaaacaagcaaaccaatgcatacatacgtaggtattctaaacagaggttcatgtggtgtccatttagagtgactgatgtaaatgccagttgtagaagtgttaatctaaatcttttactcggcgacagatttcctctgtgaagtctgagcattttgcattgcctcccaaatcttttgtcaagctctgagaaaaggaaaaagcaaaaataaaagatgtatccgcaaactaaactaaaccaaggagattttaaagccctcagtgagatgccacctgggcaagttactcggctgctctttcatttagttcctcatttcaaagtgaggaaccactccaccaccatctacccagcccaggaggatcgggatccaatctcatagtgtatacaacagcactctgcaaagaataaggtgctcttgatgcaaagggaggcagggagctttaccaaaattttccctttgttcacacaatagaccctaacccagattagttggtcatggatatttaaataaaagcgaatctaaataagaagtttcataaaaatccttgggaaatatgtctcaggaatagacctgagacatattttgatctatttttgtttttattattattttttttttagatggagtctcactctgttgcccaggctggagtgcagtggcacgatcccagctcaccacaacctctgcctcctgggttcaagcgattctcctgcctcagcgtcctgaatagctggaattacaagtgcatgccaccatacccaactaatttttgtatctgatctatttttggaggctgggacacaaatacgaaagaaatatttaaatcattaactctttttttttttttaagagacggggtctcactatgtggcccaggctggtcttgaactcagaggctaaggtgatcctcctgcctcagcctatagctgcaactacaggcatgcaccaccacacctgcctaaatcattaactcttaaacctccctctttaggaaagaaagcctcccatacaactgatctgttctaccagcttatcctttctttcctgcatacagaccccaatatatttaattctctttatctttccatcctacacaataaaagggcccactatgtaattcaggcacctctctactgggctgtagattataacttcccaaatataactttaaagaataagaaaatcatatgacctccaatgtgactatcaggctgttaaaaacaagcctgaatttcttgtattttggccacacgatataatttcaaattacagaatttttttaaaagaagggaccaactttgaagatattacgctaagtgaaataagccagactcaaaggacaaatactgtatgattccacttacatgaggtacctagagtagtcaaattcatagagacaggaagcagaatggcaggtgtcagaggatgggagggggaagggaaagttactgtttaacgggtgcagagtctcagtttgagaaaatgaaactggtctggagatgactgatggtgatggttacattacaatgtgaatgtacttaacattattgaactgtatacctaaatacggctaaaatggcaaattttatgttatgcatatttttcacaatttttgttaaaaaggacctcaaattagggatgagtcttcaagtgcattatttcctctaacttcggaatagcccgcgacacttcttccacaggccacaattgcttaccgaggcggtggagcttgttgggtaaggcccagactgcgtgttaataccaacttgggtcatttaggagctgtaaaaccttggacatattatttattctctctgtacctcagtttcctcatctataaaatggaattatagcatctacttcaaagagttatagaaaaactttgctgagatgatatataaagaacttaaaagttgcataagtattcaattaatattagttattacttttataaaacttctgtattgcttttgtattatagatgcacacagtgtaacatataagactattgtattagaggtacatctgcatctgtatctgccactagattcccagctccttgaggctcagcatcttaccctattcatcattttactcttcacaccttataaggtacactcaacagacgtttgttgtgaagagtaaaaagttgtctataaaaatcaatgaacttggccgggtgtggtggctcatgcctgtaatcccagcactttgggaggctggggcgggaggatcacttgagctcaggagttcgagaccaacctggccagcatggtgaaaccccatctctactaaaaatacaaaaattagctgggtgtggtggcacacgcctgtaatcccagctactagggaggctgaggcaggagaactgctcgaacccgggaggtgcaggttgcagtgagccaagattatgacactgcaccccagcctgggtgacagagcaagactctgtctcaaaaaaaatcaatgaacttggccaaggtcacacagctaacaataggataattgggcgtgcacctgatgctgcctcccaaaccactgacctttccactgtacactgatgtctatacatcagtgctgcttaactttttttggatgaaatatctagatcctcacctcagaaaatgcacacatgtgcacacataccctattcaatctgggacccacgttaagaatccttgttcaacatcaaatgcttgggcccgcctgagaactattatctgtcactgtccctttcactcagataaaacacatggaagcaatgcattttacccagcacaagtaaatcaagattcctgttacctttccrtccttaattgtagcaaaacacgcagcctcaattcttgcagcatggtcaaaaagtcccatgtggcgcagcatcatcacggcactgagcaggagggctgtgggattcgccatgtccttgcctgcaatgtctggagccgtcccatgaacctacacatcgggaaaagtagcatcatcaagggagagacaaaaactaacagtcctcttctggggaagctggagtcttaaccatctttcctcagcaatacaaaatatgcactgaaagctactgcgtgcaattcatctgatatggactgaagaaataaagtctgggttgggcgtgatagctcacacctgtaatcgcaacacgttgataggccaaggcaagaagatcacttgaggccaggagttcaagaccagcctgggcaacatagtgagaccccatttctacaaaaaaattagcaattagccaggcatggtggtgcctgactacagtgccagctacttgggaggctgaggcaggaggattgcttaagcctagcagttcaagcctgcagtgagctatgatcacaccagtgtactccagcctgggtgacagaacaaggccctagctcaaaaataaataaataaataaataaataaataaagacttggagaaataaagagctaaagtaatttttttaagtataaaaatatggaccaacaatctttttcagtcaatttttggtaaaatattttaaggaaggaaggatacataataaatacctggagggaaatgaagagataaaccaaacatatatatatgtttatatatgagtgtatataaaaacaaacataggctgggtgcaatggctcacacctgtaatcccagcaactttgggaggccaaggcggatggatcatctgagatcaggagttcaagaacagcctggccaacatggtgaaaccccatctctactaaaatacaaaaattagccaggtgtggtggctcacacctgtaatcccagctacttgagaggctgaggcaggagaatcacttgaacctgggaggcagaggttgcagtgagccaagatcgcaccactgtactccagcgtgggtgacagagcgagactccgtctcgagaaaaaaaaaaagcatcattttgttttgacaatttgaaaaactggagttaaagcatacttatacagataactcctcctgagttcacacgctgttctgacctgagttctgtttcaggtgtcagggtccttaccgactcaaaaattgcaaccccattggctccaatgttgccacttggtgtcacaccgagacctccgatcaatcctgcacacaagtcactagcggaagaaaagcatttcaaagaatgtttttaaaaataaaacatctcacctagcacccagattttagtttttaattatcattctccactaaaaggaagtagcattccttggataaatggctgattccagggcaaaggttagg
